United States Patent Application Publication US 2022/0290142 A1 - sequence listing, part 2

SEQ ID NO: 1125 - DNA, 32148 bp, Homo sapiens
acaagggcttgagagctggccaagcagtttctctcagcttctgtgttccagcccctatgtgggaggagagaagggcaggaccacaagcctgccagaggctgcggcctacagccggggagaggccagcccggcctacagtgcggacacaggacagaggggagccaggtgagccaggtttttgggcagggagggactgggagaccccagaggagagggctgcccccatgatgaccctgtccgcagctccgagagaccctgagcaaggctttcttcactgggcacctcctgcaaatcaggccctgcactaagtgttagggtcacggcatgacagtgacaaagatcccggccctcttgcagtttctgtgttagtagcagggagatggaagtaaacaaaaacatatgaaatgagtaaatgatctcaaatgtcagaaggggataagtgaaaagagaaaaaggagagcagagtgaggaggacagggaatgccgggggagggggcttggggttttaaagagggtggcctctttaaggttaaatgaggttcaatgcaaaaagccctagtgacatttgaagaaagggtgttctgggcagatggagatgccctagcaaatgctggcagtggcagggaggcctggagcattcagaacagcaaggaggcagtggcagcagagcaaggaaaagaggtaaggcaggacgagaggagccgcactaggggcacttgcaggactccggggggcagaggatggggccccttgccagcacccccacagccctgctgggggtattggtttgaaagcctcatatgaatcatttgctacatgtggttgcatgacccttataaagtctcctccctttccaaggcccacatcctctccataaaatggtaataacagcagtgcatctgtcaggttgaggtcaggaaggaaggggatcaaaagcatggcagcctgccggagagatttacaacatacctgctgcaagctaggaaatgcagagctggcctcccaggccttgtgggaggaacatgtaagcaaataagaacttgtccctaaccctagagcacccagggaacgagggagctgaactttgttcagagagaacagcaggggcaaagggtaggaagagaatgagtggaggccagggatgagggcagtaagttgacataggagagaggtgagtggagtagggttgggtagacacagcaaggactccattccacaaacagtgggccccaaggagcagattccaagcaggagaggaaaacaatgtgatttgcagttcaagagttcacctggcagctgggagaacaaataagaggaacactgaggccaagtaagagataacagtggcctggatgctagccaaagagatagcaaggagcagatggactcaagagacttgtgaaataggatggactgcacctcatggttgcctcactgtggaggaataggggcttctcagaggccaagcacttgccatgaaggagacagggtccaacctgggtatgaaagacactcaggggctccaggggaacacttcacaggcaggaagaaggcttcctcccttcagttccacaatatacctgcagggctcatagaaatggagctgagtgatcctagaacttatgagcagtttaatgagaccaaggtgcccccagcaatcctccacagtggagctgtagtatggacaagtcatgtgctttgtggtcagaccccatccaactcctggccatctccagctgtgtggctaggggccactcaacctctccaggattattttcttcaggtgtaagcttcactgacttttttgtgaagatttccctaggcaattcatgtaactcaaactgcagtggatagagcccaatctttggggtcaggccctgtccaattttggctaacaagtattgaacaaacatgtaccaagcaatggctgcataccatgcctaccatgcacacagtgcctggtccacagccagtgtccacagggggagtggggaggtggagtggcattcaggtacttagggatgtctttcttctaccaaccagccctggctgacacccagccctaggcagttcctcttgcacacaggttctttgcactgaccaatgctgagagcagaccctcggagcagccgggttggaagtgtctctccatagtcaccagacagatccaggataggatgggcagcccagtgcaccgagtgtcattgggggatacctggagcaggcaaatgcaccccgacatagagagcgagaggtatatgcagtcctttgacgtggaacggctcaccaacatccttgatggaggtgcccagaacactgcactccgcaggaaagttggtaaggggaagctggggaatgggacatctgttttatgccccatgcttctcttgtaagaagagtccttcattagcagttctgcttccaaataacaaactttgcccttgaaattccactgttagagattcattccttcgaactgtaaagacaatcttcacatgtcaatattgcctgagcccacctaggggatagaagagtcctaggcagcagaagacctggattctggtcctaaaattctgccactgcatagctttgtaaccttgggcaattcactttcccaccttggtcctcagttttgtcatctgtaaaataacaataatgtctgacttcctttccagatccatgaagcaagtgggtgagaagatttcaaggtgccagaaacctcacccaggtccctaagccctctgttctctgtcctctgcagagagcatcatccacagttacccggagtttagctgtaaggacaattatttcatgacccagaatgagcgttataaggctgccatgcggagggcattccacatccggttgatagctcggcgcctgggttggttagaagatggtcgtgaattaggctacgcttacaggtgctcactcctcgagcagccccactagagagggatctacctgggatcacctggaaaccccctagccccatgagccatttcccccaacaaagggaagacttgttgggaaaccaggatgctaggtgccctttatctcctgtactctgctcaggcagggggtacctgggcccctgtctccaataagctactcaactacagcatctctccccaacagagccctttctggagacgtggccttaaatatacacagagtcttcgtgagagccctcaggagcctgggctcagaggagcagattgccaaatgggacccactctgcaaaaacatccagatcatcgcaacgtatgcacagacagagttgggacatggtgagctaggactgctgcgtgtggtgtttaggttgtgcactgcaaaactccagagggcccatttacatctaggtagtcataggttcatatgctccgagggacatatgtttaataagaaaacattccagcagctggcagtcaagggtcctgaggaaggggtgccaccttctaatttgcacgtattgtatgagctcccagtggggcaagtcattccttctggaaacatcagcagccaccccttctcatggactggctataggggactgtgtgtcccacacacagcccacagatgaaaggggagaactgcctgcaagtacagctgggagctgggccccactccatactgcgctgatgcctaagagttcagacccacctagaagcagcttcacaggtaagaaccccacctcaggccaatgtctaacacctctccttgatcctaagggacatatcttcagggcctggagactgaagccacctatgacgcagccacccaggagtttgtgatacacagccccacgctgactgccaccaaatggtggcctggagactgtgagtatacatccaccccccttccttaactctccccaagtagaagaatgttggagggcagagtagcactggctttgaggtccaacagacctcagattgattttctgttctaggctgctgaccttgggcaagtcagttcaccaacctgagcctcaggttcttactctgtaaaataggtgggatattaaacatttcattagtgagtggctggaaagtccccaaaggaactttgaagtagaggagacaatcgatccatgagagacaaggcctcactcacacacacacgcacaaacacacacacttggtctagtcctaggcactcctcacaaccccggttcctctcatctcccgagttagtggcagagcttgccaccagccagagcacaggccctgtgatgacacagtggaaagaatacgcctgcctgcccctgctgcagacacccaggaaggctcacgcccatcaccagcccccatcaggccaccaacgccgtacctcctgctgtggccaccaggtggcggccacatcaagcgtccctgaggcttggtgatttaccaagccccaacgagggatttccccttcctcaaacttgagaatttcacctccaaggacacatctgtggcacttggggacccacaccttgtgtggaaaaaattaaaacaaatatgctgagcccaactaaagcaggagagtgacagagatgagagacacatagagagagggagacacaggcagagaccagagacataagagagagacatgagccgggtgcggtggctcatgcctataatcccagcactttgggatgccgaggtgagtggatcacctgaggtcaggagtttgaaccagcctgaccaatatcattaaacctcatctctactaaaaatacaaaaattagtcgtgtgtggtggcgggcatctgtagtcccacctactcgggaggctgagacaggagaattgcttgaacctgggaggcagaggctgcaatgagccgagctcaggccattgcactccagcctggcgaaagagtgagactctgtctcaaaaacaaaagaaagaaagaaagaagaaaaagaaaaaaaaagagagagagagatgagagagtgatgacagaaagagagagagaaaataaatgaccactgtcaaaaatgaagacaaaagaaaccagccttttagatcagacagaccagggtacagatgaatcctagctctgcccctccaggccaatgaccttcagtgtgtcactctactctctgagcctgtttccttaactggaaaatgggactcatcatcctctctcccctgcaagaactggaaagcatctatcacagggtctagcgccacctagattttgataaatgataattatctgtattcattattataaggttgatgacagagtaattcattaatagttggggggggcaaaaaaaaagctggatcatttcacagtgcctttgccaacgctgctaggtttgcttggttctttgggggcaatcccctctctctttgatcagtgacttttcagggccccagaggtacccatccaaaaccccagccccaggaggctgggttggttgggaaaagcaatgcacaggtcttcctgtgacgggccgctactctctctgccctcagtgggacggtcagccacccatgccctggtccaggcccagctgatctgctcaggagccaggcggggcatgcacgcttttattgtgccaatccggagtcttcaggaccacaccccactgccaggtaagcccataatgctccctcaaggaaccctgccaggaggagagcccaggtggcctccctgacctggggccccagagggccacaggagtagctaagacatgtctcccttgggcagggagcggtccagttggacagacttggtgctaactggctaggtgaacttgagcaagatttagcatctttctgacctcagcttgttcacctgcaaaataggtacaataatcccagtgtcacaggctgctgtgacctggaatgtgtgtatgatacctgccacatagcaagcactctctcaactgataggtgtcctcatctccatctccttcaaggaatcatcattggggacatcggacccaagatggactttgatcaaacagacaatggcttcctgcagctgaaccatgtgcgggtccccagggagaacatgctgagtcgctttgcacaggttacagatctggggaggccggggacttgtacttcctggagaggggacctgcgctttgtgcaggctgggcctgggtcctccatagagcttagtttgggccacataacctcctcccccaagagaggctctgatatcccacagattggggtgaaacccctgcttaggagcagtatgatcttgggcacagagcctcagacctctcatgcagaaatgctcgtcacataggctgacagagcaatcgtggggtggggtggcagccccaggagaggatagggctgaggtgacctgcataatatttacccacagtgaggcctgacacagccaatcgcccaacagataccagccagaatgccagcaggagttctgaaggtcccaattctgccaggcatcacccctttagttatgggtcgtggggaggtccggggtgtcccaggagaggcactgtgaagcagggcacttggggaaatggcctggtattttaacactccaactccagatgcgccggttgaggggcgaggtgccctccatgtgtggagccccacagctctggagaagcgagggcatcctgggaagccttggcccagaacttgtgcccgtccttgttccacacaggtcttgccagatggcacctacgtcaaactcggtacagcacagagcaactaccttcccatggtggtggtgcgggtggagctgctgtcaggggagatcctccctatactgcagaaggcctgtgtcatcgccatgcgctactcggtcatccgccgccaatcccggctccggcccaggcaaggggtgcccagtgactgactaccgcagatatgctgcctcttggtcccacagtgcctccccctgacaccacccttctgccagagccagagtgctgggagcaggcaatgccccccaccacatacacacacacaaacacaaaatctacccagcctggccccatctgggcatgtcagaggagtctctctggctgcctctaacagggctgaccagccggcctaacctgcatcctcagtgcctggcccccatcgggctctatgtgatagtgtctttggccctgtagcaccaggtctgtctgactctgtgtctgtccgagtccagccgtgttctgtgcggctgtgacgggttggacgggtctgggtcagccagttgccagctgcatcagactatggctggctgagttgattctgtcaggccgagcctagcaaaatccaatatcatatcgactgtgtgtggctgagctcgttctgtccagctgtgctgtcagcatcccactggtatgtctagtctggatcccttttgttgtaattggttgtgttgctaccactccctccaccccacagcacagaatagcaagggctgcctgaaccctctgtgaacactcagctcggccatttcacttcatccctcagcttcctcagctacaaaatgggtgtggcagaagtggcctttcagtgtggtgtggagggtgaaatgcagtaaggcacattaagtcctcagcccagggtcctttcctctggcaagctcacagcgccctcgcctggcctgggcttcagaatctgggctgcaagagttctctggaggacagggccactgggaagaaggggcttctgctgctgtcctgcccgaggcccatttatctgggctgcagaagtgtccccagggtggttataagaaagatgcgccaggtaagcagctgctgtctgtagaggaggcttcttgtaatcacatcctctttcaatccagttactgcgagctcctaaatgccggacatagccttgggcactgaggacatagcagcggataaggcagacacagtcccttccttggggttccatcagacctgagtttacatcctaagagttattgtttaggcttgacatattcctcagcgcgcggcaagtgcacacgggcagtggaaggtcacaggttcaaatcatcacaggtgcagggccacaactcttcacctgaaatcttgggaccagacgtgttggagtctcagaacttttcaggttttaggataatactgtgtatatgctggaattctataagcctcccttaacaaggggcagtacccaccaacaaatgtgtcagtattcctgcagtgaaatgtgtggatgttcatgttagatgggatttttaaaggattatcaatggcctcatgtcagttcaagttttgcaatgagttctaaggaactgtctgtttttaaggtttttatggtgtcggggataggggaaggtggacacaacaggtagtgatctaaatcttctggttcttttcccttcagtgacccagaggcaaaggtcctggactaccagacacaacagcagaaactctttcctcagctggccatcagttatgccttccatttcctggcagtcagcctcttggagttcttccagcactcctacactgccattctgaaccaagacttcagcttcctgcctgaggtacctgctgtctgcggaggggcaggcgctggcaggcgctgggagctaagattgttccactcactggggagcagccacagccccatccccatgggcactccccacccccacctctcccagctttcagcatcccagggcgtctgggtgaacggcaccctggtatataaatttacccacaaccagcccccagagagctacaaacatactaagagaaaacaatcacacctagcgtagagaacacaggtccacaacccctgatgtgtatttgaaacctgaaaagctccgaaaaacagttgtttggaactcatttggtggcatagtttgacctgaactgacctgatttatccctctgagtgtgaatacattttgcagtaaaattattaatgtgtttaatcactaaagctgccccaaaccccactggggctattatataaaatgcactttaaatgccacttggcctctctataatccaaaagttactctgattcctaaacacatctggctcacaggtctcaggtaaagcattgtggacttacatatatagtaaaattcagtctgtccaggctaccatgctttataagcactgctcattaacccttccaactgcaatgaggcacagagagatcaagggacataactttcctcccaaggacttgaaagctccaaagataggcagggtcttcaagaaccaaaatctgaaagcagtcctgctgcccagcagcctctgtcctgttggggccactgtaacaaaataccataaagcagtggtttataaacaacagaaattggcctggcatggtgacttacacctgtaatctcagcactttgggaggccagggcaggaggattgcttgagcccaggagttcaagacaagaccagcctgagcaagatggtgagacccccgtctccacaaaaaaaaaaaaaaatgaaaaattagtcaggtgtggtagcacacacctgtagtcccaactactactttggaggctgaggtgggaggattccttgagcccaggagtgcaaggatgcagtgagctgtgattgtgccactgcactccagtccagcctgagcagcagagtgagacgctgtctcaaaaaagaaaaacaaacaaatttattgctcacagttctggaggctgggaagtccaaggtcaaggcactagtgcatttggtgtcaggtgagggcctgcttcctgaacggctttttgctgtgtcctcaaatggtagaagcagcctctttctttcttttttttttttttcctgagacagtctcactctgtcacccaggctggagtgcagtggtacaatcttggctcactgcaacctccgcctcccaggttcaagagattctcctgcctcagcctcctgtgtagctgggactacaagtgcacgccaccacgcccagctaatttttgtatttttagtagagacggggtttcactatgttggccaggatggcctcgatctcctgacctcgtgatccacctgccttggcctcccaaagtgctgggattgcaggtgtgagccaccacacccagccagaagcagcctctttcatgagggcactgatcccattcatgaggcctccaccctcatgacttaattacctcctgaaggccccaactcctactaccatcataatacctcctaatcctagtcctaatcatcaatacctcctaatcctagccctaacccttgagggttaggatttctacataagaattttaggtggacacattcagaccctgtcaccctcctacaacccagtaagtgggcttacagtggacacccatcctcataagctagctttctaaaacccaggccagcaaaatccgtaactcctggaggtttgtgggcccaatccaggcagcaccctcttcccaatcctggagacactggccaggccaggttttccttcactcttatgcccctacagctacattgcctaattgtgtgcctctgggtgagtcacataagctgagtacccgccttctcattcataaagttgtgagcagaggaaacacttcttacctcagagctgagctgggcatgagtagatgctcagtaagtggtgcacagggttggtccctatggtggaggccccctaacaccgcccaacccccctccatgttctcacagctccacgcactgagcacgggcatgaaggccatgatgtcagaattctgcacccagggagctgagatgtgccgcagggcctgtggcggacatggctactcaaagctgagtggcctgccatcactggtcaccaaattgtcggcctcctgtacctacgagggtgagaacacagtgctctacctgcaggtggccaggtaaggtccaggctgacccaggcctttgcccaagcccttggggacccaccaagcttctgttgggtggagggttccgtctgaggcccataaaaagagcaggctttgcgaagtgctatttgggagctgtccaattccccagtatgactaacctatccacttctaggccaccatcctctctcacctccaccacagcctcagacccctccctggtctcttgcttctatcctgtcctgcttctccacaggcagccggagggatctgttcagagcctagggaggatcacatctttctctggtttgaaattcttcaacggcttcccagtgctcataggaaaatgacatattctatgctgtggcctgcaaggtccatgtgacctgacccctgcctccccgtccatcctgctctcaccacctcctgcctctgctcacttcttcttcttctttttttttttgagatggagtctcactgtcacccaggctggagtgcagtggtgcaatctcggctcactgcaacctctgcccgccgggttcaagcaattctcctgccttagcctccgcagtagctgggattacacaccaccatgcccatctaatttttgtatttttagtagagatggggtttcaccatgttggccaggctgctctccaactcctgacctcaggtgatccacctgccttagcctcccaaagtgctgggattacaggcacaagccaccgcacccagccacctctgctcacttctgccggccacacacttctttctgtccaggaggcctttgcatttgatcccctcccacccaacatggccttgtttcctttggagcagtttcacaatctatcattgtctcatttttttgttcacctttttagctctactctccaactagattaggagctccctgagggcagggactacccctaccttgctcgctttagcatcgcctaagcttggtgcagagcctgcacacagaggctccaagcaatggccaagtcagcttcctccacacaggcgatttcttttcatccctcttaggtctgtgggccctggaggccgacagagcctcatcctcacctattctcaggtgaacaaacagggcaaatgcttccctatgcaaggagaaagaagttcactggcaaatatgaaaaacaacatttattatatttttaaaaatatataacatcccttggtttttttccaaattagaaaaggagtacaatagcacatattatgtactctgcactgtgccaagcactctacaaatatcatctcattccatttcacaaaccctcaatcagatgagaactgtcctccccacctagagctagagaaacagagacttgggaggtgaagcttctttcatcacacaggtctcggcgaggctgtatgggaatccagggctgtctaagcccagaacctgtaaccactggattatcctaaagcagcagttgagagtcacctataatcctcctactcctgttagcattcttgcctctatccttcttttttcagctaagaaaatttaatttccacccagtcactgtacaagtcattataaatcccaaaatcacagtgttctgatggaaaattctgtttgctcagatcacagaagggtttatgttcaggatcagagagtgtctggcccagctccacaggtcctgggatatgcctgactgagggcctcgaggcaggacggcccgagggggaaccctcaggagggaggccaggcagaggcctggtgacctggctctcccacgggaaggctggaacctagcatgagcttgcctgtctctgggagtgaggggtgctgggctgtctcacagagtctctgccctctcacctgcctcctcttccaacccccaggttcctggtgaagagctacctgcagactcagatgtcccctggctccacgccacagagatctctctctccatctgtcgcatatctcaccgcacctgacctggccaggtgtccagcccagagggcagccgacttcctctgcccggagctctacaccacggcctgggcacatgtggcagtaaggtaagccagtgctgagaaatcagccatcccacctgggcacaggctccatgccacactagggcctttggattggttgggtggacattcgtggattcagttctaaaaaccaccccatgcctagcctccccggtcctctcagttcctgccaccatgggcagagagaggggatgtcccccccatcagccatggacccccgtcacttccccatcctggtcacagtagtagaaggacatcacacctctggccagtgagatatttttaaaatctctagggtcctatggtgatttgcaatacaacgaatgtacccatatgtaaatactccaaatgtattgatatgcaaataccaataaataaagcaatactcactcgtacgtttgaaatatcccataatctaaaaataatttttgaaaatatgactacaccacgggatagaattcatttatttccagggtctagtaggctccagggaacatggacaaaaccaaggactcatccattctgtcattcaacaaatattgttcagtacctactatgtgttaggaatgaacaaatgtgccaggggctgggaatagagaggtcctgaccaaacacacataccaccatggaaaagatggaggtttaactacctaaaaagaaaacgttctgaatgctgcccccaaattaaaacaccgaaaacaggctgggcatggtggctgacaccagtaattccagcactttgggaggtcgaggtgggcggattgcttgagctcaggagtttgagaccagcttcggcaacatggtgaaaccccacctctaccaaaaatacaaaaaattttaataaaaaaataaaaaggaaacaccaaaaacaaactggaaaaacatattttcagtatataataagaggtcttatatcccaacctgtggtcccagggatggttaatagttatttcaagatcacaagcaacttggaacattcatttatttattccaaaaatatttattaactgcctataatatggcaggcactgttctaggcattagggacctatcagtaaataggcctgataaacaccccaaactcatagagctaacatttcaattgggagatttgaggaggggaagataaggctgctcgaggtgattaaagtgtcatggtatttctccttgcttgaaactcagtgtgacatctgcttatctattccctgacaaagcaaaaaacatattgcttaataaacagtttgctttacacacaaattctaagggtcatggatggatgggcagggaatagaaaataagaggggattaaaggttatttaatgactaatttagtggtttgcaggacaaaggttggttttctctttttgtttttaggtcccttgggtagaacctgcagcaggctaggtgaccgacgggcctctctagcctttacagaaaaaccattctccttgctcaggccacaggacgtcagtcaacaaaaaggcctgaacatactggtgtgaggctggaatctgcattagaaataggggacagctcctggcctgtggccctgaggctttataacatggcgattaacaacaagtcaaaatcctggctccactccttactagctgtgtgaccctggacaaattggttaacctctctgggactcagttttccccattgcaaactggggggtgcctgcccttaaaagagttaaaaagataataaatatcaatcatttagctttatggcacataagtggtcaataaacaggcattatttctacttctgagggaccacaggaagcccatcagttgtcttttccactcagtcaggaagctgaaccttttttgctttggctttcaggctcataaaggactcagtgcagcatttacagaccctgacgcaatccggagctgaccagcacgaggcttggaaccagaccactgtcatacacctccaggctgctaaggtgagcgcctgccagctgaagctgaaagggatccattttgcttcccaggcaggctaccctgctgggaaaatccgggctctgccattattccccaactctgcttcagtggcggctgccctcatttcacttccaaggctttagtccagggtattttaattaaaggacttaactccaaagcaatcttgctggcagctcttaggggaaaaggtaatgaggcagtgttattggatttgcttcaggttgttcaaatatttcctcccagatagaaaagcaggtcaagtctccccttagccccacaggcaatccttggatgtctgattccatttccactcgttttgtgtttctgcataattcacagtcggtcggcaaatatttgagcacccactctgccctgggcactgacctgggtgctcaacagtgaagccactgcccatgcacggctacaatcaaggaagcaccatgacagggaaatacaggctgctatggaatcccagagcaggtacacttctgcccacctggaggagtcagaaaggcttcccaaaagaagtggcatatcagctaagacttcaaggataagctgaaattagccagctaaagggtggggtggcagctttggagagaaaagtttccaggcaaagggagctgcgcgtgcaaaaggaagcagcaagaaggatcctggtgtgcttgggaggaagtgcaaatctcccaaggaggacctaaggagaaggactgagactaggggagaaggagagacaggcaaggcctctgaccttttgcaccactgtgaaaagttggggttttgttttcattgcaatgcctttgctgagtttgtttggaggtggggtaaagtgatcagtttcattctagaagaatcatgcaggttgcccaggatggaatgaaagggagcaagttagaaaggagcaagtctgaaccgggactgagggtggtcctgaccatgagcatggcagaaggcctggagacaagtgggtagatcagagatgctaagggggaagaaggcagggacaggcctcagagtgctggggtgggaaagaggtaagaacaactcctgagttctagcttaggcagctgggactctggcaccgccaataactggaaaactaaagtgatcacgccaatcctcaggcctcagacccagaaaatggcagccttggaacaggagagccctgaagggctgcagaggccctcgtgggacagggctggtcaggcaggctggacgttgagcaccaccacgtgacccaccacctccaccacaccacacgtgatgggattacctctgcagccctcagttctgctcagcctacagcaggggcaccccctgctgtgctaactgtcctgtcaacacagagggtgagccaaggcttcctgctttcactggatcaccaaaacagaaaccacagccacccattatccactcattcattttccaaacctatggcctgccttcaaatggaccagatgctgcttgccagggttacttcatttaatccacacagccctgggagggagactgacattatttccacttcaagggtgaggaaagagaactcaggacttaggtcccagaggtaggaaatagctgagtccagatgctttcccttcccacaccactgagggtgtgatgagtgactgaggtgagcaacaaattctggggggatggagggtgacagccagccagcctgcgggggaagaacacgtccctgacagcttcctggggaggtggtgccccagctgagtctccaaggtcataatggatagggctttctgtactctctgtgctttgtggggttatttagtctacagaaagcttcagcacccaactgggccccatctagaaaccataaatgtgcaggtagagataactgcaacttgagggaagaggggatgatactgccagaagagtagacaagggggagccacgggctaaattctggtcccagctctgtgtgacctcaagcagccccttccctctctgggctttaacttccctgtctgtagacaaaggggcatggaagagccctttaggctctgtcaggccgtggtcctataattcagactctgaccagaagagatgtcagtctccaggaccatgggaacaaatgctggcctcattataatccagcctcagtctcctgtggctttggccacacagggttaggaatacagccctggtgtggatctcactgctaccacttcctagccatgaccttgggcaaaaaacttaatctttcagagcctcagtctcttcgtctgcaagatagagctaataacagtacctactttgtaggattctaataaagattaaataagtaaaacttagagaggcagctagcacccccacccccaaattagacaggaggcaagatttaaaccaacacacacaatgtaaataatgttcactgtgctcagagcgtggggccaaggttcagctcagcccttccccaaagtgtagaggtcacctctgtctctgatcctcatcctgctttttaaggcccaggcccctgggcagctctccatcactccactcctcaactcagagccttgagcatttgaggatgtggctctcagattaggacaggaaaaggagtgcgggtccgcagttctgccaagctggacccagtctgagcaacaaaggctactggagccagcagaggcaacacagcacatctgctcaccttccacagccaaatgctgcaagcccagcatggctgtgagcacaccatgtctgaatggcaaagtggagttgtcagcacctgtgtgagggccccctaggaaacacaagttctttccaagtgagaaagcggatcgggtcactgcccagctgaagactcccagtcccacagagcaaattctgaccatgttattcacagcccttcactgacctgggccccaggtatgagtccaccctaacctccatggttccccatcatcacctcattataccaccacacttcagcctcattaaattgcctgcagcttcctgaaagtacagccttttgcacataaagctccccctgcctggaatgacctttcccccaactcatgtccgcctgggtgaactcctttgaacccccaaggcactctttttttttctatgatagagtctcactccaccacccaggctggagtgcagtggcacggtctcagctcactgcaacctccacctcccaggttcaagcaattcttgtgcctcagccttccgagtagccagaattacaggtgtgcaccaccacacctggctaatttttgtattttttgtagagacagggttttgccatgttggccaggctggtctcgaactcctgacctcaagtggtccgcccacctcaacttcccaaagtgctgggatataggtgtgagccaccgcgcccagccgaacccccaagacactctaagtcttgctactgaaaatcactacagcagcatgggcatcacaggggaccttgttagaaatgcacagtctcaggccctgccctggaatctgcattttgacaagatccccaggtgatctatatgcacataaaaaactgagaggcagggcggggtccagaggctcacgcctgtaatcccagcactttgggaagccaaggaaggaggatcacttgagctcaggagttcgagaccagtgtaggcaacatagcaagaccctcgtctctactaaaaatacaaaaaaaaaaaaaagccgggcatggtggtgtgtgcctgtggtcccaactactcaggaggctgaggtgggagaatcacttgagcccagtgggacagaggttgcagcaaggcaagattgcaacactgctcttcagcctgggtgacagagtgagattctatctcagaaaaaacaattaagaagcactgctttatactttctctcttccttgctctcccttatagaactcatatatcctacctgacaaaataattgtgtgtgcttgtcttgacgagatgcggactgttcaaaatatgttacaaccagtaggacaaggcaccaaccaatcaaaatggactttagccctaggggaagcaaggtcctgaaggcctcctgctgagtcaaacattaatcctttagttgctgggctgtggagagaaggagggggtcttcgggaaggagtccatctggcagaaggggctctcacagggttgatggcagtggacagttgccagctggtattaaagtattatttttacaactgccacagccagaccataacatatgggctaaataacagcactgcttaccttaaggagtttatactctagctggaataaatttcatatatatcttgaaactttctcaccccatggtgcacacatgtgcacgcacacacacacaccactgacttgaacacagcagacaacaaatagctattttcttttcttttctttttttttttttttttttttttttgagatggagttttgctcttattgcccaggctggagtgcaatggcatgattttggctcactgcaacctccgcctcctgggttcaaatgattctcctgcctcagcctcccaagtagctgggattacaggcatgcaccaccatgcctggctaatttttgcatttttagtagagacagggtttcaccatgttggtcatactggtctcaaactcctgacctcaggtgatccacccaccttggcctcccaaagtgctgggattacaggcgtgagccaccgcgcccagccttaaaatagctaatttcttaagaacagtggtgctgtcctccaccttccccaggccagcctccaatatgcctgtattctttccttctactttccaacctacttgaaaccgctccaagcaaaagaaaacaagggccatgtttcaaagcccaccagtcccccccgtccccgctcccccccccaacacacacatatacacaacatcaaaacgccttgatcagacccagagctaggagaaaaggcagctgctcatcagcctgctgggaagcacatcatgcctcaagtttattccagccatcttgccatgcttccagggtgacttctggagtagaaaaccagaaatcaggagaacatatctttgtgtctttgtaggtgcactgctactatgtcactgtgaagggttttacagaagctctggagaaactagaaaatgaaccagcgattcagcaggtgctcaagcgcctctgtgacctccatgccatacatggaatcttgactaactcgggtgactttctccatgacgccttcctgtctggtgcccaagtggacatggcaagaacagcctacctggacctgctccgcctgatccggtgagtggcagagacttcaaaccatgttagtcttcagagaataaccctaccccttgttcacaggtcacttccaactccaaaaccttgctaatgggcagagcagcaacagccctggagaggtctacaccctattatcattacaccagcataaagcattatgaattaatgaaagaaaaaaatgggaaaaaatgggaaaaatactgaagaataaatgagctacctcagttgaactctttacattgtcaaggaaataggaatagtatctaaggaaaatcaataaaatgaagcatgctacatatgaatgatatgtgctaatgtgctaataatagtctcaaccatagctaactttttttttcttttctttttttttagacagggactggctctgtcacccaggctaaagtgcagtagtacaatcttgtctcattgcaacctctgcctctgggttcaagtgattctcctgcttcagcctcccaagtagctgggattacaggtgcccacccccatgcccagctaatttttgtatttttagtagagatggggtttcgccatgttgaccaggctggtctccaactcctgacctcaagtgatccacctgccttggcctcccaaagtgctgggattacaggtgtgaaccaacgtgcccaggcatagccaacctttaaagagcacttatgtgacaggccctgtgccaaaagcttttacatacatctcatttaatccttacagccctttgaaatgggtactattaatctcctcattttattggaaaggaaattcaggctgatgggagttgcccagtatcacacaatcagccagaggaggggctgggtacaatctcaggtctggcccctgggcatgagctcttaacctgtatgttaaggttaaggttgaggtattatatactttgaacacatcctagtctttgttgaatgtgcttaagcaaattcttaccaagtttagtaaacttaccttaatcttccctcagcttcaagatgaaaaattttttttaactctgtaattcatatattgatttataaaataataacacaaagttttttaatgcagcattaatgcagtgccatgtatggtgaatgaaatactaatgcagtgctttcacactattattctataatctaaacgattgctttaaaaacatatcaaaaccaaagcccaacctgatcagagtcctagaaaaaaatagaaataaaaacaataaagaaaaaaaaaagcctgggcaacatggcaaaaccccacctctacaaaaaatgaatcaggcacacacctgtagtctcagctactcgggaggctgaggtaggaggattgattgatcccaggaggttgaggttgcagtaagctatgatcacaccactgcactccagcctgggcaacaaagtgagaccttgtctcaaaaaaaggaaagaaaagaaaacattgcaaattatttaccattgtccataagattaaaaaaaatggactaatttgagaatataatctttttgagacctcactgggcagaaaatatgatacctattgcatggggttagaggcgactcctagaatctccaacaattcttatatcaacaagactaataaaaagaaaaaaagaggctgggagcagtggctcacacctgtaatcccagcactttgggaggccaaggtgggaggatcacttgaggcaaagagtttaagactagcttgggcaacatagtgagaccctgtctctaaaagatttgtaattttttaaaaataagattttaagacaggtttttaaaaaactagaccaaattccttttatttctcacaatatgcaatatgttacatgccctttatgactactcatagcatgtaacagatagctggtggtcaaaaaaatgtttgttcaggccaggcgcggtggctaatacctgcaatcccagcactttgggaggccaaggtgggtggatcacctgaggtcaggagttcgaggccagcctggccaacatggtgaaacccggtctctactaaaaatacaaaaattagctgggtgtgatggcacatgcctgtaatcccagttacttgggaggctgaggcagaatcgcttgaacccgggaggcagaggctgccgtgagccaagatcgtaccactgcactccagccttggcgacaagagtgagactccatctcaagaaaaaaaaaaaagtttgttcagttaaatcatcaaaaactgtcaaaaatacgtttgacacaattatgtcccaggtataaaactttccctaatacagggaatccagtggtgaaaactattaagagcataattaagtactgcacagttcaagcccaagggtgtccatctttttgaaactctcagaatttaaaagcacttgaaaataatgttctagccccggttgtcagtgatgataaaatacaaaagattaccttaacaccctataagcatgttttttaaatttgcaaacagcatttctaagtgcttgccttggctccagaaacttacaattcaagacaagacagacagcccagatgcaatctgccaacttactcatgcgtcaaacccagaaattgatttacttccatgatggttcctaagtagccttactactgcagggtaattaggcacataacagattctatgcatatcactgtttggtgtcacagttccctgccttgattagtcactatctccctaagatttctgagatgaaaactgaagggcggcatagtatgctatggatgccaagaacaagctctctgcaatgttaactgacccaaacagtttttagttgtttaagcggtcataaaacctcagctggggggacttccaggtaaagatgacagattaaactatgcatttacttctgttctttcccgaaaccctactaaaacatcagtgaatggactgaaattttttaaaaggcataaacccacaaagagaaagagatgttgtctctgtgttgtccaggctgctcttgaactcctgggctcaagggatcctcctaccttagcctcccaaagtgctgggattacatgcatgagctaacacacctagcctctgtgagtaattttaagactttccttgactctgccctggcagaagggtaaatagaggatctgtggactagggagcatcaggtatagttgataataaggctacccttcagaaaacacagggttctttataggccaaatactgacacctccctcccccagaccttttttcccactggttcctaaaaaactggcagccagactagtaccctgcaagaagatggtaagatgatccttctctggagaatctgaccagcccaaggagaaggagctaaagacactgacatcagagtcccccaatggtccacccaattcactccatagtgaaccccatactagcaagcatagccacaagtttgtaatcagctagttaaggctttgcttttagctatgatcagacactcagggatcaccaaacacctgaagaatgcccctaacataaaagatggagaccaaaacaagcaagaacaaggcaattcagaggacataagagaatccacagggagaagaaaacttaaaaaaaaaaaacagtgatatctcagagttaagagacggtattgcaaccacaaaataaaaacctgaatgccattatttaaaactaatattcagagaacctaaaaaaagagctccttgaagttaaaaaatgataatggaaatgaaaaactcaatgtaaggactggaagataaagttgcagaaatctcacagcaagaaagcaaaaagacaaaaaaaaggaggacttttaaaaagtaagaggaccaatcttagctgttcatcatctgaagaacaggtctagaaagaagacagagaaaacagaaggaagcgaatcattaataaaataattcaagaaaacattcctcaaatgaaggatacgagtttcagatgaaaaagggtcacagatgcctacagactagaggagaggagacaggcacacacatgcacaaaataagtcacactgtataccatgtgaaatggtaatacctaccatgaaagaaaggatagcaggaagtggaggaaagaatgctgggggtcagtagggaggagggggagctacaattttaagtaggccagagaaggcctccctgggagggtgacatttaaggaaagacctgaggagaaggtagggagaagctgttgtggctgctagggaaagagcattacaggcagaacataagtacagtcatgcatcacttaatgactggaggatccgttctgagaaatgtgtcttcaggtgagtctgtcatcatgtgaacatcacagagtgtacttacacaagcctaaatggtatagcctattgctcgtacagtcacacctgcaaagcatgttgctgttctgaatactgcagccaattctaacatcaatcactaagcaataggaatttttcagctctatcataatgtcatgggaccgccatcatatacatggtccatcattgaccaaaacatcattatgcagtgcatgacagtacaaatgttggagaccagagtgtgcttggcatatccatccagagaacacagaagaggccacaggggcaggaatggcatgactgcggtggaaaatgacggcagagggcagagagttaagggagtacagtagggggtgggaagagacggtaaggtagatcattgcaaagacttaagagaatgcgagggttttgagcatgggatagaatgggagggttttgagcattggatagacacaacctaaaagaatctgatgtgtatttttaaaggcttgctccagctgccatattaagaactaagagtgaaaagcagggagatcagctggatcgctaatgcaatcatccaagtgagtgatgatagtggattggagcagtgacagtgctggaggtggtgggaatggttgaagtttgaatatatcttgaaggcagaacaggatttgctgacagattagatgtatggtgagaaagaagagaagaatcaaggtttttggtcagaagggcagagctgccatttactataaatgcggaagactacaggaggcccaggtttgggcagggtggacgggaaggagtttgggttcagatacattacttttgaagagcctatcagaaatccaagtacagatgttggtaagcaggggacactggagggataagtttggaagtcattggcgtatggttgatatttaaagccttgagaagaacatcacaaggagtgcatgaagagaagaggtccaagtactcagtcttgagaccctcgcaagataataaggaagtaaccgtggcaagagctatttctgtggagtggtgggagtaaaaacatgaacagatccagttcaggagagaatgtgaaaattggaaatcataagcataaacacacataacactttcagggagttttgtcctaaacgggagccaaggtgatggagaaggaaatagagtcaaaagcttgtgtttaagatgggagaaatgattgtctgtttgtatactgatggaaatgatccagtagagaggggatttttttttcttgtacctttctttgaacttgatcttggcctcccatcacgccttgtgtttaagagcaaggtctttgaggagatccttgttgatgacagtttgtccaagaggatatctacagagtaccttgtgggcatgaggtgattgcagttataagcttttgcaaaagacttgatccttgacctcttggagatcttcttgcctatggcagctgtcactttgtgaggatagcagtcaattccagctaccaaagcatgactgtaagaatggactgaggtgccatcatcaatgtccttcatgataatggctttgcgtccagagtagcatccagccaggaccagcaccactttcccactttttcatgaacttgcccattttgacagcaaccagccaggcctacagtaaaaagaaagaagggcatttccactaactttttacccctgaggggaattttgatgttgttggagaaaggcaggagaatgttgttctccagtatgcaagaggaaaagacatctagtagacaaggagggactgaggcctgagctgagagcctgaagagagaaagcattgtatgtataaatgcaagggtgggaacttacacagattctcttactgcttccacttcattagtgaaatacgatgtaaagccatccaggcaaaagagatgggaaaggtggatagtgtcaatctgaggatcaaagagatggtaagaaataactgcctaagaaaaagaaacagtaaatgaacaatgagtaaatatagcaatgtaatacgattgctgagctgcaatcagggcccacttgagcccttattacaccagttatgattgttttttccagccatgtatagttacaaaggtggtggcacaaagtgggtggaaaactaaagacaaagaggtatgcgttttgctaaacaggtatgacaaagcaagaaaaatcgttgagtgtgtgtgtgtgtgtgtgtgtgtgtgtgtgtatatatatatatatatatatatatatatatatatatatatatatattttttttttttttttttttttttttttttttgagcgggagtcttgctctgttgcccaagctggagtgcagcggcacgatctcagctcactgcaacctctgactcccaggttcaagcgattctcccacctcagccttcccagtagctgagactacaggcacacaccaccacacctggctaatttttgtatttttagtagagacagggttccgccatgttggccaggctggtctcgaactcctgacctcagctgatccatctgcctcggtctcccaaattgctgggattacaggtgtgagccatcgcgcccggcctgttgaatgtatttttgagagagtaatagaacatggaatttcagctggataaggaatgaagtgagaccacaagggggcagggggacattaaattggcggtagggctcatatgatgttggggatcatcaagaaacgattacattggatacagtatcccagttaccaccaatgctttaatgacacacaatcatcataatgtcaatactaaatattggtctggccaaaattataactatattgggaggcccgaaggccaggaggaagaagaatgggaacaaggggaggtaggagtgaagagagggggtgataaatataaatctttaccttttgaatgaagattcaacagataatatctcaaactgaaccatcaacaagcagcaatataaacaagatattttgacattcagataaatactgaaatatcaactaaaagattgaaattgccagccgggcatggtggctcatgcttgtaatctcagcactttgggaggccgaggtgggcagatcacctgaggtcaggaattcgagaccaacctggccaacatggtgaaaccccatctctactaaaaatacaaaaatcagccaggcatggtggcaggcgcctgtaatcccaactactcgggaggttgaggcaggagaatggcttgagcccgggaggtagaggttgcagtgagctgagattgtgccactgcactccagcctgggcaactgagactctgtatcaaaaaaaaaaaaaaaaacagattgaaattgcttctgaggaaaaagaagtggaaatcagacaggtatatgctcgttatttatttatttatttatttattttgggacaggagtctcactctgtcgcccaggctggagtgcagtggcataatctccactcactgcaacctccgcctcctaggttcaagtgattctcctgcctcagcctcccaagtagttgggactacaggcatgtgccaccatacctggctaattttttgtatttttagtagagacggggtttcaccatgttacccaggatggtcttgatctcctgacctcatgatccacctacttcggcctcccaaagtgccgggattacaggcgtgagccaccacgcatggccggatatgctgtttttttaaacaagccttacggaaccctttgactcattatactatgcacatataactgattaaaaaataaaaactaaaaaaaaatgctgaattgtttgaaaagcgaataatcatgcaacctctaattaggtattgttattcaccatccaagactagtttgattcataagagcaatctaaaatacttacaaactcttgtttcctatcccaggaaggatgccatcctgttaactgatgcttttgacttcaccgatcagtgtttaaattcagcacttggctgttatgatggaaacgtctacgaacgcctgttccagtgggctcagaagtcaccaaccaatactcaggtagttgagtggaacacattataaattatgtaagaaagcagagaacaggcagtgaatacaccttcatgttctcccattttaattgattcccgttaggttggcaatcacttggcgtagcacgtctgtttaaaatattcttagagaacacataaaagaaacaaggagtggcagtatggcctggcaggaactctgagcctggattgtaatcagcaaaatgcactgctcggaacttagtaaagggaattaagaggaaggcccaagctctaaatcatggcttgacagacccaagtgcatacacacagagtggtaaaccggcttttaagtaacaaaaagaaggagataaatcactgcggtaattgaaccaccttattttcagccttttaactttcagttttgtgtagataaaagtaggtattcagaagtggtaggaagcttgagggatgtctctcttagacctgattgcctgctagagatgataccctctcctcttcactctaaggaatacaatccaaggagcaaagaaagctgctgcactgccattagtagcccaggaaagccatatgagtgacaattaaaagggtcatgccaaaaaaatccccagccatcctaggagagcacaccagaactctacatcattaacagcgagaagacggggaggactcataaggtcccaacactcaagggccagggtatgctcgcagctctatgcttatgagcctctttgggaaaagttgtaaatgtcaatgaatatgttaacaggagtgaggtaataaaccctgtagttagaatatgaggaaccaatatttaatagcagattttacatagatgatcaaaacaaaaagtctataggtacaaaacagattattttaaattttatagtgcaaatacatgattcaggtggtgaagctttcttttttacctctttggtccaatttcagaaaaggtgtcttaacaccacatcaaattggcaactctcaggctttcattcacacccagcatggtgttagacttgctcttaacaatttgcagcctgtcataccacatggcttaatttaacatgattatctaaagttacaacacaactaacccatcttggtcactccctgtccccagaaagacatccttttaactcaaggaaatataaacaatatatgttcactgctttagtacagttaacctacttccagtgtgttactttttctaatgattagatctaacatttcaatcttggcataaaaatacagcagtcctcccactccagactagcttccatggtctaaagataaatgtgtgccctttggtgctccacagaaaaacccgccctgctataacacctgtcagaaatgctgacatatatagcccaaacctgttatactggcaacacaggaaacattctggtttctctagagagaatggagggggctttcttgtgttttagttggttttaatatttattttaaaagactttaatctggatactacatgagaacatgtttatctaaacgagaggaatgactgacccagagggtcaacacatttgggaaaacattgatgcacttcatcccattcacttctatctccttccacttgactgtgaacaacgaaggagtcttcaccttcccaactccaagatctatcacagagtagacactccacgtctatggaataaatgaacatggttttacaacctgcatagtgagacaaaggaatctgctgcatacacagtgccacacactcttgtcatcctagcttatattaccttcctaaaaaggtgacaggtatagcattgtggatctttcacgcatgataatttgggaatgtgaagttacaaatgaccttagtgaactgtttccagtcagttaaaatgacatgaggctgcctgctaatgtacatgatcttacatttctggctccttttagagatcaccaaaatagcacttttaaagtgtattttttaatgtgctgtggataattttttaaccctactcttaagatataatgctataattttgaagctgcaataagagacattttcctcatttgcactaatagaaaaaggcacactacagatattttatgtatttttatttattattatttttgagacagagtctcgctctgtcatccaggctgaaatgcagtggcacaaccgcggctcactgcaaccctctgcctcccaggttcaagcaattctcctgcctcccaagtagctggcattacaggcacaagccaccaaacccagctaatttttgtattttgtattagtagagatggggtttcaccatgttggccaggctggtctcaaactcctaacctcaaatgatccgtctgcctcagcctcccaaagtgctgggattataggtgtgagccaccatgcctggcagatattttaaataaaacagcagctatgttgaaacacaccctgtagacataaaagtacagacaggaatatatttcactgacatttttctaccaaaagaaaagtgctatgctaaggtaaacatcttagaatcataggagaagctctcttctgtctggggcagcgttgagctttattcctggacaggatgatgtgctttcttggtttaagggaagaatcattggggataatttcaaaacaaaaatcctgtttttccccaattattctattgtaaaaatgtgtccaagtaggagttagatgcattaaatacatctactgattcattcattcaacaattcaacaaatatttactaagtacatactttgtgccaaaaactattctagatactgaagatacactggagaacaagagtcataaacccagactgagtgcagtggctcaagcctgtaatcccagcactttgggaggctgaggcgggtggatcacttgaggttaggagtttgagaccaacctggccaacatggcaaaactccgtctctattaaaaatacaaaaattagccaggtgtggtggtgcacccctgtaatccaaggtactcgggaggctgaggcacaagaatcgcttgaacccaggaggcggaagttgcagtgagccaaaatcgcaccactgcactccagcctgggcaacagagcaatactgtctccaaaaaaaaacagtcaaaagcccagtgttcgaggagcttacagttttagtgtagacaggcacacacacacacacaaagtaaatattataaaagatgagactagaactaagaaacaaagaatcaagacactgaattacagcataatgaggataacctagtcggacctagaatactgcttatatgatccctatctggttccttgctttgtgattaatgttcagtttcagagagcctcaaagagtcaagccttttatttgtatgaaattccaaaagcaagtgataagctgtgtttttaattggccacctgcatccacaatttaaaatctgcatgagaaaaggaaggatgccctttggaaaaaatgtttctccatatgttcacacaaaatgagtcttagaaataatttttaaaattaagaatcttacgtaatgttactttttgaagctagagacttaatttgaaagtgaaagtcattaatcctggcagaaatgtactgtgttaataatgcgtttctttctacaaacaggagaaccctgcctatgaggaatatataagaccacttttacaaagttggagatccaagctatgaaataaccaacagtattcaagaagcaaccagcaccatcatgtgataatggtactatggcatatatgcaacattaaaattttaaattaga

SEQ ID NO: 1126 - DNA, 75747 bp, Homo sapiens
agtttccagggggctcattaagggagatgtggacagaatccgtggcggggtggtgattcccacccagcctctgccagtttccagggagctccattaggccagaggtgtgaacggaatcaaggaaggagggtgattgagtcagggagcgggggagattggatcggggaggggatgattgaatcggggaagggagtggtgattgggtcagggaggagggtggtgattcccacccaacctatgccagtttccagggggccccattaagccggaggtgtgaacggaatcagggtgggagtgactgaatcagtgaggggggttggatcagggagggggtgactgaatcagggaggggggttggatcagggagggggtgactgaacaaggaggggggttggatcagggagggggtgactgaatctgggagggggtttggatcagggagggggtgattgaatcagggagggggtttggatcagagagtggggctactgaatcagggaggggtggtgtttgcatcagggagctgggggtttgtgattcccacctggcctctgccagtttccaggggcctccagctgggaggatttcctccgggaaaggctgggggtggacgggggcaccttggggcaggctgagctatgcccacattgtcaggcaaggaggtatggctggctcctggaagggtccacggaaaccacgcacctcttgcagaggctgcagtggctgcagacgctgtctgctcaccggcgaaacatccattccctgagcatctgcttcaggggctggggatggagatgctaaaaatgacaggagcgagaaagagtagcagttaatattcaccgacagcctcattggcctggctctcgactcctcaccgcactcctgaggtgggagctgttactaccccctcgtagttgcaggggaggggcaaccgggaggaggaacacagggagctcccggctggaagcaggagcgggctgagcagtcaggaccaagacatgcagcatctcacccattcgggggcccccccgcccaaggcccctccccagggcacctctcctctgaggatcggatcctgaactcaaagaacaggcgagagggccacagagagccccaggagcagtgagtccctggggctcctagacctccctagctcaaagccctttcacgtgggggccagctccccgccaagccaaggcccggaggctgcagtgggcagtgccacaaggctgagctgggagccaggcaagagttctctttggaggcagctgcatccccttccatggggtcctgcagaccttctttccgcagagttggggatcccagtgcacagataacttcgtgtgctgatttttaagtttgaggttctcattcaacattagaccgtcatacacaattcccacgtttctatttggcgtcatgattaatggctgcagagccgctcttatttggccatctcctgattcactaaagtctgtgctgggatatccaggctgtttcctgatttgtggctgctgtaaaccaccctggcacaaacatcattgaggatccagctttgcagatcatttgttctttatgaaggagttggtctggtgttgcatgcagaaaagtttggttttcagcagaggggggtgtcatttgttcattgaatctcacagcgatgcaaagagaggcatgtctgggggcaggggtgggggtaaaggatgccaaattctggtttcaaatcccagctcggccgctttctaggtacgtaagcatggacaagtgacatcaattccccgagcctcagtttcctcattcgtaaaacggcacaatgcaatcctttgcccgagagtcattgtcactgccctcagagcccagctccatgcaccgcagagaggggccctggcactcgtgtctgaagtcctggccgtgtgctcctgcagcactcttgtgcttatcaccacacggcacgtatttctcctcccacctgcaccctcgtgctgggaacgtgcctgagggcacatttgcacctgcacagacactcctgccagcgagtctcctgaaaggcaggaggccaggagaggccgtgggggtgttccgtgtctggtattagacagtagcagctggtggcacgatgataaggcttggcccatggagagtcatcttgttcctctccatgacatgcacctgctggaaggcgacttcccggaatcctcttggtttatttagggaacaggggcaagaatccagctgaaagtggccgagttcacgtggtcacctggagtgtttcctttcctcttcctctaaaaactatttcatagtgtagtttaacttttatacttatcagttgtacgtccacaaagtttaaagaactaccctccccttcctgctcaccagaggtgaacctttgttctgattctcttggtgtttaccccctggaggttcctgtggtctcctgccaggcctgcccaggccacaccacacaccttccaccccgggtccctcccgtcgtctgcgataaactcgttcgatcagcggcagttttgcatgctgatggttacactgtagatgttgaaatgatcgtagtttagtaaatgctatggacagcggagcctcctacagcaacatgatcacgtgccctttgctggcaaacacatcttcctgtgttcccagtgtttaatctctgccttatttttcttgattagttttctatgtattgatcatctatccctaaactttgcttgcattgttcaagtctcctctcaacatggtaaacacacaggacactctgtccaccatcttcccgcggggggattgcccctgcctgccaggccaggactcccgggagtcacaggaaacaaggccagaggggaggagggcggggctcggggacctggtggccacaacagggcttgggcaggaccccctgtgggttctgagcaggatcccactcaggttttaatggggctactccagccactgttgggttcttcatgaatccagtgaggactcctttaggaaacaaggctttcctggtctgggtggttacagcagcgctggtgggacagtctctgacagaatttgcaggagaaaccagtaggactcaatgtggtgtgggagggaagcagggagccatagactgaaccccaggatcgagggtgagatgcaaagtgtgagggtgggggcgctgctgcgggggagacctgagctcctctggggccacatcggggtctgatgtctcttggatgtcccagtgagatgccaggtgggcacttaggaccctccctgtccacatgttctaaactacattgacgtcgtctgcctggttggtgcggccactttcactccctgcgctggatgttctgcagcccttcgtctgctaatgtccacgagtttacctgacagctgacttctctctgttttctctgccctcccttcctgaaactaccgtatttagcatattggatgcctgcctgagcccactgatttttttatctttcctctcctgtttttcatctctcggtctttctgttctatttctaggagacgtcctttagcccttcccttagggtttttactcaggctgttgtattctgacccctccagcccccctttatgttactggaacgctctttctcggggcatctcgctctggactcatgggggctgtcgcttcccttgtctccctgagggtattaacagggggtggttttgggggtctcttcactctgcacagcctggctgcctgcagttgttctgctggttgtttcagcccacgtctctctggctagaggctgtcctccaatgtctgctaatccctgactgctcctgcttcccacctgccactatgatgctgaccagagccgaggcacagatgggacccctgctcataggatgactgggccatttctcggagactgcaccctccccccactgccaccctcacagagccatggccaaggaccacgggagctgtcaccctgtcccaagtcctgtctctaggtgggtgacgcagcctgagctcttcaacttcccagggatagaaatttgcgcacacacgtcctggggctgaatcctgatgttagacgccctccttactcttcctactgccctcgtcggaaacaccattcagcctgctgagtcctggaagcagacagaattctgacaccagatcaagcctgtcccagtggcagagggttggacttgctttttctgcatgatacctagcagggtggcaaccagaggcactagaagtttgggtttgttctcccacgctctgtgttacaaacttcccccagatccagctccttcctcccaggaaaaccatcctcgggctcctgaagtgccctttcctgagctttccaaggacacaactgctgccccagcaatcatcacaagagaggaagatgggcatggaaaataatacacttacaaaaaaactgtgcaaggttctgcagataatttttttttttttttgagacagtctcactctgctgcccaggctggagtgcagtggcgcaatctcagctcactgcagtcgccacctcccaggctcaagagattctcctgcctcagcctcccgagtaactgggattacaggcacctgccaccactcccggctaatttttgtatttttaggagagacagggtttcaccatgttggtcaggctggtcttgaactcctgacctcgtgatctgcctacctcggcctcccaaagtgctgggattacaggcgtgagccatcacaccaggacggttctgcagataatttgtactactgtttgccagtacatgtctttgtgttattagtattcattttaggggaaaaaccctcaaatttcagccaactggactttgtgtttggctttaaatgttttccgccactgtccatccaacagtctcgcttcatattcgtatcctggttcccaagtcccttcgaggagagattctcaaatgcggtccgtttaaaatcacccaagaaatacaaaaattagacaggcatgatggcgggcgcctgtagtcccagctaattgggaggttgaggcaggagaatcacttgaacccgggaggcggaggttgcggtgagccgagatcacaccactgcactctagtctgggcgacagagcgagactccatctcaaaataataataataataagaaaaagtaacaacaataataataataataaaatcacccaggagctcagcgtgcagacccccagccgcaaagcccagagagccccttttgggaggacggggcgaggcccagcaatccgcgttgggagtggtcccgcgcgccgttctgatctgggcagccctgggctagcggagaccacggcgccttgcctcggccacggctcacgagacgcccgcggccccgaccccgccacgacgggacgggcgggacaggggaacacgcgcgcccggaacccgccgccacggcgccgcgccggggggacgcgcttgggcgacggacgcgccgcgccggggaagctgttgggcgccggaactggtccggcccgactcacgaccccgcgggacccggccggaacccggcccgaccccggcgcgcgcgcggcggaggacgaggaagagttgtggcgaggcagatcctgccccgtggccgcggccgtctcgtaggtgcgggcggcggggcccacgggaccgcggcggggtcggccgggcgcagagctctcgggggcgcgggctccggcgcccgcccctgggtcgcagctgggcttgagccgtggcccgtggcgcggtcgcttccccgcgagccgcctggggccgggcgtcggccttcccgggacgccgagcctctcgtgtccggtggggagcggggcccccgcgcggggtgcggggagagaagctgtgcggacgccgggcccggtgataccgtcgagccggcggggtccgtgttcaggcatcctcagaacgaatcgtctttggttgtgtttggaataaattcacttccatttctcattgggcttcagaagtcacccttgaagtactccccgttttagttgtttgctgcgtgcaccttgctgggcgcgtggggcacaggttcacagccggcctagcccctgagggcatgtagatctatgagcaagcaatggagacgtgcggccggccgtgaagtatttggaaggtactgcaggcagcccattccctggagagagggaaggtttaaaggggtgaggcccggtgcagtcaggagttgatgttgctgtcctgagtctaaattccaccaggcaggccaggtgcagtggctcatgcctgtaatcccagcgctttgggcagcagaggcaggaggatcacttgtggccaggagttcaaagccagcctgggcaacatggtgagacccctatctctacaaaaaaatgtaaaaattagctgggtgtggtggcgtacacctgcacttccagctactggttaggctgaggcacgaggatttcttgagcccaggaatcggaggctgcagtgagccatgacagcaccattgcactccagcctaggtggcagagcaagacactgtctcaataaataataaaactgaaaaagaagaggtgatatttgaactgggcttggaagaatgattaggaatttgctagaaagggaacacgtttagagataggaacacgaattgtgtctggggcatagttgttgctttcccatcctgggaggacagacattcgtgttagggcccaaggctgagaccttgttgaggagggggttcacatggtggacccaggagcacgggtgttactaccggtggaccctggggaccctgcgagctttgtagcgtgaagcctggctcaggctggtgtcctctccgcaggtgttggaggacataagatgaggcttcccttgctcttgctcctttggctctgaaccatctcctcaaggcagacagaaatggcggattaaactgtgggcttgggatagttgtaagtgtcacctttccagatggcatttttaaaatagtatttttcttcctaaaatggatatgggtttcaagtgtatttttcctttttggttttttttatttgaatgtactgctcatgaatgcaatgtgaatgtctgttacttaaaaatgtaattttgaaaataaccctccaaaccacaggtgtgatgctgaaacgcatcctgccccgcaggccgagcacagccctcctctgccccacgctctcatcggggcagccgacaggaggaagtgccggcatccacttcaaacacaaggtctgggggggcgggggtgtcaggtgtggtggtgaacaggtcaggtgtcgttttattcatgttgaaagcagcccttcatttgaatgcgagtgtcattctcatctagtaatttttgttgcgaggctccatggggagcaccctgctgagcacggcgcggccgtttgtcttctgcctggcctgtgccgggccattcgtacattctcacgtgaagcctgtgaggcaggtcttgttactgtgccatcttagcggtgggaagtgaagggctaggccagtgaggaaatgaggacaaaggcagcagccgttcaagtcgaagcctgtggtgactaactctgccattaaccagcactccagttaggagggaaaagatgcatcccgctgcgctgcatgtgtgttcccgagaagccccagtgccttagtggtctgatctcagaacctgatggctagaacaccgagaggtcctgcctccctccccgagggctggagagccactgttttcagtggttccagtacgccttcaccaaggaggctgtcctggctcaggcacctttctcagcttctgactagagtccttgcccagccacgtggtgacgccgctgacctcgggttatcagggtgctgcgtagcaggggtatgaagctggctgagggtggaagcccctgactgaactgcatttgtctggtgggcagtgtccctccacactgtgctcctggtggtgatggggagccccacggtagaaggggtcccagtggttgaaaggtgaggttctctctgaggaagctggggtgcctctggaccgggaggtgtgcaggaagaccgcgcacagccatctgccctgagtaggctctgtctgcgtgttcgaggcagggctctgatccgatgaccgtgaagattcaacctctgtgctgaagagaactgatgactgggcacttcattgtcccaagcctgagggactgaaaagctggtttgatggggctggttccgttttccacatgcttggtgggagaataaatcagcacctcgttggaggggactttgtcagtatttctcaaaattaaagatgacccagcaatgtgacttcccggcatctgtgccctagacaccccgagtgaacacagctgtaggtgccaggactccccccttccctcggccgactctggctaggccaggcccttctcaccctccataggaagcctccccaccaggcccccgtccgttcctcctgcccgtggcctctcctcatagcgcgtgggctctctgggagctgggaccatgtcacacggggccagtcacatctgtcacctcccaggggctggtggcaggagtgcccacccacaggcagcgctctggattccgcgcaggagaacagcagtttcttctcagcctgcactttgagtttgcccagcccagctgtgcacgtcagcatcaccagctctgctgagctctgggttttgtggggaatccactcttattcttccgtggcttcgccctgcggggtgactcaggaatttgtagaaatgccaaaaggggggctgtgctctggtagtgtgtgctgtgtgtgctcagcgtgtggttagcgtgtgctcagcgtgtggttaccgtgtgcacagcacgagcttgaactcgctttgtcagaactcggttctttgtggtctgcagaaaccttttctgagcagcagctttagttagagggaagccgtcatcccccttttatgtgcttctgtcatattgagaaacagctacacacaatgacaggcaccttctatattgagtgagtgtcgccggccgtcctagtgctccgctccttagcaccccagaaagcaccgtcccctgctccgagcacccaaggcactccctgtggctctcagcagcggaagtctggcctcggggccgtaacccagagcacccagtgcccagtcggttttctgtgtgtggattctccttgtttctgtgccctcacacctgtaaagcagtgcaggatcggttggaagtgaggaaggaagcgtggtggggccgccctggtttgctgctttctgaagctggcacagcccacgtgccgatctcgtgtcttgtgtctggtgaagcccagttgttttcttgccattctctgggtttctctatggtagcagagtccaggtgtgtgggcggaccagccactgccctgcctctgaacagctgtggagggcttctagaacatgggtgcctcgcgtcaggagatgatgtggcctgcaggactgaccgtttggtaggattcagagaagactcacacaggacgtccaagcagcccgcggagctgtgctgaggttcagggccctgcgtggctcgttttcctcctgcctgggccagaggcaggagatccctcagctggctgggacaggggacttcattaagagccccaggctacctgggaggcggagcttgcagtgagccgagatcgtgccactgcactccagcctgggtgacagagcgagactccgtctcaaaaaaaaaacaaaagagccccaggctagtggggaaaccagacacccaaatcaaacaagcaaaaaccaaggccagtagttgagggtctcaagcacaaaacatactttggctctgacaattttcattgtcatgaagtttgttttgttagacaactatgaagtgttgtgacggtttcaaactaagagcagaaaacaaaactgtttagtacaaaccacagacaataacacagtagctttcccctcacaagttaatgaaagagatgtgctggagagagagaacctgctgaacatgggcacagatcccacagagggggcgtggtgtgtgggaggagactcgacagggtcatggggtcactgctgcccgttgtcgggagataaggctcacagctttatttgataatgttgtctttagcttgtaaatgaacatgcttcccttcccccattgagtgttgagtgttgtgcctgtgggaagcgttatacacacagcctgggacctcagcacagatgcccgttgacaggtgtcccaccggccttccgggttccagcgccaggcctggtgcctgccccaggaggatgagcatttgcattgcctgcaccttatcgtgcccttccacctgctgaagcagctgtgcctgccgctcttgtgaactgcgaacttccccttacctcctctctctggctcgggagctgggtgagtttgaacttggcctcctttgcttttctgtgtgcgaacaagtggttgccttgtttgtttactgaacagagtgtggttgaggcaaaatgctgagatgaaacctaacctaatatgtgtgtattagacggtagcatcattgtcaaaataatacttgttcaaagtccctgaaaaccaaacggacaacttgactacgcttcggccacaggcctgggacgctgtcagaccgagggccgctgagtgcccagtggcagcagagcccagagggtgcttcccccaggaagggaggcagaccagcctattcttactgtgagtcgagcaaagctttgattataaagggccagggatgcaggagcctcgtggagagtgccaccccttcttctcgctctggaatgcgggggctgtgcccctggcctgtgtccgcatcctggggcggtgtcccgtgggcagtgtcctctggctgcagaatgcatgttgcagaattggaccagccctcacgcgtcaggagcgttgggcccacaggcggaggcaccctggcttcttctcggtctcctttctctgaatgaagaattccagtggacggcgggcccgcgcgacccctcccagggagccctcgcttcctgctgatttatttgttatttagtagttaagtttttggggggaaaggagagaattatagttcaacctaaaacacgttttctagctctgtgaattgcctgatttaaagcttggcttggctgggtgcagtggctcacacctgtaatttcaacactttgggaggccaaggtgagtggatcaccggaggtcaggagttggagaccagtctggtcaacatggtgaacccctcgtctctactaacaatacaaaaattagccaggcatggtggtgcgcacctataatcccagctagtcaggaggctgaggcaggagaatcacttgaacccaggaggcggaggttacagtgagcccagatcacactactgtactccagcctgggtgacagaccaagactgcatcttagatagatagatagatagacagagcgggtgagactccatcccagatagataataaagagagagagagaaaggaaaaaaaggtgagagagaggagagagagaaagaaaagaaaagaaggaaaaaagcatggcttacacctgccataaccccaggactttggaccagcctgggcaatacagtgagaccttgtctctaccaaaaaaaaaaaaaaaagctgggtgtggtatcacatgcttgtgggcccagctactcgggaggctgaggccacaggatggcatgagcccaggaagtcgaggctgcagtgagccatgattgcatcactacactccagcctgggcgacacagcaagaccctgtctcaaaaaaacgaaccttggcacctcaccacatttccactgcgcaccagtgtgggaagggtctgagagaggcagcgccgtgtctgccccgggggcggggtctccaggccatgcctgttgtgagcgggggctgtgctgagctcttctctgcacttccccctctcacgggtggttttccaggctcaggattctaaaacccattattcagatgtaccttaagtgtgttgaattttatatgcttctccttggttttacctagtttatttcattgtttagaattttgtgtggtttgggaatccttaaactcatgaagtgaaatagaaagctgagatgctgggcacgtacggaacgttccagcagtgtgggtgagaaaggctggacgtggcctgtctggtgcgctgcctcatgactgaaggtgcagcaggcgtacctggctgggtactggggaggtgttttaaatcctgtcttggccacgtttggatgggacagttgggcactcacgtcctgtgccttgcctttctccagctcggccgcctgtcagtgcaatgctgccccatgtggtgctcaccttccggcgcctgggctgcgccttggcgtcctgccggctggcgcctgcgagacacagaggaagtggtcttctgcacacagccccagtggcccgctcggacaggagcgccccggtgttcacccgtgccctggcctttggggacagaatcgccctggttgaccagcacggccgccacacgtacagggagctttattcccgcagccttcgcctgtcccaggagatctgcaggctctgcgggtgtgtcggcggggacctccgggaggagagggtctccttcctatgcgctaacgatgcctcctacgtcgtggcccagtgggcgtcatggatgagtggcggtgtggcagtccccctctacaggaagcatcccgcggcccagctggagtatgtcatctgcgactcccagagctctgtggtccttgccagccaggagtacctggagctcctgagcccggtggtcaggaagctgggggtcccgctgctgccgctcacaccagccatctacactggagcagtagaggaaccggcagaggtcccggtcccagagcagggatggaggaacaagggcgccatgatcatctacaccagtgggaccacggggaggcccaagggcgtgctgagcacgcaccaaaacatcagggctgtggtgagtgccgcctggcgccgtgatggtttcggtgaccgcacagcactccgggtgggctccgggccagaagcacatcttttcattcgcttttctgtggagtcattcacagttgtcaccatcctgcagacccgtgtgagatacagggacgcaggccctcggggtgtggccgctggcctcactggccacgcaggacggctctgggagcgtccaggtgtagagggattgaggggccgccgagtgaccctgccaggaccatgcggcatgaggtcagaagggaccactcactgcctgtgatgctgaggggcttttcggaggccagccacgtgttaggatgcgtggtcaggaccccacatacacccgggtcttactcgttttttgtgtgtcctgtgacctcagtcacatcttcacagaactctccaaccacatcacttacctggcatttgtacagtgtcataacgtctcctatgcacttgaagcaatcaagtaaaaatgaaaaccaaaagccaggaaggggaaggcaggaagtgtaccccacggagtcgtgggctgacgaggcgccatgagcacacagcaggctgggccctgggtggcctgcgccgtcactcctggaagcggcgcgcctgtcgggagggacgggctctggactcctctgtccttgctgaggggagtgacatgcacatgtgcttctccctggagcctgtgcaggcagcaggcagtgtcctccgtgagattggacagaggattcagtgggccgtgcctcacgctgcttctcagtaagagctgagggtgtgctctggagcctggcctgggttctgtcccggctgagcaggtgacgataattcacgaatcggcagagctctgtgtgggcagtgctgtcacctgagccagtggttgggctgggagtcgattccagcctgaatggcgctgggtccctgagtcccaggcttgggcaggggcggagctctgtcgacctggtgtctgcagagccactccccgaccttctaaattccctaaagcctctggctgtgtgtggcgctgtcctctgtccccagggtaagtgagtgacccagcagatctgctgtggttttgtcgtcatcttgagaggctgctaaaggggagcaacaaagagccagccttctccttccccttcctcagtggggaggcccagagctcctttccgtgagcccgaggtctgtgtgtgctgttgcgggccacagtcttgctcttgctctcagctgtgctctcgtcccctgcaggtgaccgggctggtccacaagtgggcatggaccaaagacgacgtgatcctccacgtgctcccgctgcaccacgtccatggtgtggtcaacgcgctgctctgtcctctctgggtgggagccacctgtgtgatgatgcctgagttcagccctcagcaggtgagttggggtcagggctctcggttgcaccctcagactaggcgcctttcccctgtcggggccagggctctcagccgcgccctcagcctaagcgcctttcgctggttggggtcagggctctcggccgcgccctcagactaggcatcttttcctggtgtgcagtcgcccctatccacaggggacgtgccaatgccgagaccctgggtagcatggaaccctgtacctacgatgctttttgctatacatacgtacctatgataaagcttaatttataagttaggcacagtaagaggttaacaataacagaacagttataaccatgtactgtaatcaagttatgtgaaagtgctctctctcttcaaaataccttccggtactgtgctcgtctgttgtgagactgcagtgggccacgcgtcattgaaaccgtgaatagtgagactggatgagcggaggtgactgtacaggccctgctgcccgcgagctcctgcggctgcggcgaatgctcacgcgcttggtttaaaataatgcgagtttgttcttacatgcttggaggccaggattctgagacgagtcttgcggagctgatgctgggtgtggtagggctgctccgtcaggaggctccagggcaaagtccgttcctgcctcttgcagctctggaggccgcctgtgcccttggctccagctgcttcacgtccagctctgcttctgcaggcacacggccttctctccgtagtcagggctccctcggcttccctttgtgcagcctatgcggatattccaagatcatctcccatcttgaggtccttcgcttcatccacctgcagttcccaccactgcgagaggtgacacattcggggtgtagggcgtagggcgtgaccctttgagctatgatgtggccactgtggcagccctcggttactccagagtactggcccagctggagagctgcttgctgcggagggttactttggagtattggcccagctgaagggctgctgtggagtctctgtctcccctctctgcatggcttcctctgtagcgtctcccttggagcaggcagggagggaaggacgcggtgctggtcacacagagcgctggggtgggagcagtcatcgccgagctgctgcgcgcagccttgcctgtgcagggctgtctccaggcagatcagggatgctgctttggagggaaaggacctgggctcgaggcgggaccctgtgcacagcatcgggcctcgcctgtcagttggggatggcggtggcttttaggagttgctgtggccctgtgtgcattctagctgactgcaggcaagagtcactcaccaggctgcagagggcatgaggggcaggccttgagcccacaggaaggacacggtgtgcgtatgtcacaggtgtggtgaagcagagccctccggtgaggccatggacgtttaccagcctctgcccgtataatgaatatgccttttattcacaggaaaaaaagtttaacacgtgaatgtatggaaaagcccttagaatttggatcgtatcatgatggttctcagcacagaggagcccatctctgaggccagatgcctgggactgggctcttggtctgtgcggggttgttctgcagggcagacgtcccggccagcagaggcacagccctaaagcccagagcacagcagccaccagtggccggccccacactcaccgctcttgccaggactcttcctgtctgaagtctttctggccccatcgaaggctgtgtggagctctgaggcctctgaccgggagctcaggacccaaaccctagtcaggtgtgaatttcgccaggaaggggtccctgcaagcagtcagccctgcccaccttccctctgcttctcctgccgctgagaggcccatcctcttctctgcagggcatccagccccacacggtggctggaggtggagagaaggcagcttttctggccctccacctctctgaccttcagtctcatccccggaaaataaggttggaggccggctcacagtgggcacaaacttggaaaagagaaggggctcttctctagcctccactggaggcaaggtctcacaagagaagccagtatgtagaacagctttgtacgagcaagtgagcctgtttcttcacagatgataacattgggctttagagaaagacctctttaaaatctagcagttactaccgtgccaaagagaggtggctgccagcacacttgcgtgattagccgtcagctccctccactgctcttcaggacgcctgtagccacagagcctccctgagggccccgtcgccagggtcacctcctgaagagcctccctgagggccccgtcgccagggtcaccccctgaagagcctccctgagggccccgtctccctaacacattccacattcttgttggcttcagtccttatttttcacagacatctcagccctgaccccagctgcgacacagcagtctgttaagatggcagacactgcggctgcctcatctgcgtggtccatcccggagacatctgcctggcgctctgctccaggccttcctggctcccctggtagggatctggctcagtgacccgaccctccttgcggctctctctggggtgcgccctgcatggacacagctgtccttggtgaacgtctgctgagtcaaagtggttttgctgcagtgagttccccgtgagtgcactgtgtgggtggtgcagcgcctggtgtgtagggaacttccatgcctttgctgtgtctctgggggctcctctgacggggcagctccctcctctccgccttaagctcctcctttcctttggcggtcagctctgtccagggtgtcagtttctgtgcctgtgactgggccccctcaacctgccccaccttggcctctgctccttggcagcctggccctgaacctctgttgggggctgcccgggcgctgacggtggctggtctaccatggtcacttgggcagaggcagcaacggccattgtcgtggaccgtgccagggcgagatgcagctggcaggggcagaggcagaacatctcccagggagctgagggcaggttggttccatcgtcccggagggcaggttggttccatcctcccaagtaaagagtgtgttaccctcagggcgagaggcaggtgggtgtgggtgctggcgcaggccagctgtcaaggatctgggctttctggtcttgctgcttctccagcactgcatgaatgacaccacctggccctttccagtgcccacaggcacacggcttgggagctgctgctgcggcgtctctgcccaggggcatctgccagggggtccctgccttggggtctgtgtcccaagggcgtctgcccagggatttctgctccgagagtgtctaccctggggtctctgcctggggatctgctgtcatcttccagacactgcagactggctcattaatggacacgggaaagcctcagaccttcaacggacacgggaaagcctcagaccttcaccgtttttgacacttacttgggatttttctttaaactatgctgtgaaaacttaattttttttttttttgagatggagtctcgcactgttagccgggctggagtgcagtggcacgatctcggctcactgcaacctccgcctcctgggttcaagcgattctcctgcctcagcctcctgagtagctgggattacaggcacctgccaccacagccagctaattttttgtatttttagtagagacggggtttcactatgttggccaggctggtctagaactccggacctcatgatccacctgcctcagcctcccaaagtgctgggattacagacgtaagccactatgcccagctgaaaacttaatatttaaacaaatttgatgctgtggctacaaaggattgcaactcttttccataaactccaagtttcagggttttccaactttaggaatttctatgtgtaaaatccagctgtcagcgttattgaactttgggattttgtctaagattgtgtggaagaatgtgtaggatacaagtgtggggtgaccagacacctgcggtggtgctgaacgatctcagacgcggtgtcttcaagtcatcctgcacagagggccgtgggtgtcagtgcctgcaggtgacggatggggttgggggagaggaggaggatgccggaagatggatgtgcagccacagcctctggagatcaaagtcaccactgacgagacagccagaggctcagatcagtcactcgtctccaacagcactgccctggccgacttcctcaggatcgcagcatggactcaggagggctgccatctggcagggtctgtgctgtggcagctcaggttagagcaacaggcctgctcctgccacctcagaagcacttgctagttagtcaaatgttatggcgcccttcagggggcctccaggtctttcacgtcttggaagtgtggcaacacattgggatgtgctggaggaagaaggtcaccctcggctctcagtgcccttctttagggcagcagctgccctctgaagatttggatgaattccaagaaagaccgtccttcgtgtctttcacctccgcgcctgctccctgcccctcagccttgtcccgttgcgtgcatgctgtccccgcctcagcaccatcctgctacacgcatgctctccccacctcggcaccatcctgctacacgcgtgctctccccgcctcggcaccatcctgctacacgcgtgctccgttttccgtgcctcagtgtcacgtttgtgtttctggttcactgtgctgttgatctgtgtgttacatcaaatgcagtttgttctttttacgttgctgtgttgtatttcctggtgtgcagaagccacagtgcgcttatccattctgctcttgaaggacttgagattgttttcagtttgtggctattagaagtcacggttgctatgaacattctcacacagatgtccctgtggacagttcccttggatccgcaactcccagtgccggctcacaggctagatgtatgtttcatttcagtggaaactgcggaagagttctcaaacgtggctgcatgtttcacacaccccagccccaaatgtggctgcatgtttcatacgcccccagccccattctgctggtaccaatttactgtattagtccgtgtgcacactactgataaagacatacccaagacagggaagaaaaagaggtttaattggactcgcagttccacatggctggggaggcctcagaatcatggtgggaggcaaaaggcacttcttacatggcggtggcaagagaaaatgaggaagaagcaaaagcggaaacccttgataaacccatcagatctcatgagacttattcactatcatgagaatagcacaggaaagaccggcccccataattcaattacctccccctgggcacctcccacaacacgtgggaattctgggagatacagttcaagttgagatttgggtggggatgccatcaaaccatatcaggagtccttaaatttgttaaattccccacatgtctcctcttctggtgccttcatttgtccctacagaggttctccgcgaagcactgtgcttcccccaacttgtttcccttcagcctggagaacttcttttcaatagttcttgtagtgcagctttgctgacaacaaatccctcaattttgtttcactgaaaatgtttttattgcaccttcccttttcaaaaacagctctatcgagatacagttcacacaccgcaaaattcattattgtaaattttgaattaagtagccattacctcaaaccagtgtccatttccccccattcccagcccctggcaaccacgaatctgctttctgcctctaggatttccttgtttgagatggcagcgtgtgcaaatggggcgtgtcacactcagtcttttattccagcttctttcacttgcaggatggttctgagtttcatccatgttctactgtgtgtattaataacttgttcctgaatagtacttcatcatatggatataccacattttcctcatccattcaccatctgatgggcatttggactgtttcagtttggagctattatgaataatgctgctatgaacatttacatataaatctctgtagacattcattcatcttacatagacacagagggatagaattgatgggttgtatggtgactttctgtttaatgttttaagaaactgtcaaactggccgggcacggtggctcacacctgaaatcctagcactttgggaggccgaggcaggtggatcacttgaggtcaggagtttgagaccagcctgaccaacagggtgaaaccctgtctatactaaaaatacaaaattagccaggcaccgtggttcacacctgtaatcccagctactcgggaggctgaggtaggagaattgcttgaacccagggggcggcgattgcagtgagccaagatcacaccactgcactccagcctgggcaacagagcaagactgtctcaaaaaaaaaaaaaaaaaaaaagaaaagaaaagaaactggcaaactgttttccaaaatggctgtgttgctgtacgttctcatcagcagcgtatgagagttttcatttctttacgtcctgccaacacttgtcactggcttcagtttgcgtttccctaatgactactgatgttaagcttttttttttttttttttttttttttgagatggagtctcactctgtcgctcaggctggagtgcagtggctcagtctcggctcactgcaatctccgcctcctgggttcaagcgcttctcctgcctcagccatctcagcagctgggattacaggcgcacagctccaggtccagctaattttttgtatttttatagagaccaggtttcaccgtgttggccaggctggtcttgaactcctgacctcaagtaacctgcctgcctcagcctcccaaaatgctgtgattatagccgtgagcccgccgcacccggccagatgttgagcattttttgtgtttatttttacttttttccttttaaattatttttgcagaaacagagcctccctatgttgcccaggctggcctcacactcctgagctcaagggatcctcccgcctcagcctcccaaagtgccgggattacgggcatgagcactgcacccagtgctgttttttacgttcttgtttgcatccgtatgtaatctttggtgaactgtctaatgaaatctttggccatttttaaattgggctgtttgtcttcttactgagttgtaagagttctatgtgtattccggatacgagtctcttttcagatgtacggtttacaaatatttcctccaactgcagcttgtctttttattttcttaatgtgtcttttggagcacacattaattttgatgaaattcattttataaaaaaaattttaaaaataaattcattttatcaatttttaaactttatagattgtgcttttggtatctcatctgagaagtctttgccaaaccacaggtcatgtcatgaagatattcccttttgttttttcttagaagttttctagttttagctcatacgtggaggtttctgacccactttgggttaattttgcatatggtgtgaggtagggtctaggagtcaccttctgcatggagatattcagtgtgtcagtgccatttgtgagaaagattatccttttgtccttttccctattggggacttggtttctttgccaagaatcacttgaccagatatctgtgcattcgtttatttctggactctccattgtgttttgtgggtctcttgtctaatcttacacagcatcacactgtgttcgttacttctggtttacgtcagttttggagttgggaactgtgtgttctcacctttaatctgccttttgaaatttattttggatcttctgggtcctttgccttttcgtgtaaaacgtaggataagtgtatcaatttctgcaaaataaagcttgccggaattttgggaagattgctttgaagctggagctcagtgtgggaagaactgccatcttcacaacatggagtgttcccgtctgcgagcctggcctctctccacccgcttatctgttcccctccctccctcgatggcagtgttgtgggtgctgctccgcggtgctgctgtctcccgcactctggtcgcctgtgtctttgctttcccgtctgtgggtcagcctagatcacccccgttgactgtgtctgacttttttcctcttttctgctgcgtcttgtttgttattaggtctattgaatgaattcattttggatcttgtgtttttcagttttatgattttttgcagttccacttctctttgcaattctccatcttccccacgttgttcatcttttctttgaaattccttaatctgcttattgcagtgatttgaagggccttgtctggtgattcggacgtttggatttcctgagacttcttcccttcagttggggatcacatctttgtgtccttacatgctttgtgactttgaagggttccagtctttgtctttgaaagaatgatattatttcttccccggagattcctgcctttctctgccaggcagctgcggtgaggcactcgtcactgcagtccagtgaggagatgagatgggctggggctggactgtggcatcggcatccgtcgaccccagtttcaacgccgtgtgggcgagatctgtcctgtgtgtcctgggcctcccttaggtgctgaccccacagcacgaagagtgccctcctccctccgccacacccttcggtgctccgtgtggaacaccgcgggtagagagggccatggaaggaatgcggctcaccagctcttcctgaagctttatgggcgacgcgagaacccgctaacgagtgaggaacttaaaacgtatttatatgtaagcaagaaatgtttattatggagtaaaatataaaattcacatgactcttttaaataaaagacttcacccgttcgctagtcactgcatgcctgtccatactgggaagcatgctgacttcaggtctgcgggcagccaggccctcctgccagcttccccaaggtgtacatccgccctctctgtgtagctggaagagcctgaccactcacgtctctccaggccacagatcccgaagcccttttctagctctgttcacgattgctcttcccctcacaggccagacgcagctgtcccgcgcaacatggcttctgtgggaaggggtcagagtttgaggcaccccttttagaagggaggcgctgcagactcttgaatgtgaaccatgagaacgctgtgcctggagccaggagcctccgccacgggccccagtgcctgctcatcttcctaccgagtgcttcctttccttcgtaggtttgggaaaagttcttaagttctgaaacgccgcggatcaatgtctttatggcagtgcctacaatatacaccaagctgatggagtactacgacaggcattttacccagccgcacgcccaggatttcttgcgtgcagtttgtgaagaaaaaattaggtaagtgaaaagagcccactttctcgttcagaaagtcttaaagatcaacagatacgacttatttctaataaatcactcctactaagttctgggaagcagtgctttccatttcctttcaatgttccctctctctctacccgtctccgtctctacctctctaactgtctctctctctctctacccgtctgtatgtatatctgtaatctcttccacgtcgatagctgcctggattctgtatcgctctctctgtcacactctgtctctctatctctctctgtctctctttgtctctctctctccatctctccatctatctgtcttctctgtctctcttgtcagactctccatctctgtcttctctctgtctctctccatcgctcttcatctgtctctccgtcttctctttctctatctctcctgtctctccatctgtctctatctctccatctgtctttgtctccgtctgtctgtctgctctctctcctgtccgtctctctctctctctgtcatggcgtctgaaggacaagggtgaggacagtgagctgacccgcttgctcctgcttcatctgcccacatgtcccacggcgcctgcctctcctatgcagtctctctgccttcgtgggcagccctgtgaggcctcctgcctggggcacgttctgctgcttttcctctcagccccgctcctcccctcccagctccctggataaacccctccctcccaggacaagctggtcttttgggccacccaggggcgtgtttgctctgcactctcccatgaacctgcaggcgtgggaacgtttcttttccctcgtggctgttgaggtgtggttcactaactggaaacgcacacgtgtggctcagtgagtcttcacacgcatcacaggcccgcacctccagcagagtcgtgggtggggtattttttctttttgtgagagggaggggtggcgtggagggtgcactgcaggaactgaaggctccactgccatccagtttccagtgggatgtgtgtgtctgtggctgccgcgcgctcctcccagtccccaggaagtgcacagggaagcggcacctttgttcctggagagaattccgggttgtccaaggcacatgtctgaaccgcttcgctctctttgccgttcccttgccccttttctgtgaggccaccggagcccatggttttgctgctgctactgctgggataccctggggctgggcaggccccaagctgagcagggtgagcacaacgttttaccaaatctaaggaaccaagggcaagaacgaggtcagtgaaggagaggatcaggtgatttctggggtgacagaggcaatgagacctcggccatctggatctcccagcgggggtcctgtcagtggtgcctcctcgtaaagcaggggcagcagcagggaccactccgctcagaccgcaaacaaaagcgccttccctactgcccgtgaggctgcgggaaatgctgtgtgagagcgcggggactcggagttctcagggcccgtgttctcctgccaagcctgagctgaccctgtgggccaagatggctgcagttctgcgggtggttctgagccccttgggtgtgcccggccccaccccttgggtgccgcggccattcacccatgtccgcgttctgctgcagagcctgcaagctgagccggctgtagtccccggatgtgcctggccgcagcctgcagcgccgtggctgttcacccgtgatcagctccgtggtcggcagctgcacggtcactgctgttcttgagcgtggttgtgaacagcgcaggaactttgcaggggacaccgcggaccctaagcacattgtttaccctcattagctgttggacctgcttccttctaaaatacacccaacagatcgttttcaaaaaacaaagtcacgccgtagcgcagactgcagcgttggtcccgggtgtcgcacagtggtgctgtacccacggcctggggctcctgcactcgtgaaggagctgccacttttgcaagcaagggccgcctcctgaggggctaaacctgccacctttgcacgcgagagccacgtcccaaggggctaaacctgcctttggttgtgccgcgtaggctgatggtctcaggctcagctgccctgcccctcccagtgctggagaagtggaagaacatcacgggccacaccctgctggagcggtatggcatgaccgagatcggcatggctctgtccgggcccctgaccactgccgtgcgcctgccaggtacgagcacttcccacagctgcgttcctcttccactgtgctctgagccccccaaggtgggccagtctcgaaccacccacattcggactgaagggcggcatggaggatgctcccccgtgggacaggccactcggccaggagagcactcaggatgcactgcgacctgtcccctctgggtagatcagccttctcccaagtctcagtcgggtggatgggggaggtgtctgtgctggcccctggctgtatgactggggagacaatgggaagaacagcaatgcctggaatgcaggcgtcagtgcatgtctcagaggaaggcggggggccatgctgttggctccagaccacatcagcagtggtggcagcctccgtctgtctggagtccgggtgccacacagcgccagcagcagtgccaggagaggtgggtgtggtgggcagggtgggatgagtcaagcacctgtcttccttctctagatgtgggctcctgataccgggcccctcttgtccagccttccctaacacatcccattctgactttcatctgacccaaccatttgagccctgggtcctccgctgggacttctgggaacagagcccacagctggggggccaccctgctgctttctgcgcagcccttccagtctgtctagagtagaagagagatctcagtgcagacttaaagtgagaccatcccgcacatctgtctgtgcagctgcttacctgcagacccagtaaaaattcacccctctggcgtgcagctctgtgtgtcttaagaaacatcatcacagtcaaaatagagaagggttcctcgcctcagaaactcccttcctagtgctcagcacctcctccacccccgaggcctggccccttgttcctgtttctcttcttgtggttttgctttttctgggaggccacgtggctaaatcctgcaggacgtggcctctgagcctgtctgcttccgcccggcttccgcccacagtcaactgcctgtgctgtgtgcgtcagagcccgcgcctttccctgctgagtggcatccgtggtgtgggtgcggcaccgcttgtgaccctgttttaagcaatgacacgtgagatgttatcaacatttgtgtgcaggtttctgtgcgaacgtggttttttatttcacctgggcagatacctaggagagagattgctgtgttgtctgaagctttcaagctgttctccagagcggctacaccatccccttccccctgcaatgggtgggaggtcacgagcacctgctgctccagcgggcggtggtggtgtctcgttgagttcatgattctctcatgatgggtggcgttgagcacctcttcctgttcgtgtcattccgttttcaactggggcctttgttttcttgagttttgagagcttttaaaattcgggacccaagtgtcagctgtgcgattttaaatatcatctcccagcttgtggtttgtcttcccattcacctaacagcgtctttaaaatcaggagttttaggttttggcccggtttatcaatttgttttgtgaattgtctgatgtcatatctaataaatccttgcgtagcccaaagtcacagagaatagtttcagctcttacgtttgggaccatgatccattttgagttaatgtttgtacatagtgcgagatacggaccacagttcttttttagtgtgtgaatgtctaactttttagcactgttcgttgaaaagactcccttctccatcgaacagccctttggatctttgttgaaagtccgtcgactcctgaggggtcggctcctgggctctgctctgtcccattgctttccgtgtgccctttggctcattccatgcctgcttggttcctgggactctagggtaagcgtggacatgggggttcaggcccaggcagggaccagctggtgccaggcagcgatacggtgctggggcctgcaaggtgagtgtgagggctggctggctgctgggctgggaggaggagagactgtaggctcacgcccctttgctgggcctggggagccatgggggctgttaagtgtattctgagtgtaaagtctcggtttggctggggcatcctgagcagaatgacagggccatggcagcgagatcctcagctgccgtgcagagctgccagtggggtggccgcacagagtgcagtgcctgctgcaacagtgcccagggcagtgggcgggtgggggcatgttgtgaaaagaagtcagtgtgagtgatgagaaatacatcctagtctcagaccccaggaaaccgccgtcagtgctggtggcccctgccctgggccggctcccgcgttagtctcagaccccaggaaacctccacctccgtcagtgctagcggcccctgctctgggctgactcgcgcatctccacgatggctgcggcaccagctgtttcttcggtggctaaagctctctggtggaaataagatggggaccttgaaatcaaatgtgactggtctgttgagtctctgtccttatcgttgtccttcttagtaggatgtgctggttttgtccagtgccaccggccacagtcaccacgtaatatggacggaatgagcaaagcccggctcgctgaggctgcaggctgcaggcaagtgaggactgaaagggtaacgggctctgggctttgtcctctctttgttccggacatgtgagcaggacaagttctgtgtattcagaatctgtctgcacagtttgtagttcatgatgactgttcatccacagcattgctttgtgggcgtcctctcttttgatcttctcgaaacagcccctgcgatggggtcatattttgcactcacatacaagaacccatgagcctgcccacggtcacgcggctggtgagtgatgcacttcccaggagcacggtgacctcttcaatggccctcactagagaagatggacagtgcccccctagccttttttactggaacagatacaaggctgagaagctgaaatcaggagcagcccagggaccactgtctacaccgagggagtcatgagcagcccagggaccactgtctacacccagggagtcaggagcagcccggggactgctgtctacaccgaggatgtcaggagcagcccagggaccactgtctacactgagagcgtcaggagcagcccagggaccgccgtccacaccaagagcgccaaggagcagcccagggaccgccgtccacaccgagggcgccaaggagcagatagtagcccagagacccaggggaggctcagcttccccacgctggaatcagaactcctaggcgaacaggaaggagccccagacagatggcacagggagaggagtccccggctgaggagggggatccagagaccctgaagcttcagggttattgggcaagaaacctgagtgcaccaatccccgagtcttcagctaccgacggcaggttccctcgggtgccggggatgctccctcttctctaaggcagagcccacagtaggttccctcaggcgccaaggacattccctcttctctaaggcagagcccacagcaggttccctcaggcgccagggacgttccctcttctctaaggcagagcccacggcaggttccctcgggcgccggggacgctctctcttctctaaggcagagcccacggcagattccctcgggcgccggggacgctctctcttctctaaggcagagcctgacggcaggttccctcgggcgccagggatgttccctcttctctaaggcagagcatacggcagtttccctggggcgccggggacgctccctcttctctaaggcagaatcaaatatctgtgattttatccttgcctttaaatcaccagcagtgtgagttctttggtttggaaaaaagtaagtaaagtcacctcagcattaaatccaatatgccccacaaaaactccaaaatgcagcctcctgagccatgtttctagagggcacggtggaggagagctttcctcactctcaggctctaacccccaccctggtggccatggccttgacccttgggtcggctccagccacaggctctgagctcatgcttggcctcgctgctcagtgcactgtccgtgctcggaagagagagaagctgggtggagggtgagctctgtcgtgtgttatggttacaggcctgctccgtgcggttcctgtggagggagatgaataattcatggccgaccactgctgggcctcgtcacactctaattggaggttgagctcagaggtgctcacggctcctgggccactctgtggcattgacagggagctccagggcctcattggcggtttccgttccctgggtcccagtccccagtcagagttatcagggaggggctggctgacagcgattttagaggtgggctgtggcaggaaggcagtgccccccacctgcctgcagctgcgctcccatctacattggcctttgcggggccagcctctgtccactctcttgagctctcatgtccacactgtcacatgcccggggcacagcgagcggcacctggagtgtggggacccctccctcgagctctcacgggtggcacctggagtgtgggggcccctgcctcaagctttcatgggtggcacctggagtgtgggggcccctccctgaagctctcacgggcggcacctggagtgtgggggccactccttgagctctcatggacaataccactgcttggctgctgcagaatccagacaccatcccagagcctcttcagcctctgcagatggtgtgggacggccacacggcctccccacctgcggcccccgcccctaccccagccgtgccgtgtccttgcgctgcgtccccgccccagtagaggcatcaccaggaagaggcgaaaggccgcctgtgatggtcctcttcttatgaaacgcccagaacagaaaaaccacggacgcggacagcagacctggtgccaggtctggggagggagggtgtggcggtcgtgggctgtgcgggagttctgactaggggaagtggggggctgtgcaatgtgtgtgcggaacaccgccgtgccgcgcactgaaatgggaagtcatgtgttatgcgggtttcacccccatttaaaaatcttcagaagcaaaacataaaggaggagaaaggatggaagaaagggggctgaagctggccccgccacaccccccatagtggtgacacgggtttctgaccagagtggaggttcggggcgtctgcatacctggaaccacagagaactcccgaggtgacactccgcacaccacactagcccggcttcgcctgcaggaccccaggtgtggacaggcccagcaggatcagcaagaccgagccgggcaccgacagcccctcaccaagcgtctggaggccgggacgccccatggattgcagagttcactgcactgaccctcgatgctgacccttgaagtgccggaaatctcagcgtggactcagacatgataagcgttcaggcactcccctgacgcaggccagggcaaaggcctcacgccccgggatagacaggaagtcccacgtctgctctgcccctaggtcatgcccgtgctgacgccacatcgccagggccgcactccatgagcagcctctgccgtcccaccagcaacctaaaccacaggcagagcgaggctgcggcagccctgcgtgtgccggcgggacacgtctcgccacctgggctctgcccccaccccggccagtgtaagatatgattttagccacgttgagactgtgcaggtgggatggatacactgagcaaatcatgggtgtctaataaatgagccagtacaaagtgtggtccacctgccatgcagagttcaggacagcccctcctggggacatagggcagatcctgccttagcccgtcgtgtgccgggcacacacaggtcccctcatcgtggacagccccggggccatcagggcaaggcgccagccctccctggccagcaagtgtgtaaaagtgggaatgacaccagaatctgtgggcagctgtgaggctttgggaagtaactgggaaagtgatgtatgaggggcccagggcaggccaggcccagcgtgccacgtgagtgcctgctgtgccacatggccatcactgtggcatcggctgggcctgagcacaccgtgcttgccagccacgtatcgtgtggcttttcacctgctggtgcctacaccatcttctctctgggtcacagggcacgtcgctccctccacacagactcccgcacgtggcacacgggagctcagcgggatccgagctcagtgtgtgcttctctcctccaggttcctctcactccagcctccccttcagtgtttctcctctcctgtaggttccgtggggaccccactgcctggagtacaggtgcgcattgtctcagaaaacccacagagggaagcctgctcctacaccatccacgcagagggagacgagagggggaccaaggtaagccactctgctcttggcaggtgggcggccgtgtgtccagtctaggccccccagggtggttacactggtgcatctttcccctggaggcagactcccctccacgcaggggaccagccccctggacactgcaggtgctggctggtgttgcaagggcactggctggtgttctgggccctgcctgctgcgtgtccgtctgtgcgttcacagagcagtgggcagagggagcccagggcggaacgccaaagggactcacacccgggcacacagctcctcccaggggccctgtccacggggacaggctgacgtgggccatgatggccttggctaagcggaagagataaagagcagaggccgttgttgttgatgggaatctggttagaaatatgaactggcctgaccctggcacccgtcctgaggggacgctgaccacaggcccccatagtaggtgtggggagattcacggggccctgcacgcggaggtgggtgcctgtgcagtgctctgtggctgcctccttgtcttgtgcgttattctaaagctgacaagggtgaacaagaacaaaggacattgtctcatttctgtgaggattttaacatgagagtctgctcatcacacgtgaactcatcacagagaaaggtttagggattatggggaaatggaatcttgatttaaaaggaaattattttctctgaagccagtatccacacctgataccacacatgattgactgtgttgccctgaggttttcaaagatcgagggatcctgagtctcatctctgtgcatttccttctctgtgacaccatcttggccctcacgggcacaactgagctccctgtgcagaggctgaggggccgtgggccttgctctcgtgagtgaacagccacacgccctccttgtaccttggtttccacacatgaccacgtgagggttggagcgatggtcgtggttggacgttttagctccagcaaccaagtaggatgtgggtggctttcagtgtcattaaatgacactgaaaggtgcagtggccgcaccttgtgtggagggccacacggcgtgtcccgcctggcctgggccccccgcagtgggctgttatcccccgtggccctgaagtgggtattctgtttccccgtggaaacctctcacctggggccacctgcagtggccgcaccttgtgtggagggccgcacagtgtgtcccgcctggcctgggccacccgcagtgggctgttatcccccgtggccctgaagtgggtattctgtttccccatggaaacctctcacctggggccacctgcagtggccgcaccttgtgtggagggccgcacagtgtgtcccgcctggcctgggccccccgcagtgggctgttatccctgtggcccccacagagccatggggcaacttgctgaaacccacctgggtggctgccccttgctatacccacctcccctgccctctgtagggccccagcccatgctgttgtcctgacatgcctctcctgggattcctgcctctgccctgctggtactaggctgctggccacaccccacatctcaggttcctgaatacaccggcccttcctggctctcaagtctgtgccctgcagtgcccctgcccccaactcgaggacctcccagctcagccagttccaaccctgtctgcagggacggggctcagcctgtgcctgggttggggacaccatctagtcagaaatgtccccagcagagagcagaacgtgagtggcgtgtggaggagtgagacgccccgtggctgtgcagccctctccaggtgtcagtcagctgacactcctgcctctgagcacctgctctgccggaaatggcagaaatgttgccagagaaaggggcggagcgggggtggggagcatttctgtcttaaattaaaacaaaacttaactgcttcacacctgcattggctgccgcgccacctgattgctcctgcctgagtttctttaattatttgtgtctgctggtttcttccctgaagcagtcttgaaatagaagcagcagcctcagctacctgggcaccctgacagtcagagacaccgcacaggggcctctgcgacaggcatgcaggcagaccctgcaaggtgaagccgcacagatgctctggggctgcttaaatctcagcgtacggggggtttgcatctgctgacagcaggcccgggaacatttccagttcagccaaggagtcggtgcagcaggtggagtacagctgccctgcggggcctggctccaccaggggccaagacccttcgtggggaggagcacagcctgagggcctcagggtttgtgccctccgacacctgagattcagggctcccagaggggtgggtgggcgccccaggacaaccaggtgatgatgggcgctgtgaactctgaaaagccccagcatcagagacctgctgctctctcatgtgaagggactccccaccccacgctcacactcgcagacgcacttggtactttcatctgagtctcacgcagtagcccttctctccacagcatcccagaacccgagggtgcccctcactaccacggtcccggatccacgtggctcaagtgaggctgtggccgacagctgggctgtccgatccactcttgtctgtgccgaggcgtgggtcccggccagcgtccctccccagaaggtctccctcaggactagtcatgagaatggccatccctaggcctgtggagtgactcatgactgttcctgggcagatgatcagccaggccttcagagctgaattaagaggcttggtgtcatatttgtcaggaaacagaaagtacctgcagaaaggaatgtgccctgtggggatgggaggacaccttcccaggatcatccccggggccagagtatctggaccctccccaggtggcagctggcctgccaggcccagggctcagcctcctccatcacctcgctgaggggctggctcctaccactccctcacatcctgtgacatatcacaggtaccacacacacatgcagtgcgcgcacgggtatcacagatacacgcagtgtgcacacggatagcacacgtagtacgcatgggtatcacatgcagtgcacacacaggtatcacacgcacgcagtgtgcacactggtatcacacacatgcagtgcatgaacgggtatcacacacatgcctagtgtgcgcatgggtatcacacacatgcctagtgtgcgcatgggtatcacacacatgcagtgtccacacaagtatcacacacacatacacattgtgtgtgcacagctgttacacacataaatacagaaaaaaagacctgatggaaaccccagaagtcaatatggctgagctccaggccggactccctgacgatgtcataggacgagggggcgcgtgtgcacactgcatatatgtgtgtgtgagacccgtttgcacactacatgtatgtgtgtgatacccctgtgcacactgcatgtgtgtgatacctgtgtgtgcactgctcatgtgtgtgttacccgtgcgtgcactgtgcgtatgtgtgtgatacccgtgcgtactctgcgcatgtgtgatacccgtgcacacactgagtgtgtgttacctgtgcacatgctgcatgtatgtgtgtgtgttacccatctgctcactgtatgtatgtgtgtgagatacccatgcgcacactgtgtgtgtgatacccatgcatgcactgcgtgtatgtgtgtgatacctgtgcacataccatgtgtatgtgataactgtgcacgcactgcgtgtgtcacatatgcacacactgcatgtgtgtgtgatacccatgtgcgcactgcatatacgtgtgtgttacctgtgtgcaacactgcatgtgtatgtgacacctgtgcgcacactgcatgtgtgtgtgatatttgttgaaaagactaccctttctgcattgcattgccattgccactttgccaaagattaattggacatatttgagagggtctacatacaggttatctgttctgttcccttgatctatgtttccattcctctaccgacaccacattatcttgactgttgtggttttatagtaggtcttaacaattgtagtgtgatttcaccagctttattctttctcagagttgttttggtgcacatattaattttagaattagcttgtctagccgggcctggtggctcacacctgtaatcccaacactttgggaggccaaggtgggcagatcacctgaggtcaggagttcaagaccagcctgaccaagatgatgaaacccgtctctactaaaaatacaaaaattagccaggcatggtagtgggtgcctgtaatcccagctacttgggaggctgaggcaagagaatcacttgaaaccagaaggcggagtttgcactgagccgagatcacgccactgcactccagcctgggcaacaagagcaaaactctgtctcaaaaaaaaaaaaaaaagaattagcttgtctatatctacaaaaagttcttttgaggtcttgaatggaaagccaggtgtagtggctcatgcctgtattcccagcattttgggaggccaaggcaggctaatcaacttgagaccaggagctcaagaccagcctggccaacatggtaaaaccctgtctctactgaaaatacagttagccaggtgtggtggcacacgcctgtaatcccagctactcgggaggctgagtcacaagaattgtttgagcctgggaggtggaggttgaagtgagccaagactgcaccactgcactccagcctgggcaacagagtgagactgcctcaaaaaaaaaaagagagagagagagagagagatgttgattggaatttagccattctgatcggggagatcacttgggggagaattaacaattactatgctgagtcttccaatccatgaacatggtatgtctctccatttacttagatccgtgaacacggtgtgtctctccgtttacttagatccgtgaacacagtgtgtctctccgtttacttagatccgtgaacctggtgtgtctctccatttacgtagatccgtgaacacggtatgtctctccatttacttagatccgcaaacacggtatatctctccatttacttagatccgtgaacacggtatgtttctccatttacatagatctgtgaacacggtctgtctctccatttacttagatcagtgaacatggtgtgtctctccatttagatatactttggtttcttctgtgttgtattcagcatatagatgctgtacttgtgttaaatttataagtaaatgtttcttcttttctttattcctcctatttcttctcctccttttcctctcctttttaaactattgtaagtatggcaggtgggtatggggggagagttgtttgtttttttgagacagaatcttgtcctttcgcccaggctggagtgtagtggtacgatctcagctcactgcaacctctacttcctgggtctaagtgattctcatgcctcagcctccccagtagctgggattacagatgtgtgccaccacacctggctgattgttgtatttttaatagaggcagggtttcaccatgttggccaggctggtctcaaactcctgacctcaagtgatctgcccgcctcggcctcccaagatgctgagattacaggcatgagcctctgcacacagtcacgtttttgttgctgttgttagttttcaactgttcattgctagtaggtagaaatagaattgatttttgtgtgttggcctcaaatactttagttgttaccttgctaaattaacttactagttttaggagattttaatagacttcttgggaatttctacaaatacaatcatgttttctgcaaatacaaacagttttatttcttcctttccaacctgtatgaccaaagccctgactaggacttccaatacgatactgaacagaagcagtccgagtggaccttcttatttctgatcttagggaaaggattcagtctttcagcaagtgtgttagttactggctttttgcagattccattctatctataatgtgcttagactttttatcactaaatgtatgttgaatattttcaaaaagcttttcggtattgatggacttttctttattaggctgttaatatggtagattacattgaaccaagctttcattcccaggacaaaccccacttggtcctggtgggtcatttttttatatatagtactggatttgatttgctagcatattgctgagtatttttgcatctgtattcataagaaattttggtctgtagtttcccatttttgtactttctttgggttgtgtttgagggtgatgctggcctcattaaatgagttgggaagtgttctctcctctttttttttctggaagagattgtgtagaattggtattatttcttctttcaatgattggtggaattcaccaatgaaatcatctgggcctagaggttttcttttctattattattattttgtgtgtgggggataaggtctcgttctgtcacgcaggctggagtgcagtggtgcaatcatagctcactggagccttgaactcctgggctcaagtgatcctgcgtcagcctcccaagtagctgggaccacaggcatgtgccaacatgcccagctaattttttatttttatttttgtagagttgggggtctcactatattgcccaggctgatcttgaactcctggcctcaagtgattctccctcctcgcctcccaaagtgctagggttacaggtgtgagccactgtgccctaccaacgtttcttttttgaaagaaaaagaactatgaattcaatttctttagtgcttataggactgttcaggtcatctgttgcatcttgggtgatttttggtacatatcatttttgaggaattggttcatttaatctgttaagtttctttatgtagagtttcccttcaggccacgaaaccattaaaaggttgattaaaaggttaataagggaattcccatcttaaccttttaatggtttcagggcctgaagttatgtggctcccattcctcatgttggtaatttgtgtcttctgtttcttttttctttgttatccttgctagaagtttatctgttttatggctcttttttcaaagaagtcacttttggatacattgatttttctttactgtttttctgttttcagtttcactagttcttggtttcttctacttgcttctggcttttctctttttctagttgcttaaggtgaagctttagattattgatttgagacctttcctctttataatgtgtacatttaatgacgtacgttgcccttaagcattgctttagctgcatccccaaatttatatataatatatatatatttttttcttttttctttttttttttttgagacggagtttcgctctcgttgcccaggctggagtgcaatggcatgatcttggctcactgcaacctcagcctcccaggttcaagcaattctcctgcctcagcctcctgagtagctgggagtataggcatgcgccaccacgcccagctaattttttgtatttagtacagatggggtttcaccatgttggtcaggctggtttcgaactcctgacctcaagtgatccacccacctcggcttcccaaagtgctgagattacaggcatgagccaccacgcctgacctaaattttgatatatttttattttcatttagttcaaaatatttttaatgttccttaagacttcctctttgacttgtggattatttagaagtatagcacatattttccaaatagttggatatttttccattatctttctgttactgatttctagtttaagtccattacagtcaaaagacgcacttggtatatttcaattcttttaaatttgttaagttgtgttttgtggcccagaatgtggtttcttttcaggaatgttctggtgtacttgaaaagagtatatattctgcccaggcgcagtggctcacacctgtaatcccaacactttgggaggccaaggcaggagaatcactgcccaggagtttgagcccagcctgagcaacatagtgagaccccatctctacaaaaagttggaaaaaaaaaaatagctgggcatggtgttacatgcctttggtcccagctacacaggaggccgaggcgggaagatcgcctgaatctgggagtttgaggctgcagtgagctgtgatgatgccaccgcactccagcctgacagagcaagagtgtgtgtcctgctcgttttaggaaatgtctgttctgtaaattagatgaaggtgtttgatcgtgttgttcagttcttctatatccttgctggttttctcaccacttgttctgttactaagtgaggggttgaattttccaactataactgcctgtttctgctttcagtttttgcttcatatattttgaaagtctgttgtttggtacattcacatttataatgattgtgtcttattggtgaattgactcttattaacatttaatgctctggtaatgctctttgctcttaagtttactttgatattattatagctattttaatttctcggttggagtttgcatggtatttattgttctatccctttacttccaacctacctgtgtaattgtatttgaagcaagtttcttatacacagcatacagttggattatgtgtgttttttaaatccagcctgacaagctttgtaattggtatgtttagaccatttacatttaatgtaattattgatgtgcttgaatttaagcctaccattttactatgtgtttactattgttccctgagagttttattgctcaactttactgccttctttgaggttattttttcatattccattttaatttgtctcttaagtttttgaccataaatgtctttgcatagtttttttagtagtagttccagaaactacaatatacatacttccttttttacagtctacttaaagtcaacattttaacacttccagaagaatgtagagccacatccctgcctccacatcggttacttaccctctgcctttagagtgtagtcagtgtaatacctgtatttgttgtaaactccgttagacaaaatggtaatttttgctttcaacagtcaaaaatatttcagagaacttgagaagaaaggaactcaacttcattcatccaaatatttgccacttctgttgcttttcctgtattcccaatataccaagtctccttctgataccagtttctttctgtctgaaggacattctataggaattcttttagatcagatctgcttgcaacaaattaccttatttttcctcatctaagaatgtctttatcttccttcctgaaggatattttcattggattaggaattctgggttgacaactattttctttcagcactttaaaaatatgattcttggctggatgtggcagctcatgcctatagtcccagcactttgggaggccaaggtgggagtggatcacctgaggtcaagaatttgagaccagcctggccaacatggggaaaccctgtctctactaaaaatacaaaaattagccaggcatggtggcacacacctgtaatcccagctacttgggaggctgaggctggaggattgttttaacctgggaggtggaggttgcagtaagccgagatcatgccattgcactccagcctgggtgacagaatgagagtctgtctcaaaaaaatactactaataatataactccacttctttccggcctccattgtttccgtggagaaatcagtgggcgcaggaacccttgttcctctctgtgtgtcagtgattggattatgatgtgtctgggcttggacatcttttggtttgtcctgtttgggattctctcagcttctttagtttataggcttatgttttcaccaaattttgggtttttagccaaattttatcaaacgactttgtgcacctaagtgttatcttttcttctgtcactccagtagcatgaacgttagccctctgtgtgttgactttcctggtgatttttctctgctgttcagattttgggtcatttctgttgctctgtcttcaagttgtcacgttcgtttcttcatcgtcctgctcctgaaccaatccatgagattctttatttctgtatttttcagtttttaaattattgtttggttctgctttatatctgttatttctttgttgagactttctgtttttccatttatttccaagtgtttgccctttctttctttttctttttctttttcttttttttttttttttttttttttgagacagggtctcactccgtcacctaggctgaagtgcagggctgcagtcttggttcactgcaatctccacctcaagcgatcctcctacctcagcctcccaagtagctgggactacaagcactgaccaccacacctggctagtttttatcttttttgtagagacagggttttgccatgttgcccaggctgttctcaaacacccgagctcaagcagtctgcccgcctcagcctcccaaagtgtgcccttactttttggagcatttttataatagtgctttaaagtctttctcagataattccaataactgtgttgtctcagtgctgttgtattctttttctatatgagttgctatttttctggttttttcccgtgttgagtaactttgtattgtaccctggatatttttaatgttagggatgagattcttggtcttgttgacattctgtgaagatgttgaggtgtttgttttactgtgacttggttggcttaactctacaaagtctgaccctccttccctgggattggtctcattgtcattttatttgtagggcctttgccttgctgtctctacatgtcccacaagtgtactgaccagtggccagtctgaccacgtcagtggagcagataaaggacagcagtggaaaaattcacgaaattcagataaagtccgtggtttctttgaaaaaacaaacacaaggctctgagcagccaggagttaggctgggcactgcacggaaagccccgtcaccatgtggggcaggtgtttcacccccgtgggtggcgtcagcccctcctggaggagcccaggctggcgggttggcagccccgtcatcatgtggggcaggtgtttcacccccgtgggtggcgtcagcccctcctggaggagcccaggctggcgggttggcagcaggacgacacactcggcagaggctgccatggggcagtgttggccccacggcgtttgagcgccctttctccacatcagatcagtgtgttctgctatttcgcagctacttccctggcccctggttttctgaagtccattccagatggcaggtgatgagcctcagtgagactcttgtacgcatcccttgacctccggggtcacagccagtcactttcacagtagagaagagtgagggtcgtggagctggcagctgctcatctgaagcccctgctccttctctgccctccccagaccctcctgacctatgagccgagggctcggccggtgtcttcacagacccaccgtgtccagggcctcccgtgccatctgttcctggtgctgcagggacccccagcccaggctcatataacccagcctccctcccgccctctccatggtcacaatagaagaacagtgaggctgtgtttcctggggccatggcagtgcctgcatgcttaacaggggcctccagggaccctccaccctcaggccccaccttcccttcccacggagtcttccctcttgtaattggtcactcagccctgtggagggcgctgcccgctccaagctgccccagcccctgtgggcaaggtgtggacaggtgcccgctgctgtgttccctggtttgagaaacgcccccgaagatgggatttgggcacaggttttagacgtggacaggctgcctgaatccagcccaggctctgagtgctgaggcctgggccggtaacatgctcaagtctagaggatggggtaggagcacgttcttctgtggctgttctgggaggaatgaaaggacacccagctcccggccagggcaccagggcccacagaggacggcgggaatgcttagctcagcatggttggcttccacctgtcaaagctgcgttttccaagcattccaacaaagcgctcagtttcagaaagcacgcggccctgggtgggccctgggtgggcagggagcagcccacagtttcagaaagcaccaatcccaagagggtgtgcccagctctgacctccatgttcttcatcctccacaggtgaccccagggtttgaagaaaaggagggggagctgctggtgaggggaccctccgtgtttcgagaatactggaataaaccagaagaaactaagagtgcattcaccctggatggctggtttaagacaggtaggacccagccccatgggagtggaggagaccccgaggggacaggcaggaactcattgctgcccacgttgagtgacaccgaggctgggagttcccagaattttcagccaaaggcagaagatggggtggagtggggctgggggccactgttacggcactgcctcctgagcacccggcctccccaccggcttctagagtgggctccttggccctgtccctcagtgccaggggccccagtgccccatgacaaggcttctacactgtccctcagcgcgacagccgctccggcacgcacgcaccctgaccacagacgccgggccccacgcagcccttcctggtggccctgctgcccctcgtgggctggggcaccctccacctccgaggtgtacccctgtacccagagacctcaccacccccacgcttagccacacttgtgccctccacatccttctccccaccagagtcagaagtcagctgacgcagtgcggttggtttgcagtgcggctgtttgtttactgttccacaaattagcacattctctctgcctgccagaacaggcctgtgggtgagtgggaacctgcccacctgattgaggtggcccaggaagcctgtggcggtcaggagagacggcggcgcccctggagcctgctggcagcccccactgccaccctcctgctctccctgagcctgccctgagctgctgctgcctgacccccctcctttgtgagaagctggcttggtcccaggatcccacatcccgccccatggggcgtatttggacagtggatatttcgacatttggatagtggacgtatatggatggacatttggatagcggacgtatgtggatgtgttactagggggtccttgctcccagagctcccaagatggtagcgggcagcttccaaaatggcggcaggctgcttccaagatggtggcaagcgtcgtgttctctgacctggggttcttggccttatggattccaaggaatggaatcttgggccatgcggtaagtgttatagctctattagaagccgtgggccacagaaaagaaccatggaacccagtgactagtgttcagcttgattaggatgaacgtgggtgcttagccgtgcaggaacaatggcgagcctttaggccagtcgggagtggcagtgggtgcctcgctggatcaggagcacagtggacaccctgcgggatccggaggaatagaagtcagcggcgggtctgcaacggcggcaagcagcagtggtggacggcgagcgaaagctcaacttgagccgtaactaccacggaccagaagagagtgtagttgcaagatttaatagagtgaaaacagagctcccatacaaagggaggggacccagagagggcagccgttgccaggtttatatcccgatcattgtccctcctgctgtgctctgaggagatagatgattggctattgtttacctcctgttttagcctaattagcattttagtgagctcgctttactacctgactggtcgggtgtgagctaagttgcaagccccctgcttaaaggtggatgtggtcaccttcccagctaggcttagggattcttagtcggcctaggaaatccagctagtcctgtctctcagatggacatttggatagtggacgtatgtccatggatatttggatagcagacgtgcgtgggtggacatttggagagtggacacacgtggttgtgtggctgcaggtactcactgtagtgtatttatccggaagatgtgcacgttgctcctgacccctgggtggtgagattgcggtggtttttcttttcctggtttttttttttttttttttggcctgtctatattttatgctgaacatcattattttataataacctttaagtaatattttccaaaaaaaagaggcccattttcatgcatcagaatctgctggcccaaaatcagaaacgcatctgccccatgcccttccacagggagcagagcggggggctgcagcgtgcaggcgggatgggctccttgagggatgctggaaggggcaatgttggcctgcagcctctccgcctcatggcctgatcctgtgggtcccagaggccctggagcatgtgctgctgtgaggcaggtgtgctaggtgtgtggcagttccgcacgtttgcaaagtgaaggctccgtgagcccctagagcagaggccagtgccccacgcagcatctcataggcttcccaaggtaccctgggaggcaccttcgtgggctggacatcagcagaggacccagggctggggccctagaagcctctctgtgacaggacgtggtcagcacatcaaacactccctcccaatttatcttttttatacatccccattagcgcatgctgatctggggaaacagcctgtccatgacttcccttcaaatgcagaattacaggaaccggacttgagcaggtcttgctctgagcatccctccagtgccctctgaatgccccgaccccaatccgactcacgctgcagttgttttatttatttagttagttatttttgagacggagtctcgctctgtcgcccagtctgcagtgcagtggcacgatctcagctcactgcaacctctgcctctcgggttcaagcaattctcctgcctcagcctcccaagtagctgggattacaggcgcccgccaccacgcccggctaatttttgtatttttagtaaagacagggttttgccatgttggccaggctggtctcgagctcctggcctcaggtgatccgcccgcctcggcctcccacagtgctgggattgcaggcgtcagccactgcgtctggccggttcttgtatttttaaattcaggtaaaagctgaagacgttttcttctttgaaagcacaggaaccacagccctgtggattttgcgagtcgcggggctcccggagccgctgggagggcagccgtgtgagatgcggggctgcgagcgtggaaacactcgcagtcgccagtgctgaggcatgtttcagccggggcggaatcacatgcattaattattgtacagagatgtctttagtagaaaatgattttgaaattcagtttaatttcattgtaatgtgctgcaaacaggaagggagtatgtgtgtttaattggctctcgggggtaaggcctggaagccgcatgtctttgtcacaggccattagcgatgctgctgcataatgagagcctgcaatcagctcacagctgccgctcctgccgggagagcatgatattaaatagaaatcaggagaaattaaacttaaccctttccctggccagcccctcctgccacacggattctggcataagccggcgggcacaggggacagccagggatggctggacacagctgaggatggccgaggccggcctgcagctccccaacggcctcctccgggtcaggatgagaggagaggttgccagctttgatgccagccgctcctgcctcccccacctgcctctgtgcctacagcccgcttctgcctcaagatcacacagcgggcttgtgaggccaggggtctccgctgctgctcaaggagatggcaaaggtctgtttcaggtaactcctctgacggccacaacgatgtcttcagacgtcaaaggtctgtctcaggtaactcctctgacggccacaacgatgtcttcagacgtcaaaggtctgtctcaggtaactcctctgacggccacaatgatctctgcagatgctctgactccacgtgccctcgctcagagacacacgcgcacatttgccacctggggcgagtggaaggtgacgtggaggtgggcacctctgccgggcagatgcgggagcagcagcagcagcagcccctcctgggggcatccaggggtcaggagaggggcggtagggcagggcggcatccctgcaggggtgaatggcgtcttaggctccagccgggtgaggaaacctgataaccgaactccttagagaagagccagggatcccgggaggaccaccaggagcttgtggggaaggactgaggggaagagccccaggtctcgggaggaccaccaggagctcacggggaaggattgaggggaagagccccgggtctcgggaggaccaccaggagctcacggggaaggattgaggggaagagccccaggtcccgggaggaccaccaggagctcacggggaaggattgaggggaagagccccaggtctcgggaggaccaccaggagctcacggggaaagattgaggggaagagccccaggtctcgggaggaccaccaggagctcacggggaaagattgaggggaagagccccaggtctcgggaggaccaccaggagctcgtggggaaggattgaggggaagagccccaggtcccgggaggaccaccaggagctcacggggaaggactgaggggaagagccccaggtcccaggaggaccaccaggagctcacagggaaggatggggagaggggagtggggggctggagaacccccagactgagaaattctgctcggagcgagaagggagctgggcccaggtggccccatcccccaaggttgaacatcagcccagcctcccaggccctccacgtgctcatgggcaccactgccgggcactagcttacttgtcaccctgtctgaggcgtgttggggtaggagcaagagtccgctgcttccagggcccagctggggctccatgtgtccctgggcaccccagaaccctctgggtctcagccgttgggttcttacatctgggccagtggcaaagggttaaagggaccttgtgacttagttgggactcactggcctcaagaagcgaaaatcagagggacagcagccccagccgccggggattccctgtggcgccagagctccccggcaggcactgtggaggccaagtggggaccggcagtgtcgtggtcccggcccacagcctctcagcctcccacagcctctccctgtggtaacgaggtggacgctgagccccaggcctgatggcacatttgaggtcaggtgggggcacctgggctgttcctgtagctgtcccctcgtccaggggagggaccttttcagaagccctggggcctttgtctcattgaccaaaaccctcctggccatgctgccttcacaggacactgggcatctctgtggggcaagggaaggaacacaggcctcctggtggggccccaagacccaaccaaggctcgtctggctggtgccagcctctgcgccaagggtgccgaccaaggtcagagccgatcgcggggatgacaggtgccgaaatggccatgcttgccccagcccctttcatccggcagagggacctcgctgggcctgccacgctcagccaggctgtgctgtgaagcccctctcttcccttctcagagccatatgtccacgctgacagctcctgagagggaccatgttttgctgcctgcaggtgccaagctgactgatgggccatgctgaggagggtgccccagccctcctgcaagatgcccttctgtgcagcctgcagggccaccaggcccacgaggcggccatggtcttcagatgtgtcttagcctgggttccctagaaaacacatgaggactctgggcagaggctgagtgtttttacatttttatttttaagccaaagttacacacctgtggcttaaacacccaagtagttgtagcagtttgagaagaagaatcacagccgtgccccttccccagactcgccggctgctgcttctgtgcggtccccgcatcccgagggccgccagcaccgccacctccaggctcctttttgctgccatggcttgagtcccgcagaggaggcccctcctcaggcacggcccggctcagtcccgtatggcatctgcactattgagactatggagtcgccgctgagaactgagcccaggagacactgaggtttttcctctttctttgttttccagagtcgggaaagtcttggttttcttggtctcctggtgccaattcctcgtgggctgggctggtctccccatggcgcctccttccccatcaccaccaccccttccctcctaccgggtcaggacgtcggctcccagcccacagcatcctcgtcttccctcttccgcccccagctgtggggactgctttcccctggggcttcctgaggcgggtgtgtagggtccgtacttggagacttgcgtgtctctccgggtcttcgttctgccctcagccttgcttgtcggtttggctgcgtatagggttcagggttagaagtcgcttctctatcattttctggccttcagatttgctgctgccacagccgtgctgaatcctggcacttggtgaccccctcctttttttttctgtttttttttttttttttttcgagacagagtcttgctctgtcgccagactggagtgcagtggcgccatctcggctcagtgcaacctccgccttccgggttcaagcaattctcctgcttcagcctcccgagagtagctgggattacaggcgcccaccaccacacctggctgatttttgtatttttagtagagacggggtttcaccatgttggccaggatggtctcgatctcctgacctcgtgatctccccacctcagcgtcccaaagtgctggaattacaggcatgagccaccgcacccaaccatgaccccctctttttaacgtacagggtgtcctctgtccccagacccctgagcccaggttgaggagccaccagctgaggacggagccaaggtcacggagctgccgggtgagcgctgagcccaggtcagggagttgggtctcaggccgtcactgggactccctctgccttcaagaagcctctttcacccttggcccacagaggagacctggatggcactggggtccaggtgcagaagcctccagtgtccacgggcacctgagcttccagcaccttccctcctgctgggcggtggcctgtgcctggccgcaatggaggccgccttccccactgcccctctgagcctcagtctgtcctccctgcagccacctcccctggccaggtgccccggggtaactggtggaggctttcacgtaacttggtttccagctgcctctgtacacacacaggcacctgttccaggcttggcctctctgtacacacacacgggcacctgttccaggcttggaggctgagaacttgggggcagagatctcagggcatcggcttgggcggggtccttgggcagggccttgggcttccctcggcactttcctcaaggactggggccaagcttcacattctgttgctggcatcagtgccatttgggagcaaaagtccgacaggctgggtctgggcctctcttcaccttgtttcctgggatcgcgctttgggtgctggtgtcactccagatccaggctcgggaaccacatctgcacagcagaacaggcgctgttcttatcttgcgtgcgggtcaggacatccccccggccaggagtgcttcctccgaggcccacagacaagttctcgctgggggactggggaccacagcacctcactccacctacactctagagaattcaaatctgagtattggaagatttattttcagttacagtggaaggcagagacatgaaatagcaccaaattcaaaagcagctcataaatccaggtaataggagtttattgattgctacattgtatctgtcagaagaaaactcctttaatgaacacatcaggccgaggacatacacagcccattggcagccgactccgattccagaatcgatgcattttgataaataggttgttatggaaagtaaaggttatttaacttgtttgacttgcatttcacagtgatcgcaagttgccctggagccctctgaaccttctgagtcgccctcgctgccgcaggacctcctcccgcggggtgtccgacccgctcttgcttggctgagactttgtttaaaccctggctccgatgcctctgagcccttgatagcagcgtcccagcctggaagaacaaaaccagccacttttccccttggcaaaggcacagcaaggcgggtgaggcgggcgctgagtagtctgggaatgggcagggagatgtcgaccctcggagctgagactgctctgtgctgagaagctagaacaaagcctgacatgttccaaggggcaagctcagggctgggagggaagcagcggggccgcccctttgggtgggggtgcccaggccttgcagacaagacactggccagaggaggtggagcaggggtactggggcagaggggccatgtttgtgcagcaggatggaccctggagggccccggcctagagggggcctttgccaggaagatgccaggaacgtccaggccaaggcgtccgggcaaaggcatccaggcccgggagacgcatgtgggacttgggctttcctctgtgggcagtgggaagtctctccctacccctggaaggagctccaggcagcagtgaggatggggattctgacactggagtggggagccggccctgtggtgctggctgggctgagagcggcaccaccttctgatgcccagggtgggaaggacacacgactgccaccatgcactgagggccctgcacgccacacacgtgctctgagcactgagggtcccctcatgccacgcacaagttctgggcacagaagcacctctcagaatcatccccgagacaggcgtccatcacagagacaggtctcagtcctgcactgattggcttcgcccagtgctgctgggggagtctcagacacagcctttttccgacaggtatagctgccactttctccggcacagaagcctggggccctgggaatggcaccatgttgcgcgccgacccctacggttcttccctccgcatggctcagtggaaaccgtgcgtgcagcacagcaggcagctggggcctgtgacgaccctggggttggaggccaggcagggctatcactgagaagcagggatttggggcctggggcccagggaatggacaactccccaagctgcccccaccagtccttcctgagcactggctctggaagaagcatctcggggcagaggcagccaggcccaggcagggagagacccccaaacaaggcctacagcagggtctcagggcctgaccatgccagaaacagcccagagccagagaggatgggcagatactcagtgccaccactcctgggagatctcagcaccagggcttcgacctctggggatacacacccacacctgctgagatataacacatctgcagagacacagccacgcctgcagagacatacccacacctgcagacacacccacacctgcagacacacccacacctgcagacacacccacacctgcagagacacagccacacctgcagacacacccacacctgcagacacctacacctgcaggcacacccacacctgcagacagagccacacctgcagagacaccctcacctgcagagatacaggcacacctgcagagacacagccacacctatagacacacccacacctgcagagacacacccacacctacagagacacccacacctgcagacacacccacacctgcagacacacccacacctaaggagacggggtctcgcagtgggcggagaggttgggtcttgcatctaatcagccattgatgggcctctcctgtgaagggcactcattccttgtattcataaattaagctcatgtgagtttgttctttaacaagttattgcgcgatcataatccattgccgacgttggcgtgactcaccatgtcatgagcccactcggggctggtgctgctggagatggggaagaaaattgctccataaaccaaaaagcaacattttaaaacttataaaaaagattcgcaggaaattagaaataacacacaggggttccttgtgccgtccccccagtttctcccagcatcagcctggtgtgtaacggtggtacatcctcagtgccgtgcgtagctttggtgcagtctcagccccgtgcgtagctgtggtgcagcctcagccccgtgagtaactgtggtgcatccttggagccaggacacaggcagctcaagagggtgccggggacttgtcagccttgggggcaggcagtgatggcctctccggcaggaccagagcagggcagtggctccatgctgcgctgggtctctgggtggtgcaggccagggtggagccaggccagaagctgtatggagggccctgagcacctggcagcctccctggtgtcagcagctgtggcatccgtggggcaggagcagcctggacggggtggctcggtgcgattaagagatgctattggaagattggtggctgtctggtccagaggggacacacaagccaggctgcacagcaggagcaggagccatggcgggtcccacgggacttgggacaggctgtgtccaaccccgcccacagcccaacctgcacacccccttccagccgcccagactaccccaggggcgcagtgagaccactctcctgtcggggagcctctggtttttctgctacccatcagcacagagttccagagttccagagctccataaataagcctggagcccacctgggcacacccatccgtcttgtttaatagactgaggagcacgccatgggtctcaaggagtggtgaggtggatggatggggcctttctgcgtccaacagcatgatgtataatgaagtatttatgatttattccagctaataacccatgtggagtgcagggtatgtggaagcagacagttgaggcctcagcactgcccttacatgccctgcatgctcccacagccacggcacacatgtgtgcgtgcacatgctcacagtcacgcataccgcgccctcccagctgcacacacgctcgcaggcacgcacactatgggcccatgcgtcatgagacagcttcgggctgggagtacaggctctgaggctgcagcccgctcttcccgactccccaccctcagtggctggtggtgtctgtgttgagctactcgagaaaggaagaaaacgaaggaagcttggttcccacaggagctccaggaactgcacggggaggagcaagggccacgtcgtggctttgccttaggaaggaaaacgtggggcagccccggccattgttctaggaccagcatggtcaggtgtggagggcacaagatgggcaccagcaggaggctccaggcacccaggaaaggccctgtcctcctcagccaccagcccctccctgtggcctctgcgtgggccttggtgcctctcccatccagaggggctgggcattcactgctggagcccaccgtggtgggatgttgtaatgtgtctggttcacttcttttactgaatatttggcctggattcttttgtgggcctgagagaaatggcaggacagggcctggtgggcctcggcccctctcccagagcagcctgcctgcatgaggggcggcccctctatgctgcagtcccaggggctccgtctgggggcccttgcagcagtagcagcacagccaggaggcccagcacaccctggcacccatcctgagggagggtaaagcatcagaccctgtgcttgttgctcagaaaaggccacgcatcccacccatggccagtggttatcaatcactgtcacagaaacagggcctgagccggcttcctaatgcagggtgtctgcagaccacaggcccagcagggcttctggcacctcctgctcctggcaggctctggacccactgctgacctgcccctggaggaagtgcatacagctgagcatggggaagggaccccacaggaagggcagaccccacatcatgggcacagtcccaccttgggacgcacgtcgtgaccaccaggaatgtgggcttacctggcatagctgtttctccgttggggttgccacagggtagtaaccagagccccctttcctcagaggacaccgtggtgtttaaggacggccagttaaccagagccccttttcctcaggggacaccgtggtgtttaaggatggccagttaaccagagccccttttcctcaggggacaccgtggtgtttaaggatggccagtactggatccgaggccggacctcagtggacatcatcaagactggaggctacaaggtcagcgccctggaggtggagtggcacctgctggcccaccccagcatcacaggtgcgtggccggacttgggccagggaggccaggctagacgggtgctgccttccatgtttgagttttagacgactgcagatgagtcgacgccgtcccagctgcctgcaggggtccctgtgatgctcacctctggtccctgccctggccagggaacatggggctagtgggggtgcagcctgctcggtgttggagccactgaccccgtgcccaccagagctcccaggcctggccgggcgcagctcccatctgcatgattcccctgcaggaaggtggcagggagagtgcagagagccaaggggcgggaaggcagagcccctgtgagtgcccagtccccagatccaccgtggggagcccgtcctcactcccctccccacaggcccagccagcaccaggacgagtgattggagtggggcctgtccaaggacgggctccagggctgcggccagactgcgctcttcctgtgtgtccaggcactcttcggcctgtaagggtcactgaggcatccccatgttctcaaactgttcttctatccgcagatgtggctgtgattggagttccggatatgacatggggccagcgggtcactgctgtggtgaccctccgagaaggacactcactgtcccacagggagctcaaagagtgggccaggtagggctgggtggggcgggcagggagcactcatggggtcttgggggtccagtcttgagggccaccctaggtattggcatcgtccgtcttagaggtggagatgagggatcaagaaagaccagcagtgagggtccttagagacctgaaggccgcacacagcaggtagagacgagggcagggggcaggagccgtgctcagatttgacttggtggcaatattccgagggggcagaaactcacattcctgggacagggccctgtacggcctgtggtgggttccgtcctggtcccaggagagatcccggatgagccaggccaggcccatgcaggaggtgcatggagctgagatccagggttgacaccagctggccgcacgcgctgggcccttccccgccaggccacaggcagcctgtccacctgccgccccaaagccagtgctgggccccagcagaactgcaaggcccacccattctccgtcggcacctgcacggcctctccctctcctgccctgggggtgggtcctgaaggtgcctcacacacctccagtcagttccacggagaccccagcaccatcaccatcccctcagtcatttcactttcccctccatgtccagggcagggcctgttcctcagcggtggccaccacccagtccttaaactcacctgcattttttgttttgcctttaccttacccagaacctttccccaaggactttctcccacctgtctcacccccagtggtttctgatgcatgggatccacagaccctccacttttgccagcagtggtggtggtcacgcccagggctgaacctgagctatggccttgtcaaaggccgtcaggacggaagggtatcccataggaccgtcagggcagagccaggctgagctcagaaaggaagcttttagtttcacctacagtaatttcttttgtttttttaatttataaagaaacggggtataattggctcatggttccacaggctatacaggaagcgtggctggggaggcctcaggaaacttacagtcatggcagaaggcaaaggggaaacaggcacatcctacatggccggagcaggagggaggagggaggagccacagagtgagtgagggaggagggagggtccacagagggagggagggtccacagagtgagtgagagaggagggagggtccacagagtgagtgagggaggagggaggggtcacagagtgagtgagggaggagggaggggccacagtgtgagtgagggaggagggaggggtcacagagtgagcaagggggggaggggccacagagtgagcgggggaggggccacagagtgagtgagggaggagggaggggtcacagagtgagtgagggaggagggaggggtcacagagtgagtgagggaggagggaggggtcacagagtgagtgagggaggagggagggtccacagagtgagtgagggaggagggaggggtcacagagtgagcggggggggggggaggggccacagagcgaggagggggtgggaggagccacagagcgatgggagagggaggtgccacgcactctcaaacatgcaggtcttgtgagaactcactcactagcacgagaacagcaaggggaaaatccacccctgtgatgcagtcacctcccaccaggtcgctcctccaacagcggggatcacaattcaacatgagatttgggtggggacacagatccaaaccatatcgttcctccctggcccctcccaaatcttacgtcctttttacattgcaaaatacaatcctacttcccaacagtcccccaagtcttcactcatttcagcattaattcagaagtccacagtccaaagtctcgtctgagacaaggcaagtccttttcacctatgagcctgtaaaatcaaagacaagttacttcccagatacagtgggggtgcaggcattgggtaaatacaccagtgccaaaagagagccgccagccaaaacaaaggggctgcgagccccaggcaggtccaaaacctagcaaggcagtcactgaattgttttttggtttcttcttttttggtttttttttttttttttttttgagacggggtcttgctctgatgcccaggctggagtgcagtggcatgatctcagcttactatagcctctgcctgcaagcaattctcctacctcagcctccctaagtagctgggactataggcatgcaccaccacacccagctaatttttgtattttttagtagagatggggttttgccatgttgtccaggctggtctcgaactcctgacctcaagtgatccacctgcctcagattcccaaaatgctggaattacaggcgtgagcaaccccacccagcccaataaatcttaaagccccaaaataatctcctaagacccatgtctcacatccaggctacactgatgcatggaggtggctcccaaggccatgggtatctctgctcctgtggctctgtagggtacagcccccatgctgctttcataggctgctgttgtgtgcctgcaacttttctaggtgcaccacacagtgcaagctgtcggtgggttattctggggtctggagaacggtggccctcttctcacagctgcagtagccagggccccactggggactctgtgtgggggctccaaccccatctttctcctcttcactgccctggagcagtggcctgagctctatctggagcccttttagccccagagcaacagggatgcaggggccagtgtccctcagggcagtggcccacaaaaccattcttccctccgaggcctccaggcctatgatgagaggcacttccatgaaggtctctgacacgcctagagacattttcctcattgtcttggcgattaatattcagctcctctttacttacgcacatttctgcagccagcttgaattcctccccagaaaattgtttgtttgtttgttttctaccatgtgatcaggctgcaaattttccaaattttatgctctgcttaccttttaaatctaagttccggtttcaggtcatctctttgctcatgcttaacaaaagcaatctttgctccagttcccaataagttcctcatctccctccgagtctacctcagcctggacttcattgtccatatcgctattagcattttagtcacaacaatttaacaagtctttaggaagttccaaactttccctcatcttcctgtcttcttccgagctctccaaatcgttccagcctctgcctgttacccagttccaaagctgcttccacatttccagatgtcttaacagcagtgccccacttccctgtaccagttttctgtgttagtccagtcttgcattgctataaatgaagccagatttttctcagccactttgccaaccggggacctccgtggctggtgacacccccaacccaggcctgccacagaaggcacccacacactcgacccactgggccatgcttggcttatgcactggctcagcccacctgtgttatagcttatacctgcattcatcggttcccaagttcttgtcccgcgtccaagaagaatgaggttacactgacaattcaaagggtgaggagagtggagaagaattttattgagcaatgaaacagctctcagcggagagggtatgcgagggtgctgaaccgcccagagttgggtgtggctgggtctagggcttttctgggcacagaatggggaggggcaggctgtaggtagcactggaaaaggtaacctttggttggttaaaaagcattattcagaaagaaccagtgggaaagagtgggcaaacaggaatagaagttctcactccaggctgcaggtttcaggctgtttttggcttgaaggtggggtttcaccagggacccacccctgtctatctgggcatttgactgcttcctgttgctttcataaggaactacccaagatggtaatttataaagaaaagaggtttaagtggctcacagttccacaggctataaggaagcatggctggggaggcctcaggaaacttacagtcatgacagaaggggaggcaggcatgtcccacatggtggagcaggaggaagagctcacctacagcaaattatttaagaccgagcatttgtctctgttctgttccctctctggacgcaccctcctgcctccaccctgacttgccgtctcctgagcactgaagatatttttggcttgtccgatgtgactccacagacagcagaaacgcttgcttgatcagggcagcatcagggcaccacacatgcctgggcttgcacaacacagcgggagcactgccactcagcagcagctgctgctttcattaaacagttaccttgagaagaaaagataggtgtcgagggctgagagctgtgctagagtttcagggtccgagttggcaggaactgaagtcccgatgctcctcagcccttggctgtcctcagggctgccctctgcgtggggacaccaggccgcccctgcccagggacaccaggccgcctgctcctgctctgtgcatctctcacatcaggctcctcacccagcattgtttgggctatgacagtggctgtgacaagaccctaagacgggaagctgcgtgcagggcacttgagggcccgctgaggagaagccgcctgtgagggacaggactgggcagggaaggccaccagccatgcggtcacagcccaggactccgccagtcctgcaggagccctggagccaggcccttgctgtccaggccacttgctgtacctggcccacagctacctcccctgcagccctgagtcctgcttgctgtgcccggctcaggctgagactgcagtgcttgtccattcaccatgaaagaaagaagaacaggaagggaggcaggaggaagtaagttagaggattaatccaaatgttccaactgtctaatgggagttccaacaagaagatatccagggaggaaattcacagtcaaatttccccaaaccaaaggtcatgagttttcaggttgaaagaacacccaaccaagaggagagaaaacagcattctaaatatcggaaggaaacgaaacctcgcctcaggcatgcgggctctgacgggcaggatggcggcacggagggctgctgtatccagtgaagtcagcagttcagatgaaacagataactcccttaaaagacacaaattgccaagactgacgcaaacactgaaacagactgaacagttctgagttaccaatttaaaactgcaaagcaaatagcaggcccaaaaggcttcactgataaattatctcaaacattgaaggcaaaaaataaaaccagacacagcaaagtaagtctctgatgaaacagagtggggaggaacacttcctaactccccgtatgggaccagcactaccctgaaatcaaaaccagacaagaaaacgagaggacagtgttcccaatgggcagacacacaaaatcctaaacaaaacgttagcaaattaaatccagttaatgcacaaaaagacaacacgtcatgatcaagcagcatttaagccaggaatagagggttactttcatattcaaaaatcagtctgtgtaattcaccatatattttttttttttttggatggagtctcgctctgtcgcccaggctggagtgcagtggcacgatctccgctcactgcaacctccagctcccaggttcaagtgattctcctgcctcagcctcctgagtagctgggattacaggtgcgcaccaccatgcacagctaatttttgtatttttattagagacggggtttcaccgtgttggccaagctggtctcgaactcctgacttcaagtaatcctcccgcctcggcctcccgaagtcctggaattacaagcgtgagccactggtaattcaccatatttacagaatgaagaagaaagatcatatcatttcaatagatacagaaaaagcatttgcaaatgtcaaaacccttttataacaagcactcttagcaaactaggagaagaaggaaaatccttgaacctgatgagggagtctctcaaaagctaccagatgacatcctgctcgatggggagctgctgggcgttttcctcctgtgaccaggaaggggcgcctgccctcaccactgccacccagtctcattcaacacagagtttgtcccctgttagaaaccgagacgttggttacacgtggaggttgggagtggctcaggcaggcagaggggcttctgggaacctggccatgttccctttcagtctgggcgctacttagagcagggggcagttgcttcaataaaactttagattcccacacaggccaggcgtggtgctcacacctgtaatcccagcactttgggaggccgaggtgggcagatcacctgacgtcaggagttggagaccatcctggccaacatggtgaaaccccgtctctattaaaaatacaaaaattagccaggcatggtggtatgcgcctgtagtcccagctagttaggaggctgaggcaggagaatcgcttgaacccgggaggcggaggttgcggcaagccgagactgcaccactgcaatccagcctgggcgacagggcaagcctctgtctcaaaagaaaaaaaaatctacacatccctcaccacactgtacataggacagctgggtgtaaattacatctccatttaaatgcctgtcatagttttatacaactataaaatatatacgtgccaaaataaatttgataggaacattggaaccaggtaaggtgacgcatacctgtagcacttcgggaggatcctttgagcccaggaagtcgaggcttcagtgagccatgactgcaccactgcactctggcccaggcaacagtgagatcctgtcctagaaagaaaagagaaaaaaagaaaaatgcgatttggaaatgtggaggtcgaggttgacagcgacaccgaggtcgaagccagttgcccctggagagcgagagactgggctgggccgactcccacctctgtcgcgagaggcctacgggcaggggcaggtgggcagggggactgtgctgggtctctggccgcgtctggacggcaggcgacactttctccacaaaaagcgtcaagaaaccacgacacttggtttctggacttttccgcggaacagtaaccagaacaatcgccatgaaggttcgtttctgtcatggctcagtgcagcctggacgccctggaccagcccctcctgcgcctgggccacggccgctgccttcagggcatcactggtgggcggcacaaccatcctccctttggggggttaatttcatttctttcctcccttctttaatggtgaatggaggagcaccgagcaccactgcagtctcagtttcagatcccagcgcctcgtccctgcccactgccctcggccccgcccgcctgcattggcagtgccctggccccacccacccgtgtcagcaccgcccaccgccctggcaccacccaccgagttctcgcccatgaggaagggggaccctgagtggaggtttcaaaccttaggggccgtccctgccgtgcagggctctgtgaggcctcttgccacataggcttgtgtctgcaggactgtgcggcatttactcccatctcaaataccccatacagggcagactgcccctgccccacctgcccacccactccccagcctcttccgcacgcctcctctggaaggggaacgggccacagagtgaaatggggccttccagctccagtgcggggacttggaaggcctggcccggtgtgggggcccctctgccctgcaggccactctgtgcaggcctatcctcaggtgtgccctcgcccaaggcctgcacgcaccatggcttctgtggtaccagtgataacaccatgccgggcacctcctgcagtcaccacccctgggctgctagggcagagacagctgcggtggcccggtgcacctgcctggcctcaggatggccgaggcgcctggcaaggctgcagggtcccaggggcacctgtccgtactgctgggcgcctgagttcctcctgctgggcactgtcagggcagtgcgcctcaggctgtgcttgtctctgcagaaatgtcctggccccgtacgcggtgccctcggagctggtgctggtggaggagatcccgcggaaccagatgggcaagattgacaagaaggcgctcatcaggcacttccacccctcatgacccggcagactgggactgcgggtctggtggggagcagcagacgtccccttcacaccgagaaccacgggggcccgtccaagacctggcctcccttaaacctgaaccccccaaatcaggtcacgtagaatcaagaactgtttgggatgaaatcaccatgtggggtccccagcctcgggccagttgttgcagctcaaggagaccgtccctggtgtcacctctgcctggtcaccgccgacctcatctgtgcagcgcggtgcagccagcccctggccccacgtgctgaggcacctcccgccccacagtgccctgcagttgccaggctctccagggcaggtcccagaggtttcccacaaaaaacaaagactccactggaggaaacaagcccctgtcccacgccgtctgcacgtgcctgtgcctcacccagagccagtgtctcccggcccacataggaggtctgggcagccacccagggggccctcctgggaggagctgagggttcacaagcctcccagaaccagccctgtcccatgggttccgtgcatttcctggtgctgctcttggaggagagcagctcccactgtggggacacctgccaccctgcacactactgtgtgtccatcagcatgtgtcacagaaagtgcgtggacggatggccccggagctgctctgccgtgaccctgcctcaccccccagcgcagggactttccaggtcatctccacaccagcccctcagccggtgaaccctctctcccatcaccgtctccacccagacccccacctgccccatggcccccatttcatgtctgtggctcaccagcttttccccagacccagctccggagcccacaggcgtggccgatgcagaaacctcaggaaggtgtgttgtgaatgttgggtgcacccacgttgcatttacttagcggggccaattcagatgcacaggggccacatgcagaatccagaagtttctggacaattttcagaagaataggctgcctcctccccacagcctgggggaagtaacagtcatcgcccagcagtgtctggcctgaacttacccagaacattctgcccccggaatgcacgtctgaaagagtggccagaaacgagtgtgccgggcaggaggccagccccatctcaggctcacgtgcctctgacaggagaccagccccatctcaggctcacatgcctcgcggacagttggacgtggcctggggcccctgctcacttgagcatgtcgcccaccaagcttgtctgaggccacagagcagcgtcccagccctgttttccaggactggtgggtgccccagtccacggccctgccccacccgaactcctgcctcacggtgtggccttgtgcatccccatggcctgaccccgggaacagtcagaggaaggggtcccgccctcccgccagaggcctggacccaagggaacggcagtcagagactacagtccagacgtttgtgtctaggccttgctggtagctaaggaaatgccttctgttgggaaaaggtcaaatttaacatagcaaaatttttacttaattccactaattttacatttgcatctctctcctttaatcctgaaacttttgattcctaaaaagcttacataatcatttgctttatccgatagtatacatcagtatatcatgctttcgaaataatgagtgtaactttctgctgacaatactacaaactacagaaagcctggagctcattgaccagaaactgcagagagcctggagctcgttgaccacaaactacagaaagcctggagctcgttgaccagccggttgaccagaatacggtgctccaaggacatgcggttgaatgccgtgttctaaagtcacgagtgactctccagctggtccctgtgccaggctggtcggccttcgtgcacacagtccgccagtgcccagccaggcccctggttcccctctgctccaccagccgagaacaagcccgtcctggagggaactcatcctctcctccctccccattaaagcccagtttattccccatcttggcctctggtgctgacctggcctctggagacacaggccggggggtgctgtttgcgaactcaccgtgactgagctccatgaggataccacagtcccacgtggctggcagcgcccaccccacacaccctgccccttgctgggcggccccatgccacaaaagttagacccaggagcaggtgccctgggagcaggctgccaccagctgggtcagaagcccctctacatgcctggtgcttttgacctcctagggaggctggcttgaatctggaaagtcaccagttctgaccccagccagacacaggggtgctgccaggagctgctcccaggcgggtggcccagcttctctcaggcaccaggggatggcaggactcctggtgaccagctggtccccaaagccgtggcaccgcgcctgctgctgccagcaaagtcccacacacagcctgtggcaggtgccgccccattctttctgcccctccctcatcaggggccagggtgaagcccctgccgccctctgccttccctccacctgcggcttccctggcagggagaccatggacccagctcctgcctcctccattcgtttaacagatagggcccaggccagcagcccaggcattaggctggccggtccactgaggcctagacaggccaggcctgaggcagctcaggagtgccaagctggccccacgttcccacccaacagcggcccttggggctgccttcctgccaggtgtccaggcccaacacacaagacctgagcctgctctgcctcagtttccctactctgtgaactgcggctgctgctctctcggggcccttctagccctggccaaggggtgggggctttgttccctcgggcgtcctgtccctggggactggccacacacacaccacacactgccctcccacctggactctgtcccagcggcaccagggtcaggagcaggagcctcaggacccacgcagcaccaggcacagcacggagtgaggcagtgggcggtgtggcaagcgctgtgtgcaccactaacctggaggagccacggctcccggaccctcgtgtcaaagctgccggcctcctttgctgggagcctgagaggaggtcctggtgcagaacagcagcttgttgccagccacagtgagaaggtggtgagtgtgccagccactgagttaaccatcagtaacaggaggcgtgtgcagacaggtgtggaccacaggtatgtatgtcacatgcctgcatacgtcacatgtatgtgtatctcacacgcctgcatacaccacaggtatgtatgtcacacgcctgcatatgtcacatgtatgtgtctcacgcctgcataagtcacatgcatgtgtgtctcacgcctgcatacaccacaggtatgtatgtctcacgcctgcatgtcacatgtatgtatctcacacgcctgcatgtcacatgtatgtgtatctcacatgcctgcatatgtcacatgtatgtgtatctcacacgcctgcatacaccacaggtatgtatgtctcacgcctgcatatgtcacatgtatgtgtgtctcacacgcctgcataagtcacatgcatgtgtgtctcacacgcctgcatacaccacaggtatgtaagtcacacgcctgcatgtcacatgtgtctcacacgcctacatgtgtcacatgtatgtgtatctcacacgcctgcatacaccacagggatgtatgtctcacgcctgcatatgtcacatgtatgtgtatctcacatgcctgcatgtcacatgtatgtgtctcacacgcctgcatacaccacaggtatgcatgtctcacgcctgcatatgtcacatgtatgtgtatctcacacgcctgcatgtcacacgtatatgtcacacgcctgcatatgtcacatgtatgtgtatcacacacctgcatacaccacaggtatgtatgtcacgcctgcatatgtcacatgtatgtgtgtctcacacgcctgcatatgtcacatgtatgtgtctcacacgcctgcataagtcacatgtatgtgtctcacacctgcatacaccacaggtatgtatgtctcacgcctgcatatgtcacatgtatgtgtatctcacacgcctgcatatgtcacatgtatgtgtatctcacacgcctgcatacaccacaggtatgtatgtctcacgcctgcatatgtcacatgtatgtgtatctcacacgcctgcatacaccacaggtatgtatgtctcacacacgcctgcatatatcacatgtatatgtgtcacacatgcctgcatacaccacatgtatgtcacacacatctgcatatatcacttgtatgtgtctcacacacctgcatacacatatatgcctcacacgcctgcatctatcatgtgtgtgtctcacacacctgcatatatcacatgtatgtgtctcacagctgcatacaccacaggtatgtgtctcacacacgcctgcatatatcacatgtatgtgtatctcacacgcctgcatatgtcacatgtatgtgtatctcacacgcctgcgtatatcacatgtatgtgtgtgtcacacacacacctgcatacatacaggcacatggacacctgtgtgcacaccagtccctcccttccccgtcaccatcaggttcagccgggcctgtggtcactgcttccccgaggcagctgcaatggggccccggctccccctacatggtgcgtctgatcaggttgggactcgctcaggtagctctcatcacaaggtccttgtgcactgttgcggctgctcttggtggcccttctagagccttcctgagccagagcagactcctgctccccccagaccccctgggagtcgattctgtccccttcttcctggccgcaggtcggtgcagccgctttcctgcctggaagagtaaagtggaccctgtgtgaaaacattgacgacgtggcaaatgagcagcaaattgatcaatacgaatgatcacgccccatgtgcatctcctcagcagccacaagagagacgaggtcactggaggataaacatccgtgactgcacctcatgatccatcacgcacgacggccgcagcatctcctgccagctgccggcacagacaagagcacgggatggacgaccgcggtagcaacgtggggctcatctgcctctctctgagcaggaagcccgtaggtccccacaggcgggtgcacggaaggggtgggtcctgggcccaacaggcaccccctgagcaccagcccgtctgagggtgggcggagggcgctgccgcaggtccccacatacccagcgcacgctcaccccacactggaggcacctgccgggttctgacacccctcgaggtgccttcccagggttctcacacccactgaaggcagcgcgctcagcctgctttgcacatgagccgctgaggcaggcgagttgagggcgagggtgtgaatcacgagcttggggccaaagcccaaggtcgtcccctctggccggcaagctcaggctcacacggggagccaccaggctggactgggtgcagcttacggacgtggcgcgtgctgtgggcgtcgggccgcggctcctccatgcagtacttacactgctgtctgcagatcgcacccaatcaggagggaatggtccaggcaggtgggcaaggccacggtttggccaggtaaggctgggagggcccaggatgattgtgcgttgagccaggcagatctggagaggcggagggatggggacggagcgccatgcagaggccgctcggtcctcaggagctgagcatcaccctgggagtctcaaggagggtgtcccctggccttagcgggcagccagggccagcatgtggtctgtggcagccggtctcagaggtggcctggttcgcagtcttgctggatggagatccccagctcctagggcaagggcaggtggggtggggccgcctcggtcagctgataggaactgaactgagaaggctgtgagccgctgagtcgccctaactgcagggtggtcctgcgggcagtactgagcccgccctgctgggcaccccacagcccctgtggctctccagctgccactgaggccggacgcctcatgaggaggctcccatctgtgggtggcagaatgacggccccgaagaccccccgcttcctcacccgaagaccccccgcttcctcacccgaagaccccccgcttcctcacccgaagaccccccgcttcctcacccaaagaccccccgcttccttgccccgaagaccccgcttcctcaccctgggacctgtgagttcacacagcagcggggacctgcgactgtggacggcacatcagctccctcaacagggaggctgccctgggtgacccgcgagggcacagggtacctccgtcctgctgagtggaagagggaggccatggcggaggcgggcgtgagggggactggcctgccactactggcttcgtgaggggcccccagccaaggagaggcctcccgaagccggaagaggcggaaaatggattctcccaggagcctccagaaggaaccttggtgttggtggaatgggatgtgagaggacacgcgggtgatgtgtcttgggtcacaccagttcccggtccccgcaccagcccgccctgggcgggaagcctaagaggaatggaggggccatcgtggggctctcccggaaactggccccgggtgcctcggtccctgcgtcagtgcggggtttcggtggccgccctgctggctccgggcactccctccgtcttcctgccacgcggctggtccttcctgggctgggctgagtcaccctccatgcccacccgtcatacccggcaagagctgggggcgtgaagccaggcccaggtgggctgtggcggcatccaggtggaaggacgtggaggactcggaggcggaggggtctccagggcagggcagggccagttgcctggggccatctgctgtgtccaggagcccggcgctgccactggccttgccccaaggcccagctctgcccttcatcccttcagcacctccccgtaccttccttccatgggtcttaagctgtggcaagtccttaagctgggacggccagcgccagccctgcccccaacaggtcactcagcggctcggagcccacgtcctcctcggtgacacaggaaaatggtgcagttgtgcaagggcatgagagggtcccgtggaaggcacattccagaaggttctgtcccatggaaggcacgttccggaaggttccatcccatggaagccacgttccagaagtttccatgctgtggaaggcatgttccggaagtttccgtcccgtggaaggcacgttctggaaggttctgtccggtggaaggcacgttccagaaggttcctagcccagctccaaacacaggctgcaggctcagcagaggggtcttcttcttgcccacagtccctgaccagtgggctccccagggccctgtcggagctggaatgggtggagcttggtgcctgcaggccagtcagcacatcttcagaatccatggtgctcccaggctggcccagggccttaggagcacagggtgggcacaggaccccaggctctgccagccaggccctgaccgtcctgggccagccgctgcccccgttctgcatccgcccctgtgcgatgcgacctctctggtggcgcccatcccagcttcattcccctgtgggccctgcttcagtctgcctgggacacgtgggcgcgtgtgtgagttcgcatcagcgagcatgcgtgcagcgtgtcacatatacatacacgtgggcgcacctgcacacccatgtgtcacagaggagggagacggactcacacgtggtggccctagccacaccctcagtcctctctaaagcaccagccggtgcccacccaggcagcccctcatcataggctcacagggcacgccccccattgccagtctgaccagacactcacaaccattcagttactctagccacggagtcatcagtctccttcattaccacctgcccaccctcctctgccgcacagcaaagcccattaagacagcagcaatgcgagcagcacgtggtgcctttcatgcatcagccgcttgcccatattcccaccccatggggaagagcttcatcttagctagaaaaagatgacaccccacaccagctgaataggctgcgtgcacacacacctccacacgcgcacatacacacacatgctgacaggtgtgcacatatgcgcacgtgcacacacaaatacgcacgcacagcacacacagacacataagtgtccataaacaacacagatctggcctcagagccaccctccaggtgcggctgccccgggccccaggtgcggctgcaccgtgctgtggtgacagccacagcaggatcagagcagcctcaaggcccttcaggagccggcagagctggccccaggctgagcttggggaggtgagcccaggcctgggaccgacgcttcctaattggcgggcagagtccatgcagcccctcccagtctacacggaagcccacgtgtccacctcctgcttctgctgtccccaggacagtgaaatttactaatgtggattaagaacattttttaaataaaaaaacattttacacattgaggacggaagagagaagattacggccaaccaaccccgtgcacttccccgcccaggttcatggagtctgagccctctggcctcctgagcctctgggctctgtcaccaggtgggcgccttccccagcccgtgaggctcgctgctcacgggggccccgatgcctgagtgatgtcatggatttaggtttcagtgctggcacatgtggcccgcagagctcagctcctctgtgagggacgtttcggctcctgtgggctttgctgtcccccatgctgactctgcctcacttggttgtcctcaggtcactctgtgcggtgtgcactgaccccagccagtggatgttccccgtccaagagcaaagctacagtcggctgcaggtgcagtgacttttgcacagtggaagaatttctccagaagatattcctgcaggtggaatcactggatcgtaggcccagatgtcttccacttacttgattttgcctgatgccttccaaggaggctgtgcacagcaggtgtgagatgccccatctcaccaaccggccaacatcccgatgggagatgttgagttttcaccacgctgctgagtgtgacgtggaatcttcttattttagcttgcatttccctgattacaagtcaggtggaacatctcgaatatgtttctgggccatttgattttcctgcaagtcacctgttccagttctttgcccatttcctgttgggttggtcaatattttttgtgattacacgttggatacgtggctggcctttggcttgcctttgacttcgtttgttctatcgaagcatgtgcagaattgttaaattttaatgtattcaaatgcattaatctcatttcttatttttgttgttttattttttgttttttgtttttttgagacagagtctcgctctgtctcccaggctggaatacagtgacacgatcttggctcactgcaacctctgcctccccacttcaagcaatcctcctgcctcagcttcctgagaagctgggaccacaggcatgtgccatcatgtccggctaattttctttttaaaatgttgtagcaatggagcctgggctcaagccatcttcccacctcagcctgccaagtagctgggaccacagacatgtgccactgctgcgcccagctagcctttaatatttttaaatgctgtaagatctgcaggtttttttccaaccaagtttatagcttttcaccccacggatccccgaggccatgacaggcagtgacctccttggggcacccgcagagtcctcccccccatcttgggagggcttgtcc

SEQ ID NO: 1127 - DNA, 83941 bp, Homo sapiens
gaagcagctgaagcggcggtagcggcggcggctcgggcagaggggcgggagctgaggcgggagcggacaggctggtgggcgagcgagaggcggcggaatggtggactaccacgcggcgaaccagtcgtaccagtacggccccagcagcgcgggcaatggcgctggcggcgggggcagcatgggcgactacatggcccaggaggacgactgggaccgggacctgctgctggacccggcctgggagaagcagcagcgcaaggtgcgcggcccgcgggccggacgggctggaggggcttttctgagggggcccggggaggggtgggaggtcctgaaaggtaactggagcgtctgtgatgggaacgggggggtcccgagaaggaattggcgggtccgggaagggaattggagtcctgaggaggaatcgccgagctagaggaaggaattgggaatctgaaaagagaattggcggctgggtggggaatatgggagtcaaataaaaggaatcgggaaggctgatgaaggatttggagggtctgggcgtgccattaggggaaaccgaggagatgactgggcaggctgaaatggaactgggatccgaggcgggcttgaagggtcggagcatgggttgggggtgctgggaggagaatcaggggaggctgagaagggaatttctgggtctgggaagtgtgaggaggagcttgagtgtggaggggttggttatttggagagcagaaagatctgaaggagattggaattgggggagcctcaggttgggggagttataaaggggatgaagaatcaagtgtgaggatggagtggagattgtggggtctgaagacgggtgggaagactagggaggctgggaagatgaaaacaggggctaagggtagaattgagcatgaaaagacatgggcttagggtgtgaggagggtagaggtgccaggactgggggtctgaggagggtggggtgcggaaggaagaagttaaggggcccgtgaatcagacgtttttgaagggggtgagatttatttgtggtgccctgttccaaaggggagaagattaagagataggaggaataataagaggaattgatgagggatggagaagccgaagtagaggggatacggagagtggggataatttggggagggatttctaaagaattgatgggaagctgaaaagctaaagcgttggagagaatgaggaagtgtagagggagaaggtgagatcggtgggagggagggtgagctggaatggtggataatgggagagaggttcgtttaggaaaatgaaagtctcattagaaagggaatgcgtaatggatagactgagaaaggaatttgaggagggggtgctggctcctggaggtgcagtcccgggactggagagcgtgtgtgtgtcgtgcaggcagaatgagtttggggaggaagcgttgagagtgtccaggaagaattgtgtcttttttggagagaccggaggtaggtgaagggatcctgaagcagagactgtgttcaggtggcactgtttttttggggggcggggggggcaacttggtagggccccacagcagtgaaaaggtgatcagaagtggagtgggatccccgagcgaggtgtcagtgtctgtgggggggggataaatccagtgtggttgaggggggagctctgagtgtgtgcaggaagagctaaagaaaggagcgtggtgagtgggtgtgtgtggggggaaggggttgttcagaagttttgtgcgtgaaatgggtgggaggtacttgaagttggaagcatttcgtgggatctggagatctggattttctttccagatttgttactgattcgctctgtggccttggacaagacccttgaactctccgggcagttttgttatctgcaaaatgcaaagggatccgagggttccctgcggtgattctgttaataaagagggatgtgtgtagagttgggactttggacagggctctgaaggtttgggagagtgagtttggtggagatttttcaggaacaggctacagggctttgagtggtgacctggcagagtggggagtgactggaagcctctcgagggcgcgagttggtggccaggagcttggcacaggcagcctagcccaggctggaggggaaagggtgggaagggtggaaggagcagctgttccaaggcagcctgaggtggggccgggcataaccttgggtccattaccagcgttgcttgaatttcctcatccgtagtaactgaggggcatggcagtggcttggtgggaggggtgtccttatccgtggccccacctactgcaggatggacaggttgcgatagttggcataaattcactttttgaggggaaggtgagatctgttctggagtctcaacaataatttattgcctgaggcagtgccaggttggaaaaggttgccaagagacctggaaagttgggagggagcaggggccacagtggtggttttgagaatgtctaggctttgtcttctgcagctgaaggtgctggagaaaataaacccctcccccttttttctcaggtgataagggtggggggaccttccttttctctcccttcctgtcttctgccactcctcaagtgactccttttgcgagccgggtttcactccctcccgagagttagggtgtgggctttgttcgtggttatagtgtcccttgcctacagggtgaggctggggcaccattcaggccctgggtggaaaccaggactccccagaacctccaggccttgctgccatgtgtcattctcttacctcccagctcccttcctctggggccgggcaggtttgagggaaaagggtggctcacagagtccgctaataccatctgctttcgtgtctcagccagagccagattctagtacctcctgctttacacctcctccagcaaatatttacccttagctgctctgtgggggaaactactgcttcacctctgtgccctttcctgttatggggtagggattctttttgaaatgggggaaggagtaatggaaaggaatacaccaatctgtgtggctctctaccttcctactaagaaacatccctgcactcccaggctggctgggttgtttgtttgtttgtttgtttgtttttggagacggagttttgctcttgttgcccgggcgtgatcttggctcaccgcaacctccgtctcccgggttcaagcgattctcctgcctcagcctcccgagtagctgggaatacgggcatgcgccaccacgcctggctttttgtatttttagtagagacggggtttctccatgttggtcgggctggtctcaaactcccgaccccaggagatccgcccgcctcggtctcccaaagtgctgggattacaggagtgagccactgcacccagactggctgggttttttctacattgcagtgttgctttagtgaatgacagattgcccttcttgcctctccaaggctgagccactgggcacgggaagaatgacagtcctgggggttctgtacatgcatactccaaaaaaatatgcatccagaacagctgtaggccctcaaagtgggtagaattgaattcttctaggaattaagcaagagttggcccaaatcagaggggacgtgtgtctcacttctgcttggaagccctttgctctgacttctagggacccctgtaacccgtaagtaggttatgcaacggtttttacatgagagggccatgagtgttctcctggcgggatggagaagcattgttctggtctttgagcaaattcttgagcaattacagttctgggccacagttccctctcccaatttctaaaagtggcctgggtaacctcatcaccctctgttgtcctggaagggtgagatctcttgaaggttatgccaaatctcattacagcaagaagaaatgactcacttgctaagttttcgtgttcattgaaacatcactatttcaggggcctcaatgtttcaaccctgaccgttggctttttttttggagacggagttttgctcttgttgcccatgtggctgtattaggtatgagttaactatttgaaagtttttgtttgttttttgtatttgttttttttgttttgttttgttttgttttttttgagacagagcctcactctgtcaccaggctggagtgcagtggtgtgatcttggctcaccacaacctcttccaggttcaaggaattctcctgcctcagcctcctgagtagctgggactacaggcgtgtgctaccgtgcctggctaatttttgtgtttttagtagagacagagagtttcaccatgttggccaggctggtctgaaactcctgaccccaagtgatccgcctgcctcggcctcccaaagtgctgggattacaggcgtgagccactgtgccctgccttgtttttcttgaagtagatctttttttctttttaaaggctgataatggaggccccaaagtagccatctgttactttgttccattactctaattgcttgcctcttaggatctggctaggactaacagttttcaaaattgagtaacacacttgacaaaaaaaaaggaaccaaactcaaactcaactgttatctagaaaaaagactgtgtaaatatgtgtgagaggcaagtatactctgtttgccctcttgtaagagggataggggaggccactcagctgctagcactctgttctctcccctcatcctctccagaatgtattttagaacttgactcttctaatgactgaagaaaaggtggggtatgggaagatggcctgggactgcagggtcacttacactcacctggctaagagttgagatctggctggtgccctggagtggcacctgccactcacctaatcctaaacaatccagggtgtgggcccaggattgccctctgccttttgaaacaccctccctggttccggcttctaagaccaacagggaggctactttggtggcagggagctgactcaccctccagttggaactggtgctaaaagcctccatttaacggcagccgactgcttggccccaagtgggctgccttgtgggggggaaagttcagtggaaagtgttggaggaagcagggtggtgtgtgaatatccaagtagtgctggtgctattaagctctgacacagtcagggaggtcagttaaaatgtggtcttatggccgggcgcagtggctcgcgcctgtaatcccagcactttgggaggctgaggtgggcagatcacctgaggtcaggagttcgagaccagcctggccaacatggtgaaaccccgtctctaccaataatacaaaaattaactgggcatggtggcaggtgcctgtaatcccagctacttgggaggctgaggcaggagaatcgcttgaacctgagaggtggaggttgcagtgagccaagatcgcgctactgcactccagcctgagtgacagaacaagactccatctcaaaaaaaaaaaaaaaaatcagatgacagaggggagcggggacaagttttaagtctaagcctcctgggtggggagttctgctgtttcaacatatgctccagtcatggcagactttggccagacagcgccctttttcagagtgaactgagtgtagcacaagttatctgccagtgctagttagcaaacagaatggagccaaaaaagaattgatttgggaaggcccaaggaatttgaaaccgttgagatgaacactttccgtttttgctacactgatttatgttgtgctgggaattgtacaagcctttgaccagaccttagggttgttctttaaaaaaaaaaaaaaaagattcccttgctgctgcttttacttttttgaagggcagaagggaagggcaaatataattagtgaacagctgtttgctctagtatcacttgctcgttcaggttttctgaatagctgaaatatcaacatgtttatctcttcccttgccttagtatatcctagagcagtgttttccccggctttatctttattccttcatttaatgaactccgtgttttcatcactcacattttgttcccttccctcagtttccttcctttgccttcatttatgtatttagtttacagaataacaaaagcactcgtgttacttttaaacaaggtaaaacttaaacagttttttcctccgtttctttttttatggaaataagaggcaagtgatagcaagtgggtaattcaatggcagtggtaactgaagcactgacctgttacaagagagacggaagcttctacttgagcagatacaaatactgtcatccgtggagatttgaaagaagtctttctatcactgggtagtttgagagctcattagtcttctttagaatgggtttaaacttggaaacatcaaagcaagttacaaggaaacttagttttacagtgttggcagcctaggcgccagaatttgttataaagtgtctgaaagtggcccaggtatcacttaacttttcttcaagaaggtctatgagttacattttactcggtatcccaggcatcaaggagtgtaactttcaatgaatcaaagagaaacagaatcattttaaattccagcctctgtttaaagaaggatcttatgaaggggagaaattaaccacctgacccagggaaggatcccgcctcctccagaaagtgaaatcgccgggtgtggtggctcacgcctgtaatcccagcactttgggaggtcgaggtaggtggatcacgtgaggtcaggacttcaagaccagcctggcgaacatggtgaaaccccatctctactaaaatgcaaaaaattagccgggcacggtggtgcacccctgtaatcccagctactggggaggctgaggcaggataatcactcaaacctggaaggtggaggttgcagtcagctgagatcacgccactgcactccagcctggacgacagagtaaggctccgtctcaaaaaaaaaaaaaaaagaaaaagaaaaggagttaaatctttgcatatatttaactggcaagagcatccttacatcagtgcatgggaagttttatccaagtagcagtttccctgggattataaaaatccccgaggcatttgtcttggtgttgtgcctttttttggttgtgttttttcacgtccctcccctcccctttctccataaacaagagaggcattaacttggaatgtccgtggaaagtcttagaagctgattggtgtaatttgcctgccttccctttagtttgaacagcgtttactctggaagaggtcagtggcctttttcttggttgtgatttatgcaagtgttatctgaaggcgagtggagtgagtttacgtgggatttgctgtttgccacctgttgttgtgctggctccttccttcctgggatgagttccattctctccccctcccccaggagtgaggctccccagccagagcagtccccctgtgcttatccccttccttcgtaaactgcagccatttgtgattttccataaccacttttatagacacataataatttcctttgaatcagtttgcattttaaattaagttttgaaaggaaaactgacaagagtatggcaactggaaaacccagctcccctggccataaatataatagaaggaaactgcaaaaataaacacattgaaaacaaaacagtgttgtttccaggtggttaccactcgggctgaaggccccccaggcttgaggcctgctccctttgttagaaagggattggcaagtgttggtgaggtgttaaagacccaccagcaccaagcagagactttctctttgaagtcatcaggtttacaagagaatcaaaggaaataactttctcaatgtgattcagggtgtaatgtaaggtgtagataacccttaaaattttccatgtgtgtatgtcacacttgggaaaaaaacttgatctcatctggtcgaggtgggcagggcagcaccttgtccaggagcacacagcccctcttggctctgtgtgtcatccggccatactagactcgaacatatggctcatgactggatgatgcttgattcatcttcagtttcaagtgttagtgcttttgaggttttgtaagaaaccaggacacattgaaaatacagtcatttctcagtatctgtgggggattggttccaggaacccccttatataccaaaatccacagatgctcaagttccttatgtaagataaaacgatgtgtaatttgcattttaactatgcacatcctcctgaatactttaaatcatctctagattacttataacctaatgctaaatgctacgtaaatggttgttacactgtgctgtttaggaaataatgacaaaaatatgtacatgttcagtgcagatgcaaccattcattttttttcttccagtattttcgatccattgttggttgaattcacagatagagaacccatggatacagagggctagctgtaagaaatgtgggtttatcatttgttcctcacacaacttttttctttcttcgtttttcttgcctttgttccttttttttgagacagggtgtcactctttttaccaaggctggagtgcagtggaacaatcttggctcactgaagctttgacctcgggctcaagccatccccccacctcagcttcccaagtagctgggactagaggtgcacaccaccacgcctgactgatttttgtgtttttgtagagatggggttttgctgtgttgcccagtctggtctcagcctcccaaagtcttgggattacaggtgtgagtcaccacgcccagccaactttttctcttaaggctccagttttcttcttagagttgggcccctcccacgaagaaagcacactgccaccccttcatcggatttgaaccctacattttgaaaggaaagcagtgccctcctgctgagttaacaaggcttatttaaatgtttttcttccaaatatcagagcagaacagattctttgtcttccagtggaactatccacatggggcagaagtagttggaagcggcagttactaccctgcagaacacaatgaagtcatcttgggaaatatcgtggatggtgttgcaatgattgaatgggatgctagaacaccagcaatacaatagcatttgtgtcttcagcttcaggcaggaataaagaagactttgtggtttgttttatgttttttaaagtttcccccccaaaggtgtggggctgagtgatgtctgtcactagctttctagtgggtttttcttttcatcttttcccctccctgatgtcttttgagagtgggtggaagccacagtctaggtggatcagaggaagcacagaaggcaggcagtataccccactttgtgttttccatgtctgaagggaacacatttggtttttgttctgttttgattttttagagacagggtttcactgtcacccaggctggagtgcagtggcctaatcataactcactgcagccttgaactcttgggctcaagggatctttcagcctcagcctccctagtagctgggattatgtgtgcaccaccatggccagctaattttaattttttttttttttgagatggagtctcactctgtcacccaggctggagtgcagtagcacgatctcagctcactgcaacctctgcctccccggttcaagtgattctcctgcctcagcttcccaagtagctgggattacaggcgcgcgccacgacgcccagctaatttttgtatttttagtagagacagggtttcaccatgttggccaggctggtcttgagctcctgaccttaagcgatccacccaccttggcccaacaaagtgctggggttacaggcatgagccactgtgcccgaactaatttttaaattttttgtaaagactgggtctcactatgttgcccaggcttttaatctgcaaaaagcccaagataaagagttttaatatcttacctcctgagtagtaatgactgattccagttctaataatgtcttaattacagctatacagattgaggggactgcaggaagtgaaatagatgcatttcttttttctttctttcttttccttttttaaatacacacttcgtttcggtggtgaaggccagtttgaggttaggagaggcatcttggaaggaagctcgcaggtggttcggcatctggacatgctgggaagttgcctgagggggacgtcacaataagaggactgtgggtctacagcctgccttagcaaaatgacaggccttcttttaccaaggccaagggcagtggtggaagctgacttcagttggtgtcatcaaggcctcagtatgtgtaacggttaacaaattactattctatgatcaatctccatctgggtgtgagtaaaaggtatttagttgctatcaccatggaaaccaagttgcttacttactgttttggggagtgccctcataccagaggcagtgctaatggtggagtgttaggccccgggcagaaaaaaagatcctgccacttggtatcacaggaaaatacctacaggcacagcagccttgccaggtaggggatgaaggccctctgtcctcggggcaggagttgggccagttgattgtgttgatgaggagtgtgcatttgtgcatgagagagggagaagaaaaaggagagcactccatgaaatccgctgctggctttgtagcctagaagagtgctttttttctctaggagtttggaactggaatctcagctatgtgacttcttaataataggacaaaatatgcctgtatcttttgcctacttccacaaacactgataaattaaaaagaactctaaatttcccacaaatcccaagcacaagtaactttttttttaaatccacatcctccctaatccaaatctaacagcaaatccttttctctctgtcactccctgcttttctttaagaaaatgagtaccttgccttaaactatatattggatgaaaatattaaacactttcacaaagtgcttctttggctgttactggtatgccttgcatttggaagggtcagagatttgaagacttctgtgatcttccagttctggcctatgaaatacagtcagtttcaaaattcaaaatgtctggaagagccaacttgccaggccggttcaagggcagtcagatgaatcgacccttcttacaggctgtctacgaaccagtcatgattcagatattcaagtcctggaaggtatccagacggtaaacatcaccaggattgtgaggcagttacttttttttttggatcgtttgagctacactgccaagactgtggtaggacttgtctgtgtaaaacagaaagggctgtctctaaatgtctttttcaagaatgtcggctataatcacccgacactgtgtctcatggtggggtgagatgaaatacctagaccggttaggggagggccttcttggccattttttgaactaattttccctttccctttgtaacttttttttcttcttttcttttctttttttttttttgagacggagtcttactctgtcacccaggctggagtgtagtggtgcaatctcggctcattgcaacctccgcatcctgggttcaagtgattctcctgccttaggctcccgagtagctgggactacaggcatgcattccacgcccagctagttttggtattttttaggagagacggagtttcaccatgttggccaggctggtcttgaacccttgacctcgtaatgcccacctaggcctcccaaagtgctgggattacaggtatgagccaccgcgcccagcccctttgtaactttcattaacactgatgaggcacaagccataggatagaattgaatccattgagagctgtgagccaattgagggatgattggttaatagattgtggcttgaagctgtggaaggtaaggggtgacacttgactcctattagccttgtagaaacacctcagagattcacaggaagcaaactttgaccataaaaatataagactcacagcgcaccgagttctcttagcagctaccttagagttgagaaagttttgggcctctttaataaacaagcacaaagcagttcttgccaaatacggcctgctctggggccacagggttagcttaggagacaactttcttgcctaaaaataaatgcatgttcctatcagacattccaagcatagtttaaacatgagacttctgagcagcagctcaagctctgtgggttcaattatgtcagagtatgggcagtgagggtctttggggagtgtgcccccttatttgggattggttgtggctaccaaggaaatcagatgatcaaatgcaaaacttcctccatcttatttctatatgatcttttttttttttttttgagttggagtcttgctctgttgcccaggctggagtgcagtggcaggatctcagctcactgcagcctctgtctcccagattcaagctattattctcctgcctcagccttccaaatagctgggactacaggcgtggccatcatgtccggctaatttttgtatttttagtagagacagggttttgccatgttggccaggctggtctccaactcctgacctcaggtcatccacccgctttggcctcccagagtgctgggattacaggcatgggccaccgcccccagccttatttctacacgttcttgatctatcacaggctggtgggggagacagcatgcatatagataatgaacaaggtaacttcagataggattatgtgcaataaattaaataacagctagcattttaccttgtgctagacactattctaagtgcttcccatggactgactggtttttgtttttttttctttcctttgagactgagtttcgctcttgttgcccaggctggagtgcaatggcgtgttcttggctcactgcaacctccgtctcctgggttcaagcaattctcctgcctcagcctcccgagtagctgggattacaggcacgtgccaccatgcctggctaatttttgtatttttagtagagacggggtttctccttgttggtcaggctggccttgaactcccaacctcaggtgacccacccgcctcagccaccccaagtgctgggattacaggcgcgagccaccatgcccgacccatggactcacttgtataatcttgtgaagcaggtgttgttacccttacatgcagaaatggatccatgggcctttaagccacttgcccctgtgacagtgccaggatttgaatgtagaagttgaggctttcaagtttatgctgttatttctacactacactgaagtctagtgattgggaatggctttgcgagcgggtggtgaggggaggagtgtgcagtgcaggtacttcagatggagaggaaggtctcaaagaggtggcatttcagctgttccttaacggatgagaaagagagaaccaagagagcaccagaggaacgcgcttccaacagagaaaaccaagcaagggggcccccgaggagcagaaaggcccgagtggtcagagcggagcccgtggaagagatgggcacagccagattgcttagagctgtgttgttagaagtgctgatgagtctacattcaacttgcgcctgcaaactcagtccctcttagatgccagtaggtcaggaacctcatgcttccaggactctggcgctcctaccctttcctcccaggcctcctggacaggccaaaccagaactgacttctaaagtgggaaccccaagacggcagaacatgaatcagccaaacaaaagctgcagttatctctgtgatgatttcggcagtcggcacgtgtatttgattaaagcgttggtaactttgaatctggagttttatggcactgtgtactactcataatggctttgtagtgtggctctcttagggagcttaacttttacaacatgaacaagttccagcctcctttggtcccatcaagaggccatttctacctggtgggatgccacttgctttacaaagcatcttttgtaaaatgttgagtctccttctttgaagttggaagccaggaagcctgattttttttccaataagtattgtagaagatggcagcctgatttatttttatttatttatttattttgagacggagtctcactctgttgcccaggctggagtgcagtggcacaatctcggctcactgcaagctccacctcccaggttcacgccattctcctgcctcagcctcccgagtagctgggactacaggcgcccgccaccatgcccggctaattttttgtattttttgtagagacggggtttcaccgtgttaaccaggatggtcttgatctcctgacctcgttatccgcccgcctcggcttcccaaagtgctgggattacaggcgtgagccaccgcgcccggcctggcagcctgatttttaaactggcttttctcctaggtcctttccttctctataaatccctctttcacttagtatttcctccttgtttcctttggtcagttggagtgagggtggttctagttcagagaaagagacaggcatacaggctgattcagtctgaggtgcttagctttctgtacctcactggaaaccagtccaggaatatgacaggtttcagtaggtttcattggacccacaactccccatttgaaggcagagcttgtcaaacgagttatgtggcttttactcaaggagggaggaacagcaacagggagctctgggctattgatagacactcctgcctctgaacacacagcacccagcaagaagttaccttcatgggttgtctagagtgaacatgggctgggattctctcagccttagcactgatgatttgacaacaaaaatcgccccgtgggtagagtataacggagcaaatgattatggtggcctgtgatggtgcagccagcccagctgcttcagctggaaagaagatggcgaggtttccattctcctggcagcatagccatgtgaacttgttaaatcttttaagtagctgtataggaggggagataagtgtgtgtgtgtttattcttatccccttaaatacaaaaacaaaacttccactttataaaatcaattcagagtgggaagaggtgcatggcacatggaaaatgtgtcggattaggttgagtcctaccccacgtttgggacacagctgtaagtttccatggtgggtggcttattatgcatttatgctgagctgaacctgctccaagctgctgcagataggaaagtctgtcttggagggggagctgcctctttctatcacactataaagacataaaaggtcctttgaaagactccagcagtcaccacttgggtaacagaattaggggctgctgagcaaagtgggtctgtttttttttttttttaaagacagagtttccctcttgttgttcaggagtggagtgcaatgtcacaatcttggctcactgcaacttccgcctcctgggttcaagtgattcttctgcttcagcctcccaagtagctgggattacaggtgccggccaccacgcctagctagttttttgtatttttagtagagacggggtttcatcatgttggccgggctggttgtgaactgctgacctcaggtgatccacccgcctcagcctcccaaagtgctgggattacgggtgtgagccactgcgcccggccacattttatagccaaccggcttcttgtgtaacatgagttggggcttcttgggccccagagtccagcactcaggtagaaatatgaccgccatggccagacagcagccctcgctgggcccctcttcagagcagagctctgtgccgagcctttaggggtatgagagaaaccggagacctggtccgtgctctcaaagagctcgcggtgtagctggggagagagcaaggccacatgagacctcagaaggacactaaacggcacaccgacaagctcacagcactctagctgtgtcccgggagaggaaaggggtgaatcagggcaggtggggtcagtcatggaaactttcataaaggaggtgagtgtgcaggaggggcgggcctttgcccccgctgcgggcaggttgccgagggcaagtattagggggtccggcgtgcaatcgaacatttcttagctgcctctttggagtagcgctaccagttcctgtccccatgagcatcgtcttcggggagctgctggtttgaaggatgaggtaccatgctcatcttggccatgtcttagaacctgtgatagccagacctgtcgttctgggtccgtatccattcatgcgtcctgtcactgtcacagatatcgtgagtgggccagactcttctccccaggtgggagggggtgccttctgaggcatatgttttcagcctgctgatggcctcttcagaattagcacaggtttcgacaaaaagaatggagagactcccttctcatgtccaagggtctccccaagccctgtgtctcagcccctcagggcgtgtggtgctgcacactgccgcccagatgaccacgcgcagccggaacggccgccctgtattgagaagtgggatcggctcccagtctgctggcgaggctgggttgccacagctcctctgttgccctgcaacgcgggtggcctaggagtgtgctgccttcagtttattcctgcctgccaagctacgcttccaggtgctattcttttctttaaataactgccttagtgctgcttgtggaacttagcgttcccatcccaggaaatactccagtgttgtgtttttttttttaaactcattcagatgctcatggccaaatgtgtgacttaaataccgcagtgtccttgatattgccttccccacaccgacaaaccgagttgcattctggtcccactgtgggataaggttagggtagcggcgcttgcctctttgtgtggtttcagatgtgtttctccccacttcagataacacatgacagctgtaatatagctcagttcgtgcaagtaaggtaggggcagaaatcatccaggagaactccagcctccatcctaaaggattagactgcctagcatcagtaggtttaccatagaaggattcagtggagatagcgagggtggtgagtgttgctggattgagcccgtccctgcagcctgggcacgggagcactgcagtgccatgaaggagagggctgggggatattagcacagccggttcctatttccttttccacctggttaagacttccggggaggccctgcccagcagtccttatgagatgctgccttcctcttttttgaaaggcatagatgataaggaggtggacatgttttgagaagagaacctagagctcattacttgtatttgaggcatgtattgcttcactcccactttgggagagttttttctggggaagttaaaggctattcaggatcagagagtttcctgcatggtcccaggggctgggaggagccacctgctcagctggtggttagctgatagcacccagcctacccaccaagataggaggcagctcagatgtcactgggattcgcagtaccacaggctgtccctgggcccaagcagttagctagctgcaccccgggagggggtgttgagagcactgaagctcctgtgggagagtgcctttgacatcccccactccccactgcccagaactaggaggtagtgaaaggtgtcagtggcaagaaggctgggccagagcatggagggaggccgacctgggctccacacccacctcctccaccaccggctggctgtgcgaccctgggcaggtggcgggggttaagcctcagtgtccttctttgaaaaggggcatcatcctatcctcagtttgaggattagacgtgatagtgcgcaggaagcactctggtgcctggtacattgtaagtgctcaataaatgcagcttcccaaaatgatttcaatggcacatggtcctgcatccaggtgggatctgctacttgagtctccccctcaaaggggcctgctgaaatacgcagctcagtgggaaaccaaaacatacacccctttcctccagtgctccccaggaagcgccaagtcctgagcccagccagcaacttcgaagaagtgccctccaacaagtggcagtgggcacttgagcaagtgacttaacgcagccctctccccagcccctgcatccatctgggcctcattatctgggaggtggcttcttgtttcagagttacaggccctgaacaattttgtgttgggatgtgccataggcagtgccaggaaggttctttcatgagtaatttaacttgttactaagtttgctatcagccggggggctctttccccgggttcccttctttccctgggtccccttccccgcaaagcaaagtccaactcaagttagaaacatcccacagcctggagtcaggctgccctctcttcagttggtgtgtgatgtagaagcaggaagggcttcccactgataaccctaaaaataactgcccagaaatgctgtcagatggggccaagaggtgcacaggagcctgtgcccagctgccgacctggaacgtgggactttctagagggcttggaggagccctgccccttccaggcctcttcccaacagtgcttctcacgcctgctgctccattcccttttcctccttcctcccgcgcccccccctttcctggggtcacttcctgatgccattcttcaacttcgcccctgtcccccccaaaagcaatcaaatccacaacctaataaggcaaaagaatgaggagaatgtccgcctcccagcctctcccctaacagggtgcaggcctgaagcaaatttggaaaatgttacaacggagtgacaaccgatgggggctgggggtggggcggtgcagccttgttcaggagctgcccattgttggcctgaggcaggaccctaagggaaggccacccggtttgcgctttcctgatcaggctgttgacacccttctagcacaagaaaatgtatggaaagtaactgcctgagtcagctgcatctccagttgtgggatccacgtgccaggagaacacgaagtacacacaggtccgcagtgggagcccgctcggagacacctccccgccatcacggctgggactgtgcatatccaaacacttcttgcctctgagatgagcagttttcttccccttgactgtgccagggttcaattagcctgggcattaattaaaacttgtcaacacttagagtggggcccccagaaatctgtcacccctcctagatcattatcccaggctaatcaaccctctctaaggcagtttccattcttgacttagtgggagggaggaacaagcccctcggtgctggggagctctgggggaggtagggactgactgggcccaacccactttgttttggaaggtcaagcttagtaattaacctgaatgcttgggggagggggtgaaggagaaagaactgagtctagggatgtgccaggtctttcaaattgctaattatcagcgagcatgaggtcatccgtaaatatatctaattctttagcttgtaattaaggtgctcattaaaagtgcagggaagtcttgttttcctaaaaggggaaaaaaacaacaacacaaaaagtctttgttttgacctgacacgatggctcagaacagggggaggactcaaggcacaggactagtttcctgccttaaagagcctttacaggaaattgactgcaaacagtattggtgaccctgccaaggaggcaaacctagggtgatgtcattgttcgaagctgtcaccgccaagcctctggccttggggcgaggagagttggtgggattaaaaaatgagtgtgtgtatgtgtgtgtgtgtttagcagtctctaaagaggcgagtcaagggaaaatcctagcgggagaaaaatcacaaggggtggggggtgtctcagaaatattcttagctgggttcaactttcctcgtttttctaagtttaaaaaatcctctcttactatttttgctcatcaaaatgctgctgctttttcagagacagccttttttgagccattccctatttagtgttttgggtaattggctgttacagtatggaatttgtggcccaaaggcagcgtggtaagttagacactaggtgcacggtgccccattgttatgaagtgtggaaactgagacgctggactagtctgatgtatctgtttcttccaccaaaaaaaaaaaaaaaccattttggagaactacccaatgccagtgacttggcatctctgagtcgctaatcttcccatgtgcctccaggaaccgtctggagcgtccctgaaaaaaggacaaggtttgtatcttgtcatttttcctctggctggaagtctaagaggtataaacacagtcttaaaatgaaagcaacaaaaataaactcaaagcagccctgcgtgaaggcattaatgcaaaatatgcaagctggcttcctatttatacggcggaaggcagtcagaagagccaggcctggttaaggaaggagttatgtctctggaggtgcctgttccttagaattacaaataaaccctgggtgattactcagatgaggttgtaatgtggtgtctcatttcatgctttgcacagtccagtttcttgatggaaccaacggcctctgaaatgctaatgcaggatcaggatacagttagagtgccccccttcctgtgcccctcctaacatcctaacagctttagaaggaagtttgaagattaaacaggagagccatgtaagtttcctgtgatcctagatcctgtgatttgttaatattctttctcttcaatccacctgacatttacccagataccatattaggcttggagatacaacaagaaagaaaaccaacccaaccctgtccttaaagaaaagatggacgatgaagggccaggcgcagtggctcactcctgtaatcccagcactttgggaggccaaggcgcacagatcacgaggtcgggagtttgagaccatcctggccaacatggtgataccccgtctctactaaaatacaaaacattagctgggcatggtggtgcgcgcctgtagtcccagctactcaggaggctgaggcaggggaattgcttgaacctgagaggcggaggttgcagtgagccgaggtcgtgccactgcactccagcctggcaagagagtgagactccatcgcaaaaaaagaaaaaagaaaaaaagaaaagatggacaatgaattgcatgatggaagtgaacagtgttagggcgatatgcagatgtaaatgtggtcttgttttactgctcactgacttactgaagtaaacccattgacttcgccttcatgggtttgaaaagggtttttccaatgtgctctgtgtgtctcggagctcaggtgttcagagctgcctcccttataaatcgacctccaggagagttgtgtgtttggttcttggtgtatggtttcgtaggctccccagggctgaggagtcaccttgggatccagctttttttcttttttcgagacagtctctccctgtcgcccaggctgaaatgcagtggtatgcacttggctcactgcaacctctgtctcctgggttcaagcgattctcctacctcagcctcccaactagctgggattacagacgcctgccaccgtgcccagctaatttttgtatttttagtagagacggggtttcaccatgttggccagattggtctcgaattcctgacctcaggtgatccactgccttggcctcccaaagtgctgggattacaggcgtgagtcaccgcgcccagccaaaatccagctttttcttagttcctggcttggggcatgttgctggaaaggaatgacagattgaggcaagaaggaggcaagaaggatgcatctcctggccaaggaaactagagtttggaggtgtcccctgtcaatggcatctgaagaatttctacattggaaaggcataggtgacccagtctggtttggagtagatgggactgggtaggggactagtcttgaagctgcaagcatgctgtttttacttagagcacaggtagctggggaggagatcactgtggtgtgggtggcagaagccatccctagccatcacctaggaagatggtggcccttgggttgcccgagctgctgcttgttttagtagctgcatttggtgccacatttttgtggtaactgccaggaagcggagcccagcgtggcctcaggaagttggtgaggtttgcaccactttttaacaggctggtaacagtgccggagctgacaccctcatggttgcagccctgggattttgttatttggggacactttggaatatgtcactcagaatgctggctcactagctccacaagcaaaagactccttgggtagctggaagcaagcgttgggggaaggagggagaggcaattgcagtccagccaagaatctcaaggctcagtcttcaatgtatggaaacttcagtccttttctgatctttagtggaaatagctgttcactcttagcgccaattggaaagtgttggcagctgaagggggtcgttcctcaggggtccccagagccagtgtatctggtatttctaacattttcctagccacccctttctcctccatatgcccctcccagccccaccattcagatagggtggctggaaagaacatctcctaggtcctctaggaaacttggtgtttccactcaagggagttggggatcacgtaacaccctccacttccacctgggatttcaggccatctgtgggagtgcaagagcatggtggggtggaggtcacaggaaggtggaagcaaagccagggcagctccacatgcagccccctttcaggaacagcaaggataggccggcctgtatcttgttgctcagagcaggtgatcctgtcatttggacccttgtgaggagaatggatgtgagtgtgcacctggttctcttctcctggggctgagggactgtggtcttggattatcacatggtaggtgaggtgacaaaatggagggaagtagcctgggtggggactggggtggccactgcagagctctagctgatggtggccaggtgggaatggggacctgggacttcacgaagctggaaatggagagttttatggggcatttcattcaacttaaaaacctggccgggtacagtggctcacgcctgtaatcccagcactttgggaggctgaggagggtggatcacgaggtcaggagattgagaccatcctggccaacatggtgaaaccccatctctactaaaaatacaaaaattagctgagcgtggtggcttgtgcttgtaatcccagctactcgggaggctgaggcaggagaatcccttgaaccagggcgtcggaggttgcagtgagctgagatgtcgccattgcactccagcctggtgacagagcaatactccaacttaaaaaaaaaaaaaaaaacctgcaggccatacaaaatagggcctattgggtgtgaagagctacccatttgtgacccctaaccttgcatggtcttgaccctgtctctgcctctcctctagtctcccctttcctcttgtctgaattgctgctgcttaatcctctcactaggagcgagaaaattgtactttgccccttagtgacagctctgataaaaggtggttgaagtggatggtagtaaaaagggtttgctttagctgtggttttccagcctccggactcctccccctttcccatcaccatagataattaagagttgactcctcaaaattcctcccaccatattgcatatttttaggcttcaggtttttgtgaaccaaaatagtggaaagtttttttgtttgtttgttttgggtagcccaaagcaacacttttctacagaggcagccattctgcacgcacaataacctggtgaacaatgccagctttctattaataaatgaactgccagttcagaatttgtacccatgtggcagatggacagaaatagtttctttaggattgatctcttaaatttgactttgggaagatactggcagtccaggttttgtgacagagatccatcctgagatctttgtaaatggaaaagcctgaatgcagcgtttcttattgataggagagttgatggatttcaggaaaatgggatatagtagatgtgcaatgaatttgttgacttggaaacaaatttggacacttatccctgaaaacttcaggccattttttcctaaactctaattgagtccctgtgattggagtactagccccacagtccttatcaaacttcgcatttggagcaggcagtctgtctgggaaaagccaggaagctcgccatgaaggcatcgccctctgcttttaacttttttaggctctgttacctctgcactggcttgagtatttcctggctcaattgtttctcaggctggccttgagtccttagatgttatttgtgtgcctagaaatagctggaagaaaaatggttgtaatgctttgcattgctcactgctctccatggatggaaattctgtgagggaaagagggctttccacccagaaaaagagctgggcagcgtagacttcattgtcctgctggcctgtcatgttattctgctatactacagcgattaggatgagagagtttctcgctctccctgggtgtgccacctaaggtacattagggtagggacgaacatggcgggagttctcatagtgggctttcctgccagacgtatggcccacacagcagtatttcttacatgtggttcttttttttttttttttttttgagacggagtctttctctgtcgcctaggctggagtacagtggcgtgatatcggcttactgcaacctccacctcccaggttcaagcaattctcctgcctcagcctcctgagtagctgggaccacagatgcatgccaccacacctggctaatttttgtatttttagtagagacgtggtttctccatgttggccaggctggtcttgaactcctgacctcaagtgacccactcgccttggcttcccaaagtgttgggattacaggtgtgagctaccacaccctgccaaggttctattatttgatctatgttctttgtttgtttgtttgtttgttttgagatggagtttcgctcttgttgcccaggctggagtgtaatggcacgatctcggctcaccgcaacctctgtctcccgggttcaagcaattctcctgcctcagcctcctgagtagctgggataacaggcatgtgccaccacacccggctaattttgtatttttagtagagacggggtttctccatgttggtcaggctggtctcaaactcctgaactcaagtgatccacctgccttggcctcccaaagtgttgggattacaggcgtgagccaccatgcccggcccctgtaaccatttttaagtgattgatcatctcagcatgattgatggagatgatggggttggccatccattcttttttttttttttttttggagacagtctcactctgtctccaaggctggagtgcagtggcacaatcttggctcactacaacctctgcctcctgggttcaagcgattcttctgcctcagcttcccaattagctgagattacatgcatgcaccaccatgcctggccagtttttgtgtttttaatagagacagggttttatcatgttggccaggctggtctcaagcccctgacctcaggtgatccccccacctcagcctcccaaagtgctaggattacaggcatgagccaccacacccggcctattcatcatttattgagcatttatttatacccactatgtgccgtaaacaaggtgctgagtaatgagatgtgaacagaatagtccttcttcttgtcctcatggagcacacagcctagtcggggacaataggcattaaaaaataccaacaatgaaaacccaagacatacatagagtgttccaaattgtggttttattttttatatatatatattcatatatatttatatatatttatatatatattcatatatatttatatatatgaatatatatttatatatattcatatatacttatatatatttatatatacttatatatatttatatatattcatatatatttatatatattcatatatattcatttatatttatatatattcatatatatttatatatatttatatatttatatatattatatatatttatatatttatatatattatatatatttatatatttatatatttatatatacttatatatatttatatatttatatatatttttatatatatatatttatatatgtataattttttttttttttttttttgtgatggagtctctatcacccaggctggagtgcagtagcgtgatctcagctcactgcaacctctgcctcccaggttcaagcaattctctgcctcagcctcctgagtagctgggattacaggtgcctgccaccacgtccggctaatttttgtatttttagtagagatgggatttcaccatcttggccaggctggtcttgaactcctgaccttgtgatctacccgcctcggcctcccaaagtgctgggattacaggcgtgagccactgcgcccggtgtgattatttttatgaaggaaaagaccagagtcctttaagaggggacagtgggggacttgcaatagattgtgtgggagctgtcaggggagactttccaagatgatgacagtgaagtgaggcctggagggagagttagagccaacctcagagaagggaacactgttctaggcaggaggacccagggttgtgggaagagagaaataaaatgagaccaagacagtggggagagcagtgtgagttgaagtcagaggggtgacagcagccagaatgtgccggtagcgaggatcttggattttattctagctgcaatgagagctttgattctacaaatatttattgcgtgctagtcactgttttaggtactgggtgtacaacagtgaaaaaagaacttcccagccgagtggaatgccgtggagcatatctgtttcgatgctgggacagatccctaacacagctcattaaagcagatagcaccattccgtctctttcttcagcttcactttacgtcagtcccagcatttttatccctacccttacagatgagagaactaaagttcagagaggtgacgtgacttgccccaggcccctcagtcagtaaaagacagaactgagaatccaaccagactcttccctttttaggttatttctctaacattagggccgagtatcgattctctttacctctgacttcgtgtccctggtattaagactcagggcccacagtgcctcttggaattcaggcatatggtgacatcagtgtgcctaccattcaggtcttggagaatagggtatggcgaaaggagagaactcgtgatatcgctgattcagtagcccagagttgtacgagtccttgggtgtttcaccttcatccaggcatctgagattggagacaagcatgtggctgaatgacgtatctgggggaagctgtctaaacagccgtgtggagttggagagttgaattagctctgtggccaaacctctgggctcagtctgcctatatatggcttgatctcaaagaacaggtgatagcagtaggagttgttttctgtgttgctggtgggagatgcccaggcacattcctttgtagacaagcacaaactagatatttttgaaatcggaggtctgaaaccagccgaagaattaatcctggcctggaaagcatatgggagagtacagccaacctggcttgggtgttgctttcttggttttgttgcatttttgaggcagggtcttgctctgtcacccaagtgggatcacagtggtacaatcatggctcattgcagccttaacctcctgggctcaagtgattctcctgccttattttttgattttttttgtagaggtgaggtctcaccatgttgcccaggctggtcttgagctcctgggctcaagtgatcctccaccttggtctcccaaagtgttaggattacaggcgtgagccgctgcccctggtgactttgttgctttttaataagcccagaaatttctttcaagagggaggatctttgtgaacatcttgagccgcgttcttgatcgctggctgtggaagcctccacctatcaggctcaagtccatgttgctatcatgtgcactttggctggtgaggtgctgagcagaggtttcagcctctaccacaaggtttcctgatgaaaggtcagctgggtgggcccagcttctccttacccaactgagaggcctcatagagcacaaggcctgggtacggaggttcctggggctcctgccatacccagccaggccaagcagagggccccagtgtgttgttgggtgctgagaggctgcccgcagctctcgcctgtgttggaaggctgtagacttggcttctcccaaacgtaagctgtgaagccatggactcagattctcagcctggccctgctacttactgtgggaccttgggcaaggaagtctccattttctcttttacaaaatggggccaataatctgactaccacagggctgtcaggatgcagcgggatggagcctttatagggtcttgttctgtgggatctggagtcccatatgggagttattagttgagggacgaggcatctgggaatctttattcaactaggaaacttcagccaaagaactaatgccatagagatgtcttatggtgtctgcatttgaagccagcggttctttgaaaatttatcctgagttccagaaagccaactgctagataagtaagcattgagcatttaaggggtcctggaagtaagattcctggaaagaagcagcaatctcttactcatccccgattatctcagacacagagtggtggatggaacctttgtggtttaggggctgactcttggtattgctggataaggaatatgagccagtagagacgagtgtgttgtatagcagtgtcctgcgactgggctggagacgtggctgagggaggccagggggcctcagagtgcacgggaggaggcttacagaggtcttttgcatcctgcagaacaccacatgtgtccttccctctgggaaacctcccacccgggcagggcctctggggccggatgtggaaggtaaacaggctgcctttctgctctctaccacagacaggcccggaaaggcctgagtaggagcttttcatctcaggaagccctgaggtcccacagcttctcctgaagcagcctcattgtccctttgtaagagcatgaccaggtgctctagctcctggagcaccagtggagaactagagtggcccaggtgctgatgccaagttcgagcaacagctcctggcgggtttccctgcatccccccactcactcccatctattcttcacataggggccaaagaacatcctgcttgacatcttgatcagtgtcccttgccctcaggatcaaacctgcaagtccccaaggccctgcaggatctgttttctcctctctgtgctccgggcgcatgccagctgcctctctgctccatgctcattcctgcctcctgagggacttcacacggggcccttgcctctgcccctttcgcctcagctcgccacctacctcctcctcattcttcagatggcagtttatgcttcactatttgtagggccgtcgcacctgacacctccagcctaggttaggagcatgtccatcacctctacttctccttttaactccaaccatccttggctctccctctcgagggtcacgagagcagagagagaatctattttgttcaccactgtgtccctaccatgtgggacattgtcaaggcaaatgtaagtgtgcactaaataaatatgtattgaatgaatagatagccaaacagacagaatggatctgccacaacacaaacaggatgcttttcaagtgggcagaagatggagacatcacttgtcgagacactcaaacaagtggctggatggatgagtggcagatccattctgtctttctgcttggctttaggagtagagggatcacccatggtccatcctctgaggacaagggtatcatgaccgcccaggccccactcacccctgccaggctcattgcatcccatctaaaagtgtgctctggaaggtcataagaagtcctcacctgggacacttctaggcccagtgttcagccagctgtcctgagttctgcatcagtccctgctagatatgaaacacaaacaggatgcgatgcttttcttttttttctttttcttttttgagacggagtctcgctgtgttgcccaggctggagtgcagtgggtgcaacccctacctcccgggttgaagtgattctcctgcctcagcctcccaagtagctgggattacaggtgcacaccaccatacccggctaatttttgtatttttggtagagacaatgtttcaccatgttggccaggctggtctcaaactcctggcctcaagtcatctgcctgtctcagcctcccaaagtgctgggattacaggtgtgagccaccgcgcctggccaaacaggatgctttgcaagtaggcagaagagggagacatcactgtcccatggagaggtgggaaaatcatcgttagcacaggataattcatcctattttgtgctcatgtttactgagctaggattgacctgtgtccgggcagcagggacacagaggtgagtaagacaaagagaaggcccttgcccttaaaaatgatacgtgtggctaaaacgctgtagacctttttgttttttcctttttgagacttcctttttatacagaaattgctacctgcaggtaaaattaacttacatcgtgaaagcgacagtaaagtgtttctagggatagctaaagacctaagaacacagccctgtggtttgactggctggccaccttcctgcagctgggtttactatggtgctgtgttctgggacagcccactcgtctccatttattgggctgagcctcgagacctgcaataccagggaaggaagggaagtctaggctgtctttggtggccattgttatttatggggcatcggcagagaagtcagtaccatggaaaatctagagaaagatagaggatacgcagtgtggttgagcagaatctgatagctccctggctctctccgggccatgggacccagggcgacacagccaccctttttctctctgctgtctggcttgggcttgggctttgtctcctgtgtccctccacaccttcttcgctgtcagtggtgaccaatcccgtggaatcagccactgtgtgttaccccaagtccttgcccctgggacctcgctctgttcggagacaaaacccgggactgtttctccttttaaatgcaaccttgttccacaggagaggagaaaagcaagaaagaggtggcttgtttatctgatggtagtggggtgtgctctgatatgcctttgaaaggggcccagctttgctttgcccagcggcctttgcaggataatgagagaaggaaaacacagggaacttagtgggaatttgaaactggagtgtgggagtgggaaagttcagcttttaccttggagcaatccagtctttctcctgtaggaaaacagaatggtgctgtatggcctccaagctgggttacatcctgggaaaaagacacgtgcttggctattggcctgggcgcagtttatgtgtaagcctttccttgtggattccattttcttatttcccgaatacttctcagccccacaagtccactgagtcttctgtctccagagactgcctggtttccatccccgagggcatctgcgcatcacttaccatggtgtaccatgcacctccagtgtgcccggcactgtgtcaggagctggggatacaggtgctggtccccacctcactcccctcaacctctgcaatatatgatacataacccacacacacagaccatatgcaaaagtggtgggactcctttgtacctgtcacctgcatcagtgattatcagcattttgccagacttgtttcatcagtgtctcccaacacactccccccagacattacccatacgtgctcaaatagatttgggtgtgcgtgtgtgtgtgtgtgtgtgtgtgtgtgtgtgtatttttttagagacagggtctcgccctgtcacccaggctggagtacagtggtgagatcatagctcactgcggcctctgaactcctgggcttgctttgttgcccaggctggtctcagaactcctggcctcaagcgattctgccaccttagcctcccaaaatgctgggattacaagtgtgagccaccgcacccggccaatgtatgtatttttaaacataaccacatactgttatatttaatgcttctgaccatgtcttaagaaaaaaacaaaaactccctttggcttccttgacatcacagtctctctgtttctctgactcttcttcctcatctcctatggctaaattctctccctctgtccactgcttacacatgggcatttcacaatgtcctttttccctgaaggaacttaccccctcccctcagccttaagtaccccatctgtggggatgatgcccatgcctgtagtcctgactcactcaccacgctctatcgcagttatttactgatgcatctctctcccctatcagacgctgaggtctttgatggagcaaccttgtatttgtccgtgtatccccagcaccacacctgtccatagctggagctcaggaagtttttttttttttttttttttttttttttttttaaagtcagagtctcactcagtcgcccaggctagagtgcagtggcacaatcttggctcactgcaacctccacctcctgggttcaagcaagcacgtctgggtaatttttgtatttttagtagagatggggtttcaccatttggccaggctggtctcgaagtcctgactgcaagtgatctggccgcctttggctcccagattgctgggattacagacaggcatgagccactgcgcccggcctcaggaagtagttgaatgagtgactgaatgaatgcccacgtgagcaaatgacctgtttgctgaactttagactgacgttgcctgatgcccactgcttgtgcagtacgtacttcagtctcagcgtgtctgagaccaaactcattttcaagtcccacttcttgggcttggcattgcccatttgtcagccatccgagtcagaaaccttggagtcagcttttgacttctcatcctgtaacaggcaccaagtttgatttctttcccttgaatatctcttagaaccctcaccttcctccttctctttattcctaccattgtccttactcaggaccatatagtgagggtttaaaagtgcagagtcttggccgggtgcggtggctcacacctgtaatcccagcactttgggaggccaaggcgggtagatcacctgaggtcaggagttcgagaccagcctggccaacatggtgaaaccccgtctctactaaaaatacaaaacttagctggatgtggtggtatgtgcctgtaatcccagctactcaggaggctgaggcaggagaattacttgaacccgggaggtggaggttgcagtgagctgagattgcgccactgtactctagcctgggtgacagagtgagactccaatctctagaaaaaaaaaaaaaaaaaaaaaaaagcagattctaaactcacagtgctgctgctggctgcctgagcttgtgtggctttggacagatgacttaaccactctgtgaagatggtatctgatgcacaggaaatgctccaacgttggctcttgtcgtcatctgtgcccatgtctccctcagcagcctcctgactggccttctccagtctcctggtttggattgaggctccctagaccctacctttctgagactggtatctagtcaggttactctgggagatctccaccccccactgcccagagagcaggttctgagctcttcagtctctccaccttctggccccggctgacaccatccctgccacttctcctggggtccccaaacatctgtggtacttttgtctttcttgcccttggtgttcccactctgcagaacaaccttctctccaggtcaccactgatcgcaatcgcgctctcctttcaaggcccagatcaggtgtcacctgacctttgctgtcctcagatcacacctccctgtagcgactggctcgccagtgtccctctctgaccgagctgtgcactcctccagggcagcactgtcagggtctcccccagacccttggttgtgattctctctccttgtcctgaatctcagttttcctgatacatgggatgctacctgaaggcaggtttcaactttcaatctttttttttgttttttgggtgagatggagtcttgctctgttggtcaggctggagtgcagtagcgccatctcggcttactgcagcctccgcctcctgggttcaagggattctcgtgcttcagcctcctgagtagctgggaccacaggggcctaccaccacacctggctaatttttgtatttttagtagagacggggttttgccatgttgaccaggctggtatcaagctcctggcctcaagtgatccacccacctcagcctcccaaagtgttgggattacaggcgtgagccaccgctcctggcctggaggatttcagatttaaagcaaagaggatattttccaacaaagcaactgcttttcttttttctttttaaattttgtttatttatttttaataaagatgggatcttgcatcttgcccaggctggtctcaaacttctggcctcaagtgatctgcctgcctcagcctcccgaagtgctgggattacgggtgtgagctaccatgccctgtctctttttttgtttgttttttttccaaattgaaacagggtctcactatgttgcccaggctggattgaactcctggcctcaagcagtcctctcgccttggcctcccaaagtgttgagattagaggtgtgagccaccatacctggccctgtagaggggaggcattgatgaaggtcaagaagtcctgttagctctgccttcagaatctaccccaggtccttttagttctctccagcctcactgctggaaccctcacccaagccaccaccttgcagtccacacacggccactgggattggggcggcgttctccgcgcgaaatctggctgtgctcctcccccatgaggccctccaaaggcttcctcttcttaggatgaaacccacactgccagccgaagctcctcaggctcccaccctctacaagctccttctgctccagccacactcaccaggcccgagttcccacctagcaccttccctgggaatgatctccccctggttggctctttctacttattcagcctcaaatgtcatctccactgagaggcctttcctgacctgctgagcttgattccctcccctccccagtcacattactccgtgttatggtacccatccctgtctccttagcttgtttttgtctgtattggctcttccactagactgtaagttgcatgagggcagggatgtctgtttaatcccagtgctcaggatagtgtatggctcgtgatagatgcctagtacattttaaaatgagaacgaatgaagtttgggagaggctcagagcagtgagtctcccccttgttgggggactggggagtgcctgggaggggctatctggtgccagcggtttggagtggctgggatgactctggaatcctgtgaggcccagtcagtttctttggttctcatgcagtgcagtgccctcagacctaaccattttgttccgtgctggcttgaaagggtctgcctccctcccagtgcagcccctgcctctcctctttctcgccccccgccctcctccagagaaagcaggtggtgagggctctctaacccagacaggacttgctgttcagccccagcttgaaattgatttcctccagccctccttgagccaggccccgtgaacagaggaggggtctgagccaggcctcctaggccattggtgggagggagaatgagacagccatttggcccacaggccaccaacttttcccccccttctctaaaagacacacaatggcagttgggctgcacctttgtgagtcaccggtgatagcccatcataaattgttatttcctatatttccagagcagctttatcgggcgttgcctgtgcagtccgggaaccgatttggtatggggtcagttaacatgctgtcttgttgaaatctgtcatcatgcccatataaggcaaactccttggattactttttaccttggcagaatcacaggaatgtcaaggtaaccaggccacctcagcatagctctgattctcacccggtcacctgacttgcccgccctcccccatgactcacccagtggctcagcatggggcctgctgcactgtggctgctggaatctgccaaggacctcctgggactgcccttggttttgtgtcttccttagagtagatcaaatgagaggaaccatgtgaagtagctcacacagggcctaacagagcaaacacaagacgtggaaagcagacttggtgaggcttgagtttagtttgggggttgcgggggtcccagctctgctgcttaacagccctgtggccatgggtatatcccccagcattcagagccttatctgtaaaattagagcacgcagaacaaaccctggtacacactaagtgctcaataaatgtgagtcatttgtgtaattatagtagggtaggccttatgccccacccagtcataaaaatgcctcttgctgttgttggttcaggctcagccccttagtggctttcatggggcaggttgacatggtacccagagtcctcctcggtcctcttcccatggtgtagtgagagcactcaggaccacctaggcctttcctagaaaactgaacccacaccttcccagtgctgccccaccctggtcccccaccccctgcaggacaaaccactcctcccttgttttggggccaggagtcagatctgcccctgagagcagcaggggcccctttgtcctttgacgtcatacccacaccgctcctggagacagccaccccttcatgccagccccaggaaggcttgtaggtggggcgagccagggtgagagtgtagccctgttcctcggccagggcagatgtttcaccatttttaatggagcaattatgagtcagaggtttcagtctctactggttcctcccgatcctataattactctttggctatagaatcctattttgatctcttcttttcttttctcttctttctctctctgtggtcatggtcaggtttttctttttttaaatcctcccaagacactgctaatgttgtctgtctcatgcatccaaggaatctgagatggactgaatattgtcaagggaaaaaaaaagagacccccaaatccagagtgatttcttaacccacccaaatggctttttgtttgtttgtttgtttgtttgagacggaatctcgctctttagccagggtggaaggcagtggcgtgatctcagctcactgcaacctctgcctcctgggttcaagcgattctcctgcctcagactcccaagtagctgtgattacaggcacatgccaccaagcccagctaatttttgtatttttagtagagatagggtttcaccatgttgaccgggatggtctcgaactcctgacctcgtgatccacccaccttggcctcccaaagtgctaggattacaggtgtgagccaccgtgcttggccaacccacccaaattgtgtaccctacaccatcctagtgcttgggagccaacacccactcacaggaggctaagggcaagtttaggtaactcttaacaccacgaattagttgcctgctggcaaacttcaaactccaagcctgaaatttctggttggagtcacctcccagatggactcagggattcattcaccccctcatccagtgctcacggagcctctgtgaggtgcaggcctggagaggagccctgtggcctcagcaaagggcaggcaggctggtgagcacccaacctctggatcgaggggactcaattatgcggataaaggcccctaatcctctcagtgctccaaactcactctgcttctgaaagggatcttcgtaccctgggttcagagagtaggaagcccgcagggaccgagtatgcatgaaacaagcccaagtctgtgggggctgtacatggtcaagatcacagatttccagaccaagccagctccaccctagctgggatgcccaccctgagacacccctctctgctttcactggaataggatggccctgacttggccgggtggactgttgaatcagagcctctcaaaacaggaaaaaggaaaaggatcaccaagcaggagtttcagttgtcaaagacaaaacccttaccacgattaaagattactccagggcctcgcatattcacccttccaccagcagggcccagtttacggatcatttgaatactagcaaaaaaacaagccatctgctggagagattgaacagagggagaaacaggagtgtttgccctgcttccagacacccctttcctgtggcagttcctgcacctggcaagatctactggggaattcccggggtcccactagctcaggacgggtgtgtagcacttgcctaaataacaatcccatcagtgccctgtctgaccttttctccccaaatgccaaaggcctcttgtctggatgaacaaatccctgggcggatttgtccagactaaaacgttaattctaaagactgggccccttaggcactcgctaagattccaggccacactgtctcaaggccagaattggcttacttggctatctttttgaaagatcaaagtttaaaccagatgatctgtagtcccccacccccaccctgaaacctgagcttagctgtaagcattgaaagtaaatggggtgtttgtagctcaccctccctgttctccaggtgaagggccccgtgtgcctgatcatttcatagcaaaatgctagatggggccagaggaggccccagcctctgctgctgccctaattttaaaactgccttttgggagtgtaagtttcctctgttaaaggtagttatttcaaggtaggcctcaccatctcctcctcctggtgagaagctctgcctggagggctgagcactgcctcccgctctgtgggccccacctgccttgggttgagacctatctcttcctggactctgtgtggggagtgcaggctcttccccttggggagaacccagttctttgacgtataatctgagtggtttgggttggttggttggttggttggttggtttcccatgtgtgggatggctccggaagtctgtttgagaacagaggcaggctcagatgggagcagctcctaccccgggccgcctatccccctttaccctggggtttcttttagctccaagcatccattccagtctaacaaatctggtggcagagtctcttttttttttttttttgagacagagtctcactctgttgcccaggctggagtacagtggcacaatctcggctcactgcagcctccgcctcctgggctcaagcgattctcttgcctcagcctcctgagtatctgggattacaggcgtgtgccaccacgtctggctaatttttctgtattattagtagagacggctggtctctactaatagttcaagacggctggtcttgaactcctgacctcaaatgatccacctgcctcagcccccccaaagtgctgggattacaggcgtgagcccctgcacccagcccctctggttctactgagacctcagatctttcatttatggaacaagggggttggattagattgttcgctctcagccctcacttcatgttagactcactaggtggactttgtcaaatgtcattgcccagggcccaccttgagggaatctgtctcattttgcctgtggtgaaattcaggtatttttaaaaagctcccaggtcccatacatctattgtcaattgattttcaacaagggtgcaggaccattcaatgggggaaagaatagtgttttcaacaaatagtgcaggaacaactattaatagatacccatctgcaaagaatgaagttgaacctttacctcacaccatatacaaaaattaactccaaacggatcagatacctaaatgtaagagctaaaactgtaaaactcttagaagaaaacacaagtgtaaatctcatgaccttgggttaggcaatggttattagatatgacagcagaaacacaaccgaagaaaaatagataaatcagactgtttcaaaactggaaactttttgcttcaaaggacactattaaagtaaaaggacaacccgcagaatatttacaaattgtatatctgataagggtctactgtccaaaatgtataaaggactcttaaattcaacagtaaaaagacacaccagttaaaaatgggcaaaggattcaaatagacacttctccaaagaagatctacaaatggtcaataagcacatgaaaaggtgttcgatgtcattactaattagggcaaatcaaaaccataaccactacaaatggtcaataagcacatgaaaaggtgttcaatgtcattactaattagggcaaatcaaaaccataacgtggttgggcctggtggctcatgtccataattccaacatttttggaggtagaagtgggaggatggcttggggccacgaattggagaccagcctgggcatcatagtgagaccctgcctctacagagaattaaaataaaaaattaggccgggtatggtggctcatgcctgtaatcctagcactttgggaggccgaggcgagtggatcacctgaggtcaggagtttgagaccagcctggcaaacatggtgaatgaaaccttgtctctaccaaaaaaaaaaaaaaaaaaaaacccacaaaaattagctggacatggtggtgggcgcctgttgtcccagctagtggggaggctgaggtgggagaatcgcttgaacctgggtgggagaggttgcattgagccgagatcacgccattgcactccagcctgggcaacagggtgagaccctgtctctaaataataataaaaatgagaaattggccaggtgtagtagcatattcctgggaggctgaggtgggcagattgcttgagcccaggagttcaaggctgcagtgagctatgatgacaccactgtactccagcctgggcaacagagtaagaccccaaccctaaaacaaaaaaaaacagaaaaccacaatgagataccactgcacacccaccatgatggctataatcagaaagtcagataataagtattgactaggatgggagaaatcagaaccctcacattgctggtcaaagtgtaatgtggtgcagcttcttgggaaaacagtctggcagttcctcaaaatttaaacatgttttgtatttttagtagagacggggtttcaccatgtcacccaggctggtcttgtctcagcctcccaaagtgttggaattacaggcatgagccaccacgcccagccaagttcctcaaatttttaaatataagaggtatcatatgactcagcaattttactcctaggtatatgcccaaggcagttgaaaacatgtccacataaaacttgtacatgaatattcacggtggtgctaatatccaaaagatagaagcaacacaaataatgcccatcagccaatgaattgataaataaaatgtggtatatccatacaatggaatgttattcagacaggaacgaagtactggtacatgctacaacatggctgaaccttgaaaacatgctaaggagaagccaaactcaaagatcatataccatatggttccacttatatgaaatgcccagaataggtaaattgcaagagacgaaagaaaggtaggttagtggttgccaggggctgggggctgggtaggagggaagtggggttggagagtaactgtaccagttttgcggtggtagacatgttccttgtatttttggttttttgttttgttttgttgttttgagataaggtctcactgtcgcccaggctagagtgcagtggcgctgtcatagctcactgtagcctcgaattcccaggcttaagtgttcctcccacctcagccttctgagtagctgggactacaggcaagagtcaccatacccagttaatttttaattttttttttctttttctttgagatggagtctcgctctgttgcccaggctggagtgcagtggcgcgatcttggctcattgcaacctttgcctcccgggttcaagcgattctcctgcctcagtctcctgagtagctggaactacaggcgtgcgccaccatgcccggctactttttgtattattagttagagacgaggtttcaccatgttggccatgagagacaggactagctggatttcctaggccgactaagaattgctaagcctagctggggaaggtgatcgcacccacctttaaacaccgggcttgtaactcagctcacacctgaccaatcaggcagtaaagagggctcattaaaataccaattaggttaaaagcaggaggtaaagaaatagtcaaatcatctatcatctgagagcacaggaggagggacaatgattgggatataaaccccaggcatttgaggcgggagtgggccaccccctttggttcccctcccactgtatggaagctctgttttcactctattaaatcttgcaactgcacactcttctggtccacgtttgttttggcttgagctgagctttcgctcaccatccttcactgctgttcaccgccatcacagacccactgttgacttccacccctccggatccagcagggtgtctgctgcatttctgatccagcgaggcgcccattgctgctcattcgggctagaggctcgccattgttcctgtgcggctcagtgctcgagtttgtcctaatcgagctaaacactagtcgctgggttccatggttctcttccatgacccacggcttctaatagagctataacactcactgcatggcccaaggttcaattccttggaatccgtgaggccaagaatgttaggtcagagaacaaaaggcttgctgccatcttgggagcagccactaccaacttgggagctctaagaacaaagacccaccggtaacagccaggctggtcttgaactcctgacctcgtgatctgcccgccttggcctcccaaagtgctgggattacaggcgtgagccaccttgcctagccttgttctggaattagtggtgattgttgcacgatcttgtgaatatactaaaactccctgaattttatgtaaaagggtgaattttttggtatgttatgtgaattacatttcaatttttaaaaattgattctccaaattatgtacatatttaaagagtacatgaaagagagggagagaaagaaaagctggatgcgagatgccgcaacctgattccactcactcctagatttgttgagtacctgctatgtgaaaggtaccagtccaggcagtgggttcccacagcaaacagaaccctcctctggggagcttatgctgcacttgggagggagactggttatgaacaaagaacatagtttttgatgatgaaaagtgcagtgagtaaaacaatgcagtgtgaggccgggtgtgttggctcacgcctgtaattccagcactttgggaggccgaggtgggcggatcacctgaggttgggagttcgagactagcctgaccaacatggagaaactccgtctctactaaaaataaaaaattagccaggcctgtaatcccagctactcgggaggctgaggccagagaatagcttgaactcaggaggcagaagttgcgttgagctgagatcatgccattgcactccagcctgggcaacaaaagtgaaactccgtctcaaaaaaaaaaaaacaaaaaaaacaaaaaaaaaaacccaacaacgcagagtggagtgatagcctaggggagatgacagagtccaggaaggcctcctgggttgctgacatttgaggcaagtcctgagtgatgagacaaaaccagctctataaagagctagacgaaagtcttagaccagtatttctcatgaggaggagacagcactccaaaatccatcctttggcctggcgcggtggctcacgcctgtaatcccagcactttgggaggctgaggcgggtggattacctgagatcaggagttcgagaccagcctggccaacatggcagaaacccgtctctactgaaaatataaaaattagccgggtgtgatggtgggtgcctgtaatgccagctactcgggaggctgaggcaggagaatcacttgaacccgggaggtggaggctgcagtgagccgagatcatgccaccgcactccaacctggcgacacagcgagactctgtctcaaaacaaacaaacaaacaaaatccgtcctttgcagcagcaacacgcacgctttctggcacctcaaaggggattgtccaagactggaacactggctgcagggagggggccgggtgcaaagagctggtttctgggtggacacgcaggacctttggaatgctcgctaccccactcagcagtatttatacctcttctccaactgcgaagtcagagctttttcatgcaggctgagaaaactccgaataaggcaacttcaggccaggacataagacgcattccatatttcactgtaattgctttcaaattaggttatgtcgtcatgtaacaggcacacacagtgcacttgctttgcccctggctggggttgggtcctggacaggctgccccgtgtgtcgctgaactgccgcagtgctagccctgattgcctgggcagtagggctgtctgcgtcccacgttgctgcacccatctaatttgtggctgtgttattgtgacctgctcgttttctgttctttcaacctgcttcctggcttttatctccttcagaatctggtggcagtggatcttcaaaaagtgctcaggtgtgcagtctcacaggccagaggctccacgggcccccttgccagggcgagcatctctgcctgtgccgctggtaacccagattccagaaggcttagccgtctggccctgaaagcgcctttatagttggtgatgaagcccatgggctggggagccgtttctgctttcaggaactgaaaagatgccccagtggggctaggccttgcctgaggtctggcaatagcctgccagatgggtgataagaaggcctacccaggtgataagcctacccaggaataaatagctgtacctcccctgtgtccaagccctggacacccttccctaggacccatggaagcaggaaccatgggcagcgtcagaggccacagcaggcaaggtggaagttcaggaggtgggacggcgccctccccctcaaagcaactgatgccccagcggagcgacaaaccctacacggtatttcagagccaaggtttgaaaactcccagggtgctagggagctccgtctggcctccgggtacctggggttggggctggctgtggccagttgcagtcaaccctgagcctgggcaaaatgcatgcaggctggtcctcctgggtgatatcctgctaggcgggtgggcagtgtacacggcagaagagggttgcggcatgaggcagcaaacgtttttttctaaaatcttgtcaagcgtggggtccgtggaatccacatgtgagcatcagcctggtgggtggggagagtgaagcctgcgatccagtctggatcatgtgctacacagtgcagagccggcatgctcacccctcctgagggatcgctcgagcctatttctaggcccaaagcgactttgcaagagactccctttattctgggcttagtggaattccagcttccaacagccatttccctccacccccttcagttctgagaacatgttttgtaacaggaaggcaggaagaaaagagaaggcgagtttgttcagctgggtcagccgcatcccaccaaggccctttcttccctccagctcaccatcgctctgcccactggaaccactcggttgccctgtgtctgccgaatgtttgtttcttaatcagcgccccagagtagagagggctttgcctcttcgggttgagggagggaatcattgatgaatggctcattaaagcccactgctgccacattcctgggtgcttaggtcacctcctgaacaatatccatcattcattcacctaccgccccacatcctggcggctgggaggggtccctgtgacgcaggaaggactttatgaccagagatgctaggtctccgtctccctcctgcagcccacagtgacaaagcagaaactgctcttggggccccctgaagcccgccttagctgggtcaccatgggccttggcacacggaggggtgacagtggatcccaactcaactgacaagcttgcctttctctgttcttccaccccccttccccgcactcacaccctgtgctattttagcaaccagagaagcctctttaataggctgcccgtgtgcaggggcaagctctgaagcctcctctctgtggtttggttcacatgtgttctcaaagacagatgagtccacatccttccttcctccctagataggtcaagggctgggtgcaggctgccttcacaggagggccagggacaggctgggaggagcggggccaccttttgcgaagcgggtgatctgctggggcgttgctctgcctgcctgccttgttctctgagtttacctctagcttggggaccaagggtgggctggggccttctttttttttttttgaaaccgagtcttactctgtctcccaggctggagtgcagtggcgcgatcttggctcactgcaacctctacctcccaggttcaagcgattctcctgtctcagcttcccgagtagctgggtttataggagcccgccaccacgcccaggtaatttttgtatttttagtagagacgaggtttcaccatgttggccaggctggtcttgaactcctgacctcaagtgatccgcccgcctcggcctcccaaagtgctgggattacaggtgcgagccactgcgcccggccctggctgggggcttcttgacctgactctgctgtctctccctcactggccagcacctcccattctactcagacatcgtggaatgaatgcccaccccgtgtttgtatgtatcatctgtgtctgtgtgacattaagcaagtcactgaacctctccctgcctcagtttcctcatcaaatggagatatatcgcatgtgatcatggggttggaggttttaaagagttgctaatgtgtaaatagtaagaactagcaattagccgttatagcataattacctttaatatgtcatgccccccgcacccccgtgctgaatgtaattttgcgggggggcgggttgagacagggtctggctctgtcaccgaggctggagtgcactaacacaatctcagcttactgcaacctctgcctctcaggcacaagctgtcttcccacctcagcctctcgagtagctgggactacaggcgctcagtaccacgcctggctaatttttgtagtttttgtagagatggggttttgccatgttgcctaggctgatctcaaactcctgtgctaaagcaatcctcccgcctcggcctcctaaagtgctgggattacatggtgtgtgccaccatgcctggctggccagaatgtaaatgataactgttttgcttcctcctgtgtccagtacataatagggctccaagtcagtatttgtgaggcaggtgcatgcctcttagttgcggtcctgagggcatggccactgccacgttctggacagtcagagtcgctgctgcccctggaagatgaccgcgatcatgaagcccaggagagctcgatgctttttgcctttccctcctcccacagagggctggcagctctggttcctcccaaatgaaatagaaaccttgagtttgcatttcttctttggcgtgccggcagggcacctctgccttcctcttcctgccagggggaggaagtttctctcaggggctcttcaccctgctttattcctggccatcacacattgacccttgtccccttcggctctttccctgcatggcagggacagcatgaccgtttaatggctttgtgaggccagcatgccagcctcacttctttactcccttccttctcggagtgggctctgtcccttctgcaggagggctttggcacatgctcttcccagtatctggaaggtctccctcatttttatcttattaactcctcatccttcagctcagagtttgagaatgacttcttcaaggacacctttctgtgtctgcctcaccagtcgcttggtgcccccccaccccgccaccatgctgaccgcactcttcagctcccatcccaggggaggtgacacaaactcggccccaggagcccagcacctggctttaaacccagctctgtaactttctaggtgtgtgactgatgggagcaagccacttcacctctcaggccctccgtttcctcatctgcaaaatggaggcagtactagcacctccctccagagatgattacgagggtgacagaattagtaagtgaccaagtgcctcgagcagtgcccgcccctagtagactctatggaagtgtctgctgcagttattgctgttattattaccacttttcctaagggcgttatttctggagtggactgatcgcttgattaatgagatcagacctggagcctcatgagagtgtctgcttttgctcactgttatggattcagcacagggcctggccctctgctgacccccagcatatgcttgtccagagaatgaatatgtacggacccatggtggcctggggcatcatgaggtcggctgcccacattctgagaattttgcatggtggagggcggcgtggtgggcgcatagggcccccatctatagaaaccacctctccacaccatccaccccacgcagcgtagtctaaaccgggtagggagaggaaggatggaagcagagtgttatttttgtaaccaagtagaagaagcgatgaatttttaatgtcccattcgaactccagctcctactcaccagtctctccgcatggagaagtggccgtcatggtcgacctgttcccaagggtggccttgtgagtgcaggctctcctcaccagagctgagggctttgtgaacctctgatgtcaatagatgcccctcatcttccaggaggacaaaacagggcaaagcaagacatggggtgagaacaggagtgcatcagtggggttccccaagcctgtgtcaggtccggatctgggtgggagttcccttctgcgtcatccaggccaggcgagtgggcatcctccctgagcacctgtgcttggggctttgcctgtgtcagtcaggaagacagagtacacggaagagttaccattgctttcagagcaaaccttcctttgacatgcatttaacacagcacggagtgattgacatgtgtccttgtgtttaatccctatcttaacctctcggttactgtcctgtttatcagtgaggaaactgaggcttattgcttgcctgaggcctcagtggcagaagcaagatgtgaatccgcacctgtgtgatgcccaagccagagctcttgtttactacccagagaagatgagcacaggtgggatgtacgtatggagggcgggtagggcagcagcccctctgaggacaggtggccagaacccaagcggcgaggtttgttcacagcctccacagggtggggtggggccatccgcagagggtctcctgccatcccattttccctgcataccagtgggtggtctgagagcctttgcagagaagagactggatctcagcacgtgcttatgtgcgtgtgtacatgcacacacatgcgtgtgattcatctggctcttactttatgccaaggagcctgtcacatgctttaaatgtattttccctagtttaattcttagagcacactgcaggaggtagattctgataaatccatcttacagggaaggaaacagacttaagtaggtaaagtcacttggttgaaaacatggaatgagtaagccaaggggcaggtattcaaacccaaacccaggtctgtgcccctgcagagcctgcaggagcagcccacacaggccaaggctgtgaggggtgctgtttgcacgcgtgcgtggccctccctgcagcccaggtgcctaggtctgggcctggcaacaccagagcacggggccttgccctcggggaacagccctcttttgtcctcaggctgtgggatgtgtcttggctactttgctgcccagcagtgcctgctctcaggcacatgtgagagtagaggcctagcatccgtggccacttccttcccagcccatttgctgctgccctttgctctgcagggctgctgggctcctgggctccacgcctgcttgctgcctgccatcaaggctggcagtgctctggggctgtaaaggtgcaggcgccgtacttcccaacccctggagctcgcacatggtaggagagaaagctcatgtgcatgcaacatccaataagactaaaagtgactgggggttgctacgggagaggtgctgagggtgggccggggacagagcaggcacactgtggagggggtgggcaggactcctgagaccagggcagggagggaggagatgctgggaggcacagggccatccagagagctgccacttcctgagcattgccatgcacgctgcaggcatggccatcttgagtcctcacactgcccgtggcctaggtggggtcttcatccccacgttgcagaggaggaaatggaagttaggaaggttaggtgacgtgcccacatgagtggtgtaagcatggttcccgccctgggctctctgaattcagtattgtatgggggaggctgggaaggtgagttagtactctccgcagtgagaacctgccttggctcccctcccctcaaggagttcatagccgtgggagggagggagacaagaactgttggagacaagaactgttagagaccagagagcaagggcgtgatgtggtctgcagggaggaggctgtctgaggcagaaccgggtcagggaggccatggtgcgggtaccctccaggcacggcatttggcctgacttttgaggggtgcccagggttggctacatggcggggcggaggtatctttagtgggggaacagcgttgtgccaccaggaggggtctctgtctcccaggtagaggaattctccatggtgagaggtggtggtgggggatggtctagctgtccactcttgccccctttcggatttggaaggaagccccatgctgggtccacactggtatggcgtattaattaggcagctgctttgtctgggagggggctttgtgtcgagtctccctgaatgagcagggctggcgacagttgtcaaaacacatggtgcttggtcagagcccccgtagaagccccttgtcctccgcatggcctccgcctgcacccggggcgtggaatgtgctcttgtgtgtccctggctgtctgcttgcttctacactggcccctgcagatggagggggtggggtacaggggttcctataagaagcagacacttggggtttttcccaggtcctgttgcaggagggtgcgtgggctggtttccctgaaggcgcctgggcgtgttggtgttaactgatctgagatcttctgtggccctgatgtctatgagcatgccccagcttgcagggggctgagtagccgggcaccaccaggaggctgcgtgccctgtgcttgggtgtacccatgccctgtcagcatcgttggtctgttagggtcagggacttcggcttcttgtttagtaccctccatcccttccagttgatcatcagaaacattctccttagatgcggctgcctgaccccggtgagggggcctgcctcccacttgccttccagcctcctctaagctgcactgagtcttaaaaataggaaggatagggctgggtgtggtggctcacgcctgtaatcccagcagtttgggagaccgaggcgggtagatcacttgaggccaggagttcaagaccagcctggccaacatggtaaaaccccatctctactaaaaagacaaaaattagatgggcatgttggcatacacccgtagtcccagctactcaggaggctgaggcatgagaatcgcttgaacccaggaggtagagattgcagtgagctgagattgcgccacagcactccagcctgggtgacagagcgagactccttctcaaaaaaaaaaaaaggaaaaaaaagaataggaaggatagggcatggcatgttctccaggagacagagggacgggggcatcttgcttgcaggaagccaggcgacacaggcgtgtgtgcagggctcagagggtctgtgttcctggcctttcctgggagggcttgctcttgggctgcccaaagctcaaagagagactcgaggaaatcctgcatttatgggagcttttcttttcctgccactttcctgttctgggttgtatctgtgcacgtgattggaacgtagcagcctgagctcctgcctgaggagagcagccacgggtcacggaagccagggtccagctggggcctttgggtctagctggcagatgaagggctggccttcatcaagaaaacaagccccatgagggcaggagcccgacctgttcattccacaccaccgagcctggtgctcagtcatgtttgtgtgactgagtgagccggcggcgggctgaggcgcttttgtctggtgtgcgtactggtctcccttgaggcagcttgggggtgtggaaaaagcacatgttgccaaaattgacagacctgggttcaaatccaagctctgccacttaccgcctggatggtcttgtgatgggtcattaaccaccccgagcctcagtttcctcacatctgcctcccggggtcactgtaaggatcagaaacaatgtgtgtatcggccatgtacggtgtgtgtcggcgagtgctccgtggcagctgcggttctcctgaggtcagagctgcggccctgcaggtgtgtggagagagccccgacagccaggctgactctgcgcactgtcctttgttctgcttccccagaccttcacggcatggtgcaactcccacctgcggaaggcaggcacacagatcgagaacattgatgaggacttccgagacgggctcaagctcatgctgctcctggaggtcatatcaggtgagactcccagccacgcagtgcggccgagccctggcacaggtgctctgccacagcggtccccagagaccctgcccacccagctgtcccattgctcctggggaggagagggcaccccttaatagctgcacggtggtctgatgggtggggccagagtggcctggtgggccagcagaggaacctgcttttggagaacagaggagactctaaagcctctctccctctcgccctctctccctttctctctctctgtctcgccccctcttttctctttgtgcacttctcaggggagcggttacctaagccggagcgggggaagatgagagtgcacaaaatcaacaatgtgaacaaagcgctggactttattgccagcaaaggcgtcaagctggtctccatcggggcagaaggtgagctggaggtggggcagcgagggtcctgctcggtttctgacctttaggctctgaagcacaacatctgcatcctgaagagaagttttgttggtggcagggcgcttggggcactcagagccccagtacatactcagcagtgatcacaacaactgctcttgatatgatgctgggcccacaagctcccccaaacccttggaaaaatccggtgggcgcagtccaaatctaggaagtgcaacccacccaaccacgggggcgacggcttctgcagggggaggaatggttttgactcggactcaggtcgccctcactggttctccttgtgccaggctcagcagacagtgacaaacatgtgccatggcctctctctgtaccaggaacacctttctcattatgccctgcccggtatcagagaaggactggaggccccatgtcaggcattgggacagggagtgcacggccaaaggtcagtgcctagactttgccctgtgtgcatgggcttggagaattttgcctctgaccaccccaggatcctcctgggccccacgtagataaccaggaccacagtccactacctgcaggccctcactagagcagcaggctctcagcaggggcccctgggttgagctcccaggcgcttttagagacaggcgaggcctgatggagccccagcagcatgagctcgcagtccactcattagtcagagtaagatttcttcaccctgacatccatgttgtcccagcttctagaaaaacaaagtaaactaattgccgttaatgacagggctctgagagtttggccaagactccgggccagaatgtgtgtgctgagttccaaggctctgccccggcccaggacctctgcgatgaggggtgccaagccttgcatgccacagtcgaggtggttggtgtttgtttaaaaaaatcacaacccaaaaattcagtcaggccctgagattttctgtccttgcatgggtctttcctccaggctctgttccagccttctgcttctcacagctgcatttattttgctcaaatgctagtctgtaaatacagaaggggttagaggagagacccatgtcagtcatcagttttcatttggagaaaaacttggtctaaaaatgttctctgttcatgcccaaattggttcactcccaatccctgtgactgtggggccttggaacaaagcctaatggaggcgttcctggggctcaaggcacctgagaaccccgccccaccctgtccccctgtccttccacatgattgggcattcgcgggagcattggcttcccgtgggggtgatgagaggggccggaggcacagctgcaggtcagagaagcagctggtggatgtgtcatgagaaacgccatcctcctctcctcaccggaactccataagccctccgttaccagctgcacctgtacttgctgagccggggagctgcggccttgcccagctctgcaggcccggccctcaggaggtgcacagaatagatttcctgaggctcgagctgcctcgctgcactaaggggcaggtggtgctgctcagtttctgggtctggggctctgaaccctaggacagggtggacactgggtccctcccctgtctctgggcagcagaatgagcatatttcctcctctcaaaacccgaaagctgtggctcatggacacccccttcctctgggtgtgtccccgggggaaggtgagccccatcttctctgtgacctctccacctgcttccaagcaagcctgccctggagtattctgctcagaggtcagtgagcagggtctcctgtggtgtcctgggcctccagctctgcagttagctttggaactcacccctgtgcccagcccttccccgagagtgcttgcagcagtggcgcccctctgtcttctttggaagccactccatcatgccccttgcatatggcgtgttgacaagttgggaggactgccctaggcacggctggctgatggactctgggatgaggcactgccttctctcacccagccgcagacacacagctgtcctgggccttgcagagatgatttttctcttaagttactgaggctgaagaaggtgtggtccaagcccttcttttgagaagtttcagcaatttttttttttttttttttgagatggaatctcactcttgtcacctaggctggagtgcaatggtgcaatctcagctcactgcaacctctgcctcccgggctcaagcaattctcctgcctcagcctccagagtagctgggattacaagcacccgccaccacgccaggctaattttgtgtttttagtagagacggggcttcaccatcttggccgggctggtctcgaactcctgacctcaggcgatccacacctgcctcagcctcccaaattgctgggactaaacaggcgtgagccaccacagccggccgcaaatgtttgtttttaggttagttcagaaagcgtgcagtctggcctcaggcccgtgctctccccttcctgacaacacagcagccatgcttgttcctcactggccttccaggcactggatccagtggtggtcagagcagccccgccctcacgagggcaggcagacagtgaacaagtaaacagcccgaccaacatgtgatttcactagtgatgccttggggcagcacaggggccagggagaggaactgggtggcgggttggggagctccttgggacgggcagtcagggaagccaccacgagaggtgacacaagcagaagcttacacgatgagaaggaccagccagttgagggtcgcaggctaggggcgtgctttgtgagtggacagagcgtatcaaagcaagaaagagcctggcttgcccagaggatgcagctagagaattccagcaggatggcagggcctgggccttcagggcaagccctttccctgtgggccaggcatggtggctcacacctgcaatcccagcactttgggaggccaaggcaggaagatcacttgagcaggagtttgagaccagcttgggtaacataataagacccagcctctacaaaaagtttaaaaactagcaagatgttgtggcatgcgtctgtggtcccagctactcgggagactgaggcagaaggattgcttgagcccaggcagtcaaggctgcagtgagctatgactacaccattgcactccagccagccagaccctgtctcaaaagaaggaaaccaaccatgctcgctgctgtgtcgatgtggattatgggcgggaagggtacataggaggcagccgcattgagctctggagatgacagtggcttggtggagagtgtcggcagtaggattggaaggaagtggacagattcacaataaacaataatgtagtgcacatttgctgactgcgagatgaaaaagaccacctttgccctgagagtgggggcccggggtgcccccctgtagtcaggaggtacgcagattacggcagaaatgtacagagcactgagagttgagagaggtgtgaacagaggccacacgcctgggaccagcctcttggaggagcggttttttgagttgggtcaggagaaggagctggctgcggggccagggacccttgtggccagaagcctgcaggcgctcagcagcaggaggctctgggacagtgctgcctagagactgttccctgcattttctcctgagggaggtggaggaggacaggcctgggagatgcaaccagggggtggtttggagcctttctctagatggggctggaaggccaccttcaggttgggcggaggagcctcactctggttttaacgaccttctgccctctgcccccttccctgtgtgcagagattgtggacggcaacgcaaagatgaccctgggaatgatctggaccatcatccttaggttcgccatccaggacatctccgtggaaggtgacagccacctgtactgcccccgcttcccacctgagtcagggcgggttagaggagagctgaagtgtgatcttcatgcttcaagcctcttcctgtttccttggggtcactcacagggcctggcccttgcaggggtagtcagtgggtggcaggtgaagggaggctcctcccagctgcctgcctcttggctccagtgccttccgagtgcctttgctctcacagcctcatctcagtggaccctcacgccaccctcatgagatgggctaggatggctgggcccgttttacagtccaggaacccaagtcccagaacagactagtgagagagttgggcctgggcctggttctctgtctgcttgacatccccatccttgaaacttggcccccatggacccgttatgagctcaggccgtccaggaatggacaatttcgcttccctgcaagcacctgtgtgcacacaggatgggcagagccacctgggctagcgtgcaggggctcccaggtgccaggtcgcagtgatgactgggagagatgtgcttcctgccctcgaagggctcccggtctgtgaggacagccgagctatccacggggaacagaagggccccctaggcctctctacagctggtatttcaccttgttcaaaagaggccaaggccggtatcaagggcctgtctgcagtgtgttctggtggtgaaaggcacaggcttggtggccaggcacatggcacagattcaggccctgacaccaccacctcctggggcagccctggtcaagcgactctcctcggggccgtgaggattaagcagggccgtgtgtcctggcagttgggcctggcagcatccgtctgcatccggaatgggagtggctgtcccgctgctatcactgctgctgttgttaggacagatatcctctccccttgggtttcgtttgaccccaggcctgagccgaaagtcccatccaacttgggctgagttctgagggtttatttttgagccagtgctcactgtctttgtgtgttttgcagagacctcggccaaggaagggctccttctctggtgccagagaaagacagccccgtataagaacgtcaatgtgcagaacttccacatcaggtaagcgccagtcctggtcatcctctcctttcctctaggaacctgagatccttcctcccacctgccctgtttgctgtgtttttgtcgtggtctgtgagatgccagccctcagtcagcccctccctggccacgggccctacaagcccatgggaaggtcacctggtcctctctgaggaagaggaggcagtttcccagccatcctggctgaaggcagtaaggtcagccctctcgccggcctaatagaacgttcttcgtccccaggcaaggtgactctcagaagcaacaataaagcttttcatttttgagacagggtcttgtgctgtcacccagactggagggcagtggtgtgatcactcatccctgctgccttggcctaggctcaagtgatcctcctgtctcagcctcccaagtagctgggactgcaggtgcatgcagccacacctggctaatttttaatttttatttttagtaggaacagggtctccctatgttgcccaggctggacttgaactcctgagctcaagcagtcctcctaccccggcctcccaaagtgctgggactacagatgtgagccactgcctgcctctggcctcttcctttattttgacagctcaggagtgaattgtttttagaattgctagtaaatttagtgttggggaaaaatgtactctgtggctgctaagatgaacaagcctcagctccaccatgaacctgcttccctcagggtgagcgggagatgagacatgtccaccatccccgtagctgaggcgagcatgggcactgccgcatgaggtccagggggcggcaagaggcaggcctgcctggtggttgggagcactggctctgggggcggtcctgaggtcagatccggtttgccttgtggctccaccctctgagtctcctggatggcccgcacaggaatgaagagcagggcctcatggggtttgcagcggcctcaggctctctgggacccttgctgggtacagagggcttttcccatcgtgctcaccctgatagcatgtggtccctcccttggtcactcttctctgtgtgtcttcttttttttcctgccactaactgactgaatctttctatagtttccattcattttcttcaactagtaagtatctagcatgcccgctgcatgccgttagtggagatacagtggcacccaaacaaagttcccatttgtgggaagtttacaccacagcgcggggaccagctgttagcacagcggccagtaatcctgcagcataacttcagtgagaagtgctgcacaaagacagggaagtcagatgaagaaagttccctgggtggcctttctgaggaggtgacatcgagcttgacctcagagggaaccaacccttagagggtctcagggaggagaatgtgacccatatagcttgtaactgaccaacttgtggccttggggaaggtctctttcctccagagaccagcatgccaagtgaaatcctggcatttagccagcccacggactggccttcctgtaagtcaggtccgccagggtgtggaggccacacagcacaaacaccagcatcctgcagtggccacctcccccgaagcggcctgtctggttcagggcggcctcccatggaaggtgctagcagttataaagcagttgtcaggagtcaggcactgatccaagcatttactcatttaatccgcacaacagccctatgtagcaggtatgtcactatccccatcatacagatgtggaaaccgagatagcctggcttacccgaggtcacactgtcagtaggcagaagagtcaggatttgatcacagactgcctggccccagaggtcatgcttgcagcctctctgccacactgtctccatgcagtgcctggcacaggccagactgcagtgaatgggaattagtcactgctgtgggtgcacagggccatacggcactctcatgacagtgagcgggccctcctataacctttgcctttccttccccagctggaaggatggtcttgccttcaatgccctgatccaccggcacagaccagagctgattgagtatgacaagctgaggaaggtgagtgtctccagctccccttgatggcccacagacgtgccctgtctgaccccctaactccgggtcaccatccccatgcccttccatcgccagcctccagatctgggttctgcacgcagatgggcagcctgggagagccttgtgcaggctctccgcaacccctggctcggtggctgactctcacctcccttattcccctcgtggactgtccagtctccctccatggcactgcaaccaacccggggttatttaagggcctggccagccatgctttataactccccttcctcaatcttctggattctagaacctcctctgcccaaaggggcagagggcaaggaattccaaaccatcaccacaagcccatgttgcccatgcagggtcctgctgtcatttgcctgtacaaagcctgtatggatccaggccctggccaccagaagctgccagcctcgtgggggaaggcaggacaaaaattgtgtccaaagcaaagcaccacaccaggccgtgtacatgtgctcaggctgaatggggtggcagggcatggggtcagatcagtgctgcggaggaggctagtgtaccccgagcgagcaggagccaggaaaggtcccggaagaagaggcagcttagagccagaggagggcttcctgggggaggcaccagatggcacccagcccgttccagccacagtgagcaagagagctgggccccggccagggagagttggagtgcagtgggctttagtcctgtaagcagtggggagcctgtgagggggctgggggacactttagggtggttgggacctgggacctctcggtttgctccccttacccagtccccagtgctctctcaggcctggcccacatcttccagtcaatgtgaaaaccaggttttagggcaaggggcttaagctagggtctgtgggtggctggaaattgtatgaaaagagtacacctgcatttttctggagaaaaagccctggtttgccccacaaagatttcacgaggcactcctgtgagtgggaattgaatttatccaggcggtgccctcccgctcacacatcacacgtggctgagaactgcctgaagaaacccccaaccctcgccctcccgggtctctccctctgggccagccctgcctccctcctgctcctgcaccctgccctgacggagttcttgttgtccccacttgcctccttctaggacgaccctgtcaccaacctgaacaatgccttcgaagtggctgagaaatacctcgacatccccaagatgctggatgcagagggtaagtcatctcttctgttcagccaccactgtgcttcctgatggccttttctgtccagggctggcctcgggcaaggggctgtgggcacatcagagctttgggtcaccttggggagctggcagagccagcaagaagggctgaatgattctgggtgaactggggacagccatgtcgccctgggagacagagcaagggtagcctgggctggccagatgccttcagggatgaagaagcgtatggggagggggagctgaaggatcaactctcctgagggtgcatctcctcagggcccaggaagggcaaggtggctgaggaggggtgcttcaggcttcctgcgagcaaccctggcctctccctccctacctgcagcaggcatggagtatggagcccgacaaagtggagtgttttgttttttccttttccggctttgctccatttcccagccatgcactgccccatttcctagccatgcactgccccagctgggacctgtgtctctggcctctggtggcccttggagttgactgtcctgctgctccttgaggccattctcagagagaggaagtggcctcattttaatccgcttcccacagccttgtcctttccagacccatgggagagggaggggctgagggtgtggctgagcccacccaagtcacgcgtcactctgcaggtccctctcccccaaggccgtggccttgggagcccgtggatcccagtgagtgacgcctccaccccccgccctactcgggcagtttaacccttgttgttcacttgcagacatcgtgaacacggcccggcccgacgagaaggccataatgacctatgtgtccagcttctaccatgccttttcaggagcgcagaaggtaccgagcagggccaggcaggccctcctcgccgccaccgcgcaatgccgccgctgcctctcgcctcccgtgctcacctcatttctcttgcagacggcagtggcctctctccaactggaagccacccccagctccctggcgttgctgccccctcagccttagctcacacacctattgggtacctcatctgtgccaggcttttccaggcattgaggatgccctggtgactgagtcagacaaggtccctgttctcagggcacttccatgctagtgggagaaacatacagcaggcctgtcacaggagtggaatagagaaaatggggccagatgggggacagagatggctggggtgaccttcagctggtgctgtcaatgtggaggggtgaagtgagcaggtacttgcagcaggagctgctagatgcaggctggggcacaggtgttccaggcagagggtgaagcactacgaaggccctgagacaggaagaagcttggcgtattcagggaccagctagagaggagtgagtgacacgcagtgatgggtcaggcccaacaagacccttgtggtgtgggataagaaattcatgttccactctgagggccatgggagccccttagggtcttactccgtggtgggagctgctcactcacattttcagacagatcatttagcaactgactcctccaacccaaaacaaagctgcctttatagggcccacagctagtctgtctccagcccaggccggttagaaaaggaatgcaccctattcggactccacaaaaccccgcaaggcatgtccacgcaggcctggggctggcttccagtccagagcaagtgctcttcctcctgcatgagcctcaggccggcccggccgccctccctgcgtctttcactctctcctgcctctctctctctttctctctctctctgtgcagatattgtgggcactctgaggccagatgagaaggccatcatgacttacgtgtcctgcttctaccacgctttctcgggggctcagaaggtgagctgggccaggcacacctcgctgctggggctgcagacctgccttcaccaccgcccttgcatcaccgctggccatctgtggttggagccctggccaggccgtgggccgccacaccacacagactgaccctgccggcctctgactcggaaggtcccctggggcaggtttcccgcctggccggtgctgggcctgtgctgaggagtcacagacctctgtttgaacacagcccaccctgggaggtgggtggtggcatcctaggctctcaggcggggaaactgaagccctgcattacagtcaatggcagagctgggatttgactgcccggcgttcccactcgccctgtccatcatctgcaccagggctgcctgcctgcccctgccaagcccttcgtggggagcactgggctttacccgttttgcagctccttcctgccaggaaaggctcagcatgtgcagcccaacctgcactcacggtcccagccctccagaggccaggcagagcccacagagcttgcgtggcagtggccgccctcctgggcccagctgacctcatgctgcctcacagctcctgccgggccctcagcgttcacgcagaggcccaagcactgctccccccgcttgccttgtggtctctgaagtatctcaggcagcattcccgatgcctgctttgaagtgtcagcagttggcacaggttcagaggaggaggcagaatcgattcttgtttactgaacatgtactacacgctaggcaccctccaaggccttcacatgcacaggcttccagagggtccctgtgcacacccccaggagggctaggcgcagttagccccatttgagagaggaggaattgaagtttagggaaacagctattcctaaaactagaaggggggggccgtaccttctgtggacccctgctttgagcctcccaactagcaggtgcattacctaccgtcagtctggcctggccccactctgccacctcttggtactgtgaccttgggtgggtcacttgacctcagcttccccacctgtgaaatgggcatcgctgtagttcggtctcacaggattgttctgggcgtgaaacgagctcctgcaggcaaagggcttagcacagtgcctggcacggcagctgccatttaggcagctgccagggagccacagtggtggggagtgtggttcttcccagcctcgggccagaaaggcctcttcacctcctcagcatgcgattggagcttgtgtttggagtgttctgctagagggcacgggccaggagggtggagggaggacccctgacccacactcccgcgggagggtgggcagggaccagcagcaatggacgattcgtcaccacagaccccaactaacagcatgtttgccattggactcacccctacgggccccgaaccagccccctgcccaccacatggcctcaccagattgcttttctttctacccacactgctcccctgtgcttagggctgaactccagtctggaggctctgagggattttgggggagcagggactggcaggcaagcccaggacagtatgggtgggtgctgaggcactgggcctggaggcttgtcactggcccctctctgagggggtagtggaggcccggctgcagggcgctggctggtcagaaaggaaagtgctgggtccctgtgtgctcctcaggacagccccgtggtgctgctcctgctgcctcgtttccccagagacccagtccaagctcttgcaagagtgctctctggggttcatgttttataaacgcagagtgaaccccaggtctagcgccagtgtgcccattctgtcctgagatcatttatttctagtcaccgaagcgttcccgcctcgttcctttattcactcactcattcagcaaccctgaacaccgccagtgcactgagccccaagctggatgcgggaactcagcggtgaaacatgattcccttgccttgcggcagccccgtgctcacagagaggacttgagtttcgggtgccagttgtctctgccaagttaggagtcagggactgacctctgtgacccccacaagctgcagccctggctgtgttttccacactggcctggggcccatgttcattggctgaggaacctcttggacctcatctctgaggagcaccgcctggggccctgggtgtgtgtcccgcagcatggcgcggggtgtgcacgtgcgtgtgtgcgctcacacgagcaccggctgccgcctccccgcctgtctccaggtgccatgtgtggaggggagaggctgggcgtcgctgcctgcagcactggctctgagccgttggccaagcctctccattttccttccccatcactctgtagaccctcctcactctttctgttcctgttctgttgccgtttcaactcctcctcttggaccctttctgtgcttcctgaaaggtacctggtctctctctccccgtgtgcaccccctgcctcctctacactgttcactgccccctagcaggacagggcaggacgctctcctgtagttcaggcccagggactatgtccaccactctcaccctccaaagccccagcacttttctgccccacggatggtgacttctgtcctctggagctcctattaacattgcctccaaggcaggagagtggacaggcctgagtgtgctcctgtgcacggaccactaggctcctccgggacccgggcgcccctgctctgttgcccccagctctccagctctcggcttcccatcctttcaccttcccaccgggagagactcctccgcagtcttaggtccaacgcagccgacccgtccagcctcaccctcctctgtgtggggcactagagggtttgcgagcagcagtgggagggctccccaaccctcctcggtgcctccagggtctgggctttctggacccaggggcattttgcagtcagcagtgaggatgccaacaaggcctattgggacagggcaccatctcactggagctgtgcttcctctccttcccctctgtgaggagttccgtgggccatggaccagctgctttcaagggacgtgcccgtcaggagggagggtggccagcccccaggcagccctgactgtgtgctcccctccaggctgaaactgccgccaaccggatctgtaaggtgctggctgtcaaccaagagaacgagcacctgatggaggactacgagaagctggccagcgacgtgagtgttcccccagtgaaagtcagggccacctcattatcctcagccagaggtcactgtgactcttgcagggggaaagcaggtgtggcagcgagatgacctagaaaaggctgcgtggtcacagaccatggcatttagccagctggtgtgtacacgacctctccgtttgcttccacaaggctaagggtcagaccggcagccaccttgccagccagcccctgggctcccgagcttgggttcctacagagatgctcagggacagtgtttcctgggcacctcagtgctttagaatcacctggggagctttgtgaaagcccctcttcccgtgccctggccctggagagagtgattcagaaggatggagaggggcctgggaaccaataggatagcaggccctgtgcaggtgcttaacgagcagcccagcaagacgggaactcggattatcctcctttccaagtgaggaaactgaggcccagggagggtcaggcacgtgcctgctgttacatgactagtgggacagagagctgggcttcacccaggcagccctgctctagagtccaaacccaatgcttcagttggaaataagggtggttagtacaactcttctggaggctcttcatttttgaaatctccatatttaaaaaataaacgtaggctgggcgcagtggctcacacctgtaatcgcagcattttgggaggccaaggcaggtggatcacttgaggtctggagttcaaaaccagcctggccaacatggtgaaaccttgtctctactgaaaatacaaaaattagccgggtgttgtggcacacacctgtagtcccagctacttgggaggctgaggcaggaggatcgcttgagcctgggaggcagaggttgcagtgagccaagattgcgccactgtactctagcctagcgacagagcaagactccattaaaataaaaataaaataaaataaaatttcccaaagagcagtggtttgactgctcatctagaaccagtggttcccagattttgcaatctcatagaccaggaaaatttgaaaaactattggatgtccaacctaagagggccagctttttattttgccaagttacggatgttttaaaaagaaacactaccatctgttaccaccagcacttctaacaccaagataaggtaaaaaggttattcttagaaccccagccattgccaagaaagggcagctggcagcacgcctcacaatgtatccacacagaggtatttctgtctttgaatttctcactttgccagaagttggcatttgggaaccacttctccagcttgtccgtgctggcagataactgattttgtacttctagaattgttttattatttttttgagatggagtttcactcttgtcacccaggctggagtgcaatggcacgaccttggctcactgcaacctctgcctcccaggttcaagcagttctcctgcctcagcctcccaagtagctgggattacaggcgcgcaccaccacgcccagctaatttttgtattttttttagtagagatggggtttcaccatgttggtcaggctgatcttgaactcctgacctcaggtgatccactcacctcagcctcccaaagtgctgggattacaggtgtgaaccagcgtgcctggcctagaattgttttagaatgtccaactgtttgttaccctttctcactccattaaagatctgagtagttcctaaaagaatatgtttgtttctttttcaattttattttctaatttatgtcccaggcccagtgcacatactggcctagccagactgagccaggtgggcttgtcggccttgcccttgaggcacttagtgagcccagaagcagtcaggctctcagcatggagctcagtgaagacagcggcagtggggcatgtgacagcatggaaagggacctttttggcgggggcatgggagtggaggtttcccctcttagacctgagggaaaagactaagagcaaaggcatgggccaggcatggtggctcacccctgtcatcccaccactttgggaggctaaagtgggattgcttgaagttcaggagctcaagaccagcctgggcagtatactgagacccccttctctataaaaacttaaaataaaaatcagccaggctcggaggtaggcacctgtagtcccaactacttgggagactgaggtggaaggatggcttcagcccgggaggttgctatgatcatgccacttcactccagcctgggtgacaaagcgtgaacctgtctttaaaaagaaaagcacaggcaggaacaggaagtaacaagagaacagtacagtgatgcagggacagggagggagcccacgctcccagagttccaggttgggggttctagcaggaatcgtggagaagttgggctggggagcaggggtaaccccctaaggtggggccctcaaagatccagatcccatgtgcccataagctggggggcagcccgtcagcactctgagggtcccccacaaaggccacgctggcttctgtggcccacagctcctggagtggatccggcgcaccatcccctggctggaggaccgtgtgccccaaaagactatccaggagatgcagcagaagctggaggacttccgcgactaccggcgtgtgcacaagccgcccaaggtgcaggagaagtgccagctggagatcaacttcaacacgctgcagaccaagctgcgcctcagcaaccggcccgccttcatgccctccgagggcaagatggtctcggtgagcaccaggattcacatgggagcagctgtgaggggcagaggcagccctagaactgcctgtgggcagtttggccagcgtaatctttcctaagttgttgatgtcctgtgggacatggcatggcctttcggatgcagtggtcggggaggggtgcacttcactcggcattgtgctcccctttggccctcactcactgtattttacacccagggttttatacgcatcccaaatccttgccacgggttgtgtgggtgtggagtggtgtgaatttggagccgtggtctgccatgatggcatgaccgccatgtgcttgaggcccttcatcagcggaggggcagtgcgccctggacggtaccacctccccatctatggtattcatccattcattcatgcactcacccgttcacgcattcattttgttaatccagaattgattgtacctgctgagtgctggggggccctgtgtaggcatccaggtataatagcaaagcatgacacagacatgaccccagccaagttctgccaccttcccatcagcatcccttggagacatccccctgggtgcctccacttccttgtgatagccctgcctgctcctgccctgccccaggacatcaacaatggctggcagcacttggagcaggctgagaagggctacgaggagtggctgctgaatgagatccgcaggctggagcggctcgaccacctggcagagaagttccggcagaaggcctccatccacgaggcctggactgacggtacggcccagctctgccccactctgcccagccccgctcccgtgctcccctcctgtctctcaggcatgcatgggtgtgcacacacagccccctgccacgttgggtctgtttctcaggtgccctttcttgctgcttgggagcatgtgtgtgtgtcagaaatgctgctttagagccaggttcagtggctcacacctgtaatcccagcactttggcaggccaaggcaggaggatcacttgagcccaagagtttgagaccagcctgggcaacatagcgagaccctgcctatacaaaaaaattttagaataataaaattagccaggcatagtggtgcacacctgtggtcccagctactttggaggctgaggtgggaggattgattgagccagggaggtcaaggctgcagtgagccgtgattgtaccactgcactccagcctgggtgacagagcaagaccctgtctcaaaaaaaaaggaaagaaatgctgctttggattccttcagccccagaaagcagggaccattcaggggccaggtcctctttgttgcccagtctgccctcgcctcagaggtgggaccctgtcagtcatccaggaacacagccaagccccctccagcacttcagggaagtgaccttacacccatctgtttgtcccctctgcgtgtcttccccatccagggcgagtgtgtggggcaggcctcttccatcccccgcaccctgtgttcagagtcggcttccctctcccacacctctgtgagcgtggacggaaggctggggagcccatgttcactggcacgtccctcaggctagaggagggcctgcctcctgggcctgctgccggaccacagccagtgctcaccctcagacagtgctcacccactgccttcggcccacccttcagcatggcccacctgtgagctcctcccacctcccatcccttcccagagcctccttcccgggcctggctccccctgcaggagcgccactgtgctttctgttctcggcagccctgcagctgcctggccgttggctccagatgtgggatttcatcacgtccctggccctcttttgggtcatgccaaggttgagatttcagatcccaggggtctggaagccttcagaaagctgccagtgcctgggagagccacaagagccactcacaggactcctctcccactctggccaccaccttcccaacacagtctccctggccctccggccgccactccgcccagctgagcccttccttgcattcctgagtgcattttctcacccctccccaccctggcccgcatgcgagtgtgcagctccacacggcctgcagccctggccacggcccagcttgtgccctcctcacatgagctcagctcgccattcccgcggcagctgccagcctcagagcagcccagcccctttgctaccaggaaagagtgcgagtgagagagtggatagtgagggaggaagggcctggccaggccgggtgccgcacttccctcttgcctggcagaaaggcacccatgtgaggagagcgtgttagcaccgatgccatcttgtgtggttggtggcctccatccattcccggattcactcattcgttcaacagacagctcaggtggctccagccgtccttatccatggaggcctgggcgtcgccctgtggctgaaccttctgggggtctttctgcccacccatcagctcttcagtccctctacagggctccatgaggccctgcagatggtttcctgaggccaaggggctgggtgtggtggccccactggcattcctcccctgggaagggctctggggcagccttcacctgaggtgtttagaagccagctcagtctccggccagggcccagctggttcagcggcctccacacgtccctgccccacccctacctgactgggcatccacgcgggtctgcccatggcgtctgccagagcccccaggcaggctggcctactaattcccaagactcagagcctctgtcctctcaagtagcagttacgtgaaacaggacaggcaggccctccacaccccagggtctggtcgtagcggcctcctccgccctggggtgggtgggccaccttcactccacacccctcaccatcccccacagcccgcagcgggagggtcgtcgtggatgcttctctgagggacttgatttcctgggaatacgaccaaccccgaacgaccccttgtccccactccagttgtcccttggcctggatcccagatagctgtggcaatggtccgctgcccacatcctctcggtgcacccttgccaggactctgcggaggcagagggagatgtcacctgctgtttctggttcctgcccctgggagaaagcagttggagaagggaattgcaaggccgccttgtggctgagcctcctgccccagggctgcgcagcagggccggtggagccagagtctcccaggcctcccacttcttggccatcagtgccagagccgatcctgtggggagtctggtaggtgcctgacagttgagactgggagaggctgaggtgaggctggtactggctccatgcctgctgtgctcgaacaccacctcactgaaacttgagaatagttccatgccacacaggtactggggctggccccattttacagatgaaggcacaggcccagagaggcctcggtggctgcactgggcgggcagctgtcaggtgctgggacagagctgaggggatctccgctaccacttgggggaagcccaaggtggtgtgcctgaggcagggcccctgtaggagctggggtgcagccaccttcccaggctggcattttccctgcggttccctaaagaccttcacttgcttgcagggcttccttgagctttggttctgggatgtgtaattagccaggatcagggactaataacagcgttcctcctttcctttaaagggcctgatggtgggcccgccccaatgcacacaggacaccttaggacagcgtggggcacttagacgtggagaggaccaccacctgtgcgggtgcagggtcagggtcctagaagaagctggctctgatgcttccccttccccaagcctgctgggacatgggctttgaccccgggtgcttctccggatcaaagccctccagaaacaggtgctacctttctaagccgtgctaccacggcccgatttgtatggtttcctactaacaaaagttgctaagtttaggacacacaggttgagatggaatctctctctcaggctgagcaaccctgaagtgtccatccaggtccatccaggttacagttgggcttagagatccctggagggtacggaagaagattctggaagtttccatgccactgtcattggcatggaaggatgtggggtccacagtctctctttccctccctctgcttggacagcccctccagactcctgccccacagctgccgtgctgtggtctaagcgtctctctgctcctaccagggaaggaagccatgctgaagcaccgggactacgagacggccacactatcggacatcaaagccctcattcgcaagcacgaggccttcgagagcgacctggctgcgcaccaggaccgcgtggagcagatcgccgccattgcccaggagctcaagtacgtgcgggctcaggacactatcatcacctggctctcaccacagcctgcccagactggtggcggcagcacgccgaggcccagcctgcctcaaggcctggaatagggtccccagtgccccaactgcacctccttccagaagccagggaagggccttatgggatgaggccttttgcccatcctgtctcagccccaggtgggacacctgaaggatttggattctctagcaggagggaggtgtctggccccttgtcttgattcttcaggctttaggggtccctgggggtgtcacctctcctggccaccccaagtaggccctggtcccctgatgggatgggccccagcctccgttgctcccagccataggtccctgagggaaccaggctgcacagtgagcctattgttctgctcggccccttccctttcttgctcagaatacacttattgtaagagcttccaggcagccgggctccttcccctccccacccagtcagataaacttgtgtacacaattagtacgctgagggtcgcgctggtgaatggggccttattccaccagtgcagcggccagcagcagggcgggcccaggcagcaggaggcccaggccattacttcatggaaaatccacaggccctcgaggggcagcagggctcccaaaatagccatctgctcaaaaataggatccttggctataactgctctttccaccgacacccccaccccaccacagtcacccccaaaggtctgcttattcctatgagtccaaggcccgtttattcctgagtccaaggcccagccctgatgccccagtggagccccatgctgggcagagctggtttcctccccgactcactacccactactgtccgggtgctttgagggttccccattggctcagccagaggcaagagtcccgtggggccatcacagcatttggcacagttggggcactccaggggtcctgccaccaccacgtccaggccaaggagagcaaggtcacagatgcagcaccctcgggggtgtgggggtgggacacaggcagcttccccagtgacggaagagcccctggaagctggtaggaaacagacttgaaataaaccctaggcttgcccccttctcaggccctgggcaaagctatgtgaaacccattactctgctcaggaacaggcggtccccgaagcagctctctggacggtagccctgaaggaacggaagggagggctgtccgggtcctgtcttttctgctgagggggaattacagaggcctgtggaccgtccaggatgagccggatgggcagccctgctgagcactgattaatggcgatagcaaaaactcactgagctctcagggctttatgtgtaccagctcatttaatccccacagcaactgtgtaactgagggaaccgaggcacagagaggccaagaggtttgcccagggtcacacagcaagggagtggttgagatgggaatggagcccaggcccccagccctactgtggagcacagcctcagcccctgtccgctgtctgtggctggctcgcctgctccccatgtcctgttcctccccagagtcgttccctgccccctacccctcctcaggccccaaggcctggttgaagggccacactcttagctgatagtggcagaatgagtcagggatgggtgagcaggaggaagccgcttcccttctcacccctggttatcacctgttaaccagctctgttatcaccccttcccttctaccctgggggtcccatgggccagaaccaagctgtgatttgattgaccaattagtgattggttgctgatatcctggaatgttgactgccccaacaccctggcctgggaaccttgggggtagatgggtccaatccatctagccacttgcccttgccgagtctcattgctctctgcccggcccgcagcgagctggattactacgactcccacaatgtcaacacccggtgccagaagatctgtgaccagtgggacgccctcggctctctgacacatagtcgcagggaagccctggaggtgaggagggggtgacatcacccacggagctctgtgcccctgctgccccggggctggtggtgtggatagtgtccagacctgtgagctccccccacctcccacggagaggatgttctctgactcctcagggccctctggacccctccccacccctcctgctcacatactgacctgccttccctctgtccctgcccccttccctcccacacactagaaaacagagaagcagctggaggccatcgaccagctgcacctggaatacgccaagcgcgcggcccccttcaacaactggatggagagcgccatggaggacctccaggacatgttcatcgtccataccatcgaggagattgaggttcgcaccccccggccccccatcttcccaagagcctctgtggggctgggccgccccctcactccagctcctcccctagggcctgatctcagcccatgaccagttcaagtccaccctgccggacgccgatagggagcgcgaggccatcctggccatccacaaggaggcccagaggatcgctgagagcaaccacatcaagctgtcgggcagcaacccctacaccaccgtcaccccgcaaatcatcaactccaagtgggagaaggtgggccggggccatccgtaggggctggggcaggacggcggggctgggggccacctccctgaccgctcccacaccgcgtctcctctgccaggtgcagcagctggtgccaaaacgggaccatgccctcctggaggagcagagcaagcagcagtccaacgagcacctgcgccgccagttcgccagccaggccaatgttgtggggccctggatccagaccaagatggaggtgaggcacggctgagccccacagagctgagaaggttccaagagagctcccgtagtgagggggtccccggccagcccagggcctgcagactgaggcgcctggcagagcaggtcccaattctcaccacccaggggccgtgatcaccctgcggggttaggagagtccacagagcttgcgcctggaatcccggcacctggggaggctgaggcgggcggatcgcttgagcccaggagttcgagaccagcctgggcaacatagtgagaccccaactctacaaaaaatacaaaaattagctgggcatgatggtgcgcagcccaaggaggtcgaggctgccgtgagctacgatcatgccactgcacttcagcctgacagcgagaccctgtggtctctagtgggctacctatgggaggtgggtttgatccctgaatgccctggtctgatgattgtgagactcaggcactattgaacctctgatcctgtcctcccagctctaaaatggggatgaaaacagttaccttattacttcaacaaatgctttttgcaccaactaaccagccacatgagtgctgtcattcttacagcagttctgaccaccactcactgagcactcactacataccaggcaaccaggctggcagcaggcaacctcgtttaaacccagcaagcctgagagggggtccgggtgccaggcaggtcagccctgaggttcatgccagccacgcagcatgtggacttgtgggtgccgagacatggagtgcccgaggtcaggagctgcagccaggccagggttcagatcccaactctgcctctaacagcactgagctgtcctccgtgagcctcggtttctacctctgcagtcagggcctgccacagccctggcctcacagagaggtcaagggtaaaatgaagttgggcacagggagcgcttggcagagaaaacctccctgtcattgtcatagctgctttaacatgagagggcaggaccggaggggacagttgtgagcagtgggccttccctcccagggacccatgggccaaggccccaggccaaaggggccccggggaagatgcaggccagcagcgcgagtgggctcctccaggtggtcagtgggggcaggcccaccagcctcaccccaccgcctgcacccacccccgtaggagatcgggcgcatctccattgagatgaacgggaccctggaggaccagctgagccacctgaagcagtatgaacgcagcatcgtggactacaagcccaacctggacctgctggagcagcagcaccagctcatccaggaggccctcatcttcgacaacaagcacaccaactataccatggaggtgcgcggctgccccgcccgctggcctttccaccagcatggccggcttcctcactggaaatggttcgggccagtgagaagatagctgtctgctgtctgttgtttttcactctgtttaaaaattattgaagagaccagcactttgggaggccaagtgggaggatggcttgagcccaggagttcaagaccagcctgggcaacatagcaagaccctgtctctacaaaaaatgaaaatattagccaggcatggtggtgcatgcctatagtcccagctccccaggaggttgaggtgggcagattgcttgagccagggaggcagaggttgaggtgagccgaggtcatgccaccacacttcggtctgggtgacagagccagactctgtctcaaaaaaaaaaaaaaaaaagattgaaaagactagatcaaaatgtttagacatttttaaaaattacactttccctagcactgctctcatcaccatgacaatgcccctcacaggacaagctgttctaggggcccacagagggcaccgtttgccctgtggccttagcagtatcagccttgctcagggccagagccagccagcgggtgccgggtcagggcagcagctcccactggctaacactccggggacattacaagctggtcgccgtcatattggtagcttgagaaaccaaaagactggacactcttgatccaacccatacaggtccacagatgcttcaaaccagagttggcttttttgtttttttcccctgagagccagtggtgagacactgaccagagtttgtccaaacagtctccacagggatcccggcacaagattcatgggtccttgcccttctgctgcccctgtagctgggaaacacacttactgtggagacagacattggcagaggcagcagggaggcaccatggcccgtgtcccctgtgaggtgtacaggagagcaggggctttccccagggcgggaggacagttcacagtcctccacgtgtgaaccacggtgaggacagttcacagcacccggcccacgatcacgcccccgtctttccgcagcacatccgcgtgggctgggagcagctgctcaccaccattgcccgcaccatcaacgaggtggagaaccagatcctcacccgcgacgccaagggcatcagccaggagcagatgcaggagttccgggcgtccttcaaccacttcgacaaggtgagcagcctgccacctcctcggcctctcccctcccgccgttgccgtaccagcccacaccttcgtctctgcatctgttcgtccattcccatcacagttgctgagcgtcggccgccactcccagggccagcagggccctgccactgtcagggtgtaggtgtgcggcaccaagaccccagcctgggccacttcacacgcacaggcagggggccggaggtcccaagtcctgccttctggggtggcatcctcaccacccccagggcagatgaagtctcagcacacccaggctttgcgacccggtctgtgaacctggacacagacaccccgcacagtgcttttagaattcagatttggtccggcagcctcatcagaggggccctgagcgccagagtttgctgccatccccagcccacccctgccgggctgacggactgagaagtgtgcagcctcagctctgcacctggcgcccccaggacaggatacagtcccctctgtcccactccaaatcccaaaggcaaggagaaccccccccccgaccctccaccagtcctgggacttgtcctcagttctgtagcatccagctgccacccctgctgtgggcagagaggtcggggaggcctctgccttcctttgagcttccgaggttggggaaaggatgaaaggggcccgtgccgcccccgaccccacgtgtccctggccatctccttgtccatgttgcctctaactctgtgtttccctcccctacgtgtcccttccccctgccctctgcatgtgaccccgatccctcatcctggtctccacgccgcccctcccgcacacctgccttcggatggccccggcaggatcatggcggggcgctggggcccgaggagttcaaggcctgcctcatcagcctgggctacgacgtggagaacgaccggcaggtactgcaccctgggccccagcggaccatggcattaactgctctctctctctctctccttctctctttctcccctcgccatcccacccctgccatcctgtgtgccatctcatggctctcttgcctccctgcccacatctccctggaccccttcccttttacctggtctcttggggccgctgtctccctgctccccgccactgtcctgtctgcctgctgtgcacatggggcggcccctcttgcctactctgggcccggcctcctctgctatgcctgcgtcctcggagcagaagcagacaggcagcatggactccgatgacttcagggctctgcttatctccacaggatacagcctggtatgcagctctgtctccccagccacccgctcctcctcctcctcctcctcctcctcctcctcctcctcccccccacctctccccctcaccgcctccagagcttcctcgtcctcggggacactcctccgcccgagcagcgcagccgtgcctgcctcttcctctgctgcatctgccggggtggggtccctccgatgacttcccgagccccccttcttccctagaagtctccagaaagagggggcagctctcccactctctcccctttttctttctctttctctctttcttccccatcctccagagcttactcgtgagcctgggctgagggcagtagaccccagttccctgctgtgggagaccacgagaggggagggtgcagagaggccctgcttcccggcctggggcactgggggcttggaggcctgggtcagctggagcagtggcaggctctgcccggggccaaggctgctggagcaggcggggaacagggcgcacgcacacgtgggttgggccctactctctcggctgtttccctggagaccccaccagtgtgggcctggctgcccctgccccactaaatgtcgggtgtcccccaccccaccctctccttgcagggtgaggccgagttcaaccgcatcatgagcctggtcgaccccaaccatagcggccttgtgaccttccaagccttcatcgacttcatgtcgcgggagaccaccgacacggacacggctgaccaggtcatcgcttccttcaaggtcttagcaggggacaaggtgagcgagacccctacgaggtgcatgggggctggcgagaggggtccctgcagtgggaggggctgagggggccagtgtgtgggtggggatggctcagagtcccatcctgcctgccccagaacttcatcacagctgaggagctgcggagagagctgccccccgaccaggccgagtactgcatcgcccgcatggcgccataccagggccctgacgccgtgcccggtgccctcgactacaagtccttctccacggccttgtatggcgagagcgacctgtgaggccccagagacctgacccaacacccccgacggcctccaggaggggcctgggcagccccacagtcccattcctccactctgtatctatgcaaagcactctctgcagtcctccggggtgggtgggtgggcagggaggggctggggcaggctctctcctctctctctttgtgggttggccaggaggttcccccgaccaggttggggagacttggggccagcgcttctggtctggtaaatatgtatgatgtgttgtgcttttttaaccaaggaggggccagtggattcccacagcacaaccggtcccttccatgccctgggatgcctcaccacacccaggtctcttcctttgctctgaggtcccttcaaggcctccccaatccaggccaaagccccatgtgccttgtccaggaactgcctgggccatgcgaggggccagcagagggcgccaccaccacctgacggctggggacccacccagcccctctcccctctctgctccagactcacttgccattgccaggagatggccccaacaagcaccccgcttttgcagcagaggagctgagttggcagaccgggcccccctgaaccgcaccccatcccaccagccccggccttgctttgtctggcctcacgtgtctcagattttctaagaaccaaaaaaaaaaaaggaaaaaaaacacaaaacaacaaaaaccaaaaaaaaaaaaaatcacaaaaacaaaaaaactataaaaaagaaagaattaaaaactttcagagaattactatttactttattaacttacggatttattatataaatatatattcacctagcaacatatctctgccgtctctcctgctctcataatgaagacatagccgattctctgcccgggccccttgctgatgctcctccgggtctgcgtcgggcgtgggtctctggggaccctccagaggtggaggtgggctgatggcctggctgcctggtggttgatggttttgctccccctaccttttttttttgagtttattctgattgattttttttcttggtttctggataaaccaccctctggggacaggataataaaacatgtaatatttttaagaaggattcctgcagcatcatctttttttatttctcctgtgtctgtcctccaccttctaggagagccagggcagagctagcactgtcttaagctgtcaacgtggactagctcgtgtcatctgctcgagaagggctgtcgctgttcttgtttctgagtgaggagtacgcaggccagagtggtcacccggccgtgagcagtgagggccagagactagccccagacaggtggatgccagagagagtggcacccatgccaggcaaggcctagggaggtggtcttgctcagcaaccctgccctgagcagcaggtgcgcccatccggagatcctaggagaaggtggccacctccatccactaaggaagagaaggaagacagtggcttgaggcagggagctcgcaggacagagcctgagccaccctgtccctcccacctggctcacctgtctgtgggtcaggcagatgaccccctcacccccatccaggtgctggctgcagtggcctgtgcagagaggggcagggtgagtgcccaccagtccccgtaccccttccccccatgccccaccatgccggggtggtactcacagaagatgcaggtgaggtgggccacacaggacacgaaccgctcgaagtccacacgcagacggctatcccggtagcggctggtgagggtctgggtcagctggttgttcaggtggaagcctagggggaggctgcttctgagcccagtggcccacagggaacccaccttggcattgcatccccaccccacctcctcagggaggacatgaatgccacagggtgtcacaccccaactctgccccatcccggcagggtgagtacaggctgatcccttcaatcctctgggcctgtttcctcatccatcaaacggactaagacagccccgaccccatagggtgtgtgaagacagaacgctcaggacagcgtctgacacgtgactcgatgtgtgggtactgttactccttaaatcctgtggggctttctccttgccagtgggcactggaggatatttctgtgcagcaaaaaatatagtcaatcccatatgga

SEQ ID NO: 1128 - DNA, 68247 bp, Homo sapiens
cactaaactatacagagctaaaatcatgcaaaagattgcaaaacaaactgccttgggaaatttccagtctaagctaaatggaccaagtataggattgaattttaagaagttggtgggaagattccagctcttgtactcacaggtaaggtcctaggattctatttgttgaagtgtctgcagaccctctccctacagcaggggcgtggagcaaatgtgcattcaggaagtgcttattagtccccccaaaacctttttcgtgacgacagacggatggaggcctcagacgactccggcagtaggaccctgaaccaaatgcctgagctgcgctcgaaaggctcgtctcgcaggagctggcgagtggcacgggcttcggtggccgggctcggggctcggggctcggggcccggggccggggggggcggggggtccgtgcccagggcactctgtggctcgattcatgtccccgccctcccacctgagcacactgggcagagagcctgcggcatcgggccagtcgcgcctcctcgtccgccctgggcaggtcgctgggccccaggccgctttctacagctcctttaataaaatggacagcaggggtcctaaccagacgtgggcatcaagacaaaggaggcggccagacgcgcttgagggcctgctcgctagctcccgcccccccattccgcggtcacccggggacagaggccaggccggactgggtggagttgggactcatacgtctgcgtccaggaaggcgccgggcgagccccagctagacgtgacgggcggggccgaacacggcagcggaccagaggcccgcggcgcaccggcgtggggcggggcaagcggagcctcccgggatgccgcgcggcagccggcttccggctgtgggtggtgcgggggacagcggcggccggaagctggctgagccggcctttggtaacgccacctgcacttctgggggcgtcgagcctggcggtagaatcttcccagtaggcggcgcgggagggaaaagaggattgaggggctaggccgggcggatcccgtcctcccccgatgtgagcagttttccgaaaccccgtcaggcgaaggctgcccagagaggtggagtcggtagcggggccgggaacatgaggcagtctctcctattcctgaccagcgtggttcctttcgtgctggcgccgcgacctccggatgacccgggcttcggcccccaccagagactcggtaaagacccaggggagttggcttaggccggcgcctggagcgctcgtttgagggaagagcaggggagctgggtctatcaggtgtttgggggcggggtattggcgatggtggcgcgtccctaagttttcagtgtagaagggggtgtggctctcggagtttggggaaagaataaaggagatgggcctgtctctgagtgggaaagggctactggacgggctccatgtagtgactgagcgcctgagaggggtttgctccctagctttgtgttcggggagggtgttgggaaagcggtaaggagtagggtggctggatcttgtttggagagggagatgtggtcagggttcttgccttagtagggaacaaatctagtgttgtgtgttcctaccagagccagaaaggaagggcccaaagctccagaattcttcctggtcctcgaaggagggaactagaatttctgctgtaggaggtacttatgcagtaatctcgttgggaggcggagactggagttggagtcttaagagttgtgtttttgcgaacatcctaagcacgttcttggttatttcaattgtagcttattggaggtgcttgggagatggggggaggcggaaacctggtaagccaactcgtgatgctgccactatgaatgctttccttgcacttttaaacaaagaaattatcaagagtgacgagtttgatgaatttagaggctagaaagtagagggttcctatttcattagattttccagagagattggattttaaggatggagatgcattaagggatctgaactttggtggaagtaagtttgcgtgaacttttagtgtattttaaaatccttttatctttcaaaaattgacgtgtaagatactttaattagtaataaagtgtgaaataatgttttcccagtgtgtgaaattgtaggcttgcatggttgtactggttcccaaatttcaccatgataccatgtgtagtattttttttctttatatttagtggacagaaattgtaatggattggtatggatactaaaggtgttgagagtgttatcacttgaacagctgtcttatgattctttccgattgaaatggattacaagtgactaatgaaaggcaagggatcttgttaggaagtgctgagaagtggtaagtcagtacaaattgaaggacattttgaggtaggattgtggttaggatggagggatagggtaagggtcttcattttaaggataaatgttagtaaaaagaataaatatgtattttgagatattaaaattatatttgcaccaccctgacacaactgtttcacttatgttattaatctgttgttcgtaggtaaaaataagcatgagtcccaaggaagcatacagtttaaagagaaacattactttctagatcaattcataacatttgcagatcgtaaggttttttagaccattttttttttccaagacagagtcttgctctgttgcccaggctggagtgcagtggcgcgatctcagctcactgcaacctccgcctcccggggttcaagcagttcacctgccttagcctcctgagtagctgggattacaggcatgtgccaccacgcccagctaatttttgtattcctagtagagacggggtttcaccatgttggccaggctggtctagaactcttgacctcgtgatccgcccacctgggcctccctaagtgctgggattacaggcatgaaccaccgctcctggcccatgtgtttgttttttatttgcaaaatgcagaccacctgtgccagaagaatgcatagacttttcttttttcttttcttttctttttctttctttttttttttttttgaggcagtgttttgctcttgttgcccaggctggagtgcaatggcgtcatctcagctcaccacaacctccgcctcccgggttcaagcaattctcctgcctcagcctcccaagtagctgggattacaggcatgtgccaccacgtccggctaattttttgtatttttagtagagatggggtttctccatgttattcaggctggtctcgaactcctgacctcaggtgatcagcacacctcggcctcccaaagtgctgggattaaaggcttgagccaccaggcccggcctctttttttttttttaaacgaaatatttgaaggacacacaagtattatacgtggcattggaaatacaaagatcagacgatatccatcttcaaatggttatagcatagggaaatagacattcatttaggacacttctaaaacagcatagaggagagtgctagagtacgttatagcaagtgttatcaccaaatgaatcttagagatcaagtctagttttcaaataaaggaggaggaaaatgagtctcaggaagatgctgtcagttgtcaatgatgaacataggccttgtgggtatttttcttttgaagaatgactttttttttcagtttgtttgacagcttacaatataatttgttacttaaccttaccattagattgagttggtcaagactagcaaatagtttcatagttgaaaaacatgctttattatttattttttatgtttattgtcctacaaatactactatattgcagtactcaatatcgattaggcatatgacaacatttttctgaaaggcaaaaaatacctaataaaatgaagcctggtttttagagtcctctatgggtcaccaaaaatgatttcaattgaactgttatgaattgcataatttaggaaagttatgagtcatatgagcttagtcatgatgatatcttgttgaagttgcagctggggtgtataagtctcactttgatttcaaaatcgttttccctttgtgttacttttaataaaagaggatgtagtgggtgggaggaaaaaatataggtcacagatgagggatgagaaagtttgtatctgaaacatgtattttcaaatttaccttgaggttattggcatggggattctccatattgcagtgctgatttcattattgacagcaccattttactcagtattttgacatctggctttctcttttgatgttaattttgcttactggctgcattcctttgaaacctaaatgcttaactgccctaactgctccaagggagatttaatgtaactctgctttatattagtctaagagataaaccatatttcaagagtagaatggagaggaattaagcagataattgtgatggggaaactggagagatccttttgactttcacaggatttcctagaacattaaatataggtttcctccaaggccaattgtggttgatttttggatccttcaccattttctatttgtgagataataagtgtatacagctggaagtgtaatgtgaagaaagtctgaaaaagattgataggaaaggaggacaggaatgggcttcattgaggtaacggaagtgaaatgaaaggcttttcatatatgggttgagcatccctaatctgaaatgctccaaaatttgaaactttttgaatgctggcatgacagcacacattacccctaacacacgattttttcactgttagtggtatattttttactgtgtagtacttatgtgtgaataggtataacaaaacgattacttattgtagcatgtaaaatcagtcaggaatgatggtgatgccagacaaccacagattatttatgtgggtggccgagacagtgacacctttgctttcgaatgcttcgttgtacacaaactttttttcatgcaaaaaaagttacttaaaaatattgtttaggccaggcgcggtggctcatgcctgtaatcccagcactttgggaggccgagctgggtggatcacgaggtcaggagatcgagaccatcctggctaacatggtgaaaccctgtctgtactaaaaatacaaaaaattagccaggtgtggtagcaggcgcctgtagtcccagctactcgggaggctgaggcaggagaatggtgtgaacctgggaggtggagcttgcagtgagccgagatcgcgccactgcactccagcctgggcgacagagcaagactccatctcaaagtaagtgaataaatgaaacataaatgaattttatatttagacttgggtcccatccccaagatacctcattatgtatatgcaaatatttcaaaatttaaaaaattctgatgaatgaaacacttctggtctcaagcattttggataagggatgctcaatctgtatctctttatttactcctaaaatcagccaaggaaatgggcatctctccgttcccccccttccttttttttttttctttgttgttacatgagttgtactggtttcacttcatttgacagtgttctgctaatgactagacgtgtatctctgacctggacttgttctctggagttcatattcagctgcccatttggcacttcaaatataacatgtccaaaattagttaccttttttttttttttgagacagagtctcactgtcacccaggctggagcgcagtggcgcaatcttggcttactgcaacctccacttcccaggttcaagtgattctcgtgcctcagcctcacgaatagctgggattacaggtgtcccccaccacgcctggctaattttttttttttttttttttttgtatttttagtagagatggggtttcatcatattggacaggcctgtgttgaactcctgacctctggtgatccacctgcctcagcctcccaaagtgctgggattacagacgtgaaccactgccccagccagttacctattcttttgattacaagaatgagtagctggacacagtggcttacacctatagtcccagcactttgggaggctgaggccggcggatgacttgaggccaggagttcaagaccagcttgaccaacatggtgaaacctgtctctactaaaaatacaaaaattagccaggcgtggtggtgcgtgcctgtaatcccagctactggggagactgaggcaggagaattgcttgaacccgggaggcagaggttgcagtgtgccaaggttgagccactgcagtgcagcctgggcagcagagtgagactccatctcaaaaaaaaaaaaaaaaaaaaaaaagaatgagtatcggatacaggtttagcctaggactaggcagggctgctggtaattgtggaagtagtctcattgcctaacctgaaacttgcatcctggttactggtcttgctggagagtcttggctcaggttacgtcccaggtctgttgaggagctcttgatagggaattagttgaagcagctcatactctatcctcctttactggtataaatccataaaattgtttagttcccaggctctggggtccctggcctagcagagagcactgctccctttttctcattccttagtcccaacaacccgcacctgacacttactacacgtggcctgcttccctgtcctgtgtgttttggggggtgctgaagaggaaggctcctgtgtcttcagcacaaacacaataaacacttcacagcagtactggctttatgttttccatttctgatatcagaagtaggagcatgacattgatagtgtcattttgggggaacttttcgtacttcatgcagcagagcagtgaagagtgagctgagtgccttggggttctgcagtacactctcaagtagtattttaggaaaatgcaatttgctgaaaaaataaaagaaattaatgtaaaaaatccacaagctgggcgcggtggctcacgactgtcatctcagcattttggaaagctaagggggaaggatcacttgagcccaggagtttgagaccaggctgggcaacatggcaagaccttgtctctacaaaaaaatagaaacaaaaattagccaggtgcggtggcatgtgcctgtggtcccagccacccggaggattgctcatgcccaggaggttgaggctgcagtgagtggtgattgtgccctgcactctagcctgagcaacagagcgagaccctgtctcaaaaacaaaacaaaacaaaaacccacacgtttccagaaccttctcatataacactttatttacattgttcttaaatacgtgtgggacggttatatacataccactatacttatgtgtatatatgttgatatacacacaaaattatatacataatttttgtttgtttgtttttgagatggagtctcactctatcacctaggctggagtgcagtggcgtgatctcagctcactcactgcaacctctgccacccgggttcaagcgattctcctgcctcaggcttctgagtagctgggattacaggtgcctgccaccgcgcctggctaatttttgtatttttagtagagactgggttttaccatgttggccaggctggtcttgaactcccacccttgtgatccacccacctcggcctcccaaagtgctgggattacaggtgtgagccactgtgacctgccatatacataattttttaaagtttcacgattagttttagcttaaaaatgtcagctctgggcttaatgaagaaaatatggatatactttatgtcaatgcattaaagtgaatggccataaaagcttatcccagagacaaaacaattcagatataagagaagtgggagagtggaaggtttatctaatcttctgtaggcaactccacagctacaaccagaaggccattttgttacaggcctgaaagccccgttttctttttattcttctttgaaacctttagaaggaacaaagtattggctactttttaccgctgatgtcagtgttaagaatcttgtgataacatagatttactctccctgctgaaaatcactatgtggctcatcagtaacacaactagacatgatgacttaatgcaaaggaagtcctatgtaaatgagcaatgaaattgcaactgtgtataaggaacaaaatagaatatgaaactccagaatcttttgttttcatttctgtttctcccaaggctctatcattcaaaactccagaatctttcagcatgcaattgtctcctgatatcagcccctctcttgttttgttttcttttttttttttttaatcacagtgagccacaacctaggagtcttttagtggtttctacttggtttgctctgcagcctaccagcagatttcctacattccggtcttgttcccctctagcccattctccacactgcagtcataatgaaatttctttcttttttgggggggatggagtctcactctgtcacccaggttggagtgcagtggcatgatctcggctcactgccacctttgcctcctgggttcaagcgattctcatgcctcagcctcccaagtagctgagattatacgcacctgctaccacgcccagctaatcttgtatttttagcagagacagggttttgccacgttggccaggctggtctctaactcctgacctcaagtgatcgcccaccttggctttctctctctttttttttttttggattttgagacaggatctggcctcgttgcctaggctggagtgcagtggcacgatatcagctcactgcaacctctgcctcctgagctcaagccatcctcccacctcagcctcctgagcagctgggactgcaggtgtacaccaccacgcctggctaatttttgtattttattttatttatttttttggtagagacggggttttgctgtgttgcccaagcttgtcttgaactcctggggctcaagcgatctacccatcttggcctcccaaggtgctgggatgacaggcatgagccaccacagctggcctataatgaaatttccaacttacagctattgccattatccaaagcccagaatccctgatttccttccatagcccttcatggcctgaccagtgcctgactctccagcctcacacttcatattctctctgtactgctctgcactgtagcctcattgagttgctttcacgtctttaagtgttgtgttctattttttgtggaattcagcatatgttatgcccttgacctaaggcctctcctttcttttccttctctggggtgctgcctcatccttctggtcttcaaaaccgtttccctgggaaaacatctttgactcagcaggcagggatcatgcccctgctgtgtctgtgcataactttctgtggctacttctgtcttggtctgtgatgtactttataataattttggtctttcctccagtgtcacaatactggaagtctgtttctttttctctgtgttgtatccttagtgcctgaaaggtaggaggttctcaataaatatttgttaaataatcaagtaaatggagtctggtggaaaagagaaaaaataagtgtagaatgtgtgtgcaagaaaggaggggtagggggatgaaaaagataacaaaagcacataacaaaacaacaaaaagcaaaaacaacaaaaaatgcagatgacaaaaaagataacaaaatgatgactgctgtggcaacttgtagaaagtaaggaaggtgctctcattctagagagaagtaggcagccattgtagttttttaaagagagaatatgggctgggctctgtggcccacgcctgtaatcccagcactttgggaggccgaagtgggtggatcacgaggtcaagagatcaagaccatcctggccaacacagtgaaaccccttctctactaaaaatacaaaaattagctggataggtggtgtgcacctgtagtcccagctacttgggaggctgagacaggagaatcgcttgaacccaggaggcggaggttgcagtgagctgagatcacgccactgcattccagcctggcgacagagtgagactccatttcaaaaaaaaaaaaagaatatggccagacactgagctgagatagacagtgcggcagtgtctggtattaactgtaataaactctactgtcagaagcaggtggtttatacttaagtttattgagagaattggatatggataagagataaactcttgggaaatggggagaaatataaattctgttgtaaagcctgtaaaaaattgagattactagtggttagaattttggaagtgaagtgcagtgaaatattgagtacctgagaggttacttgttagtgaaaacacaatagcagtagtacgtagctacagtttggctccaaaggaagaactgtttttactatagtttgtaatggcttcagaatcttcaatttgagatatccagttattaaaagagaatcaattgcagttgaaatgcattagttaagtattttaaagtgctttagcaagctacatttaaaaagtgcttattatagaaaatatacccaaaataaccaatgatgttactgtcttgtgcttattttttctagacctatttttatacatagttaagattatacaatatgaatatttctgaaatctatatttaacattataacatatgtatttttccatgttctttctttttttttttttttgagactgggtctcatcctgtcacccaggctggagtgcagtggtgctatcttggcttactgcagccttgacctcctgggctcaagtgatcctcccgcctgaaccttctgagtagctgagactacaagcacatgccaccatgcctggctaattttatttttactttttggagagatgagggtctcactattttgcccaggctggtctcgaactccttgggtcaagcaattctctcaccttgacctcccaaagtgctgggattacaggagcgagccaccgccctcagccccatgttcttaaaaaccttttgtgaacgacatttaaaatagttgcagattttttcccctgtctttggaagtgttacaacatccaaccatttcacagttactaatttaccatcattctggtttttgtccttgaaaataaggcaaggctgaataatgaacatctttgtggctaaagtttttttctttactttgagttgttaccttcctttagcttagttcagtggttttttctttttcttttttgagatggagtcttgccttgttgcccaggctggagagtagtggtgtgatctcggctcactgcaacctccgcctcccaggttcaagcagttctcttgcctcagcctaccgagtagctgggattataggcgtctgctgccatgcccagctaattttttgtatttttagtagagacagggttttgccatgttggccaggctggtcttgaactcctgacctcaggtgatccacccgcctctgcctctccaagtgctgggattacaagtgtgagccaccatgcccagccagttcagtgattttcatatttgagtgtgtcagccttgcctggaagccttgttaaacacagactattggatcccactgggcggatttctgtttgagcaggtctgaggggagacctgagcatttgcatttttaacaaattcccagttgatgatgatgctgctggtttgggaactacactttgagaactactgggctatattattgacaatgaaactataatgttgaggttaagttcctaagtcagtaggagtgattatgatcttgaatgaaactgagttcatgtaccaacctgtatcagggaaattgaagaactaaaggaccatattgcatttcagcactgagaattcgtgcagtttgtgaacatgtgagtgctgatatgtgcaaggtttttgctgagtattgtgaggcaaggatgttgtaatgaataaaaaatagccctttttggctttttttttcttcttttgagatggagtcttgctctgtcgccaggctggagtgcagtgatgtgatctcagctcactgcaacttccgcctcccaggttcaagcgattcttctgcctcagcctcatgagtagctgggactacaggtgcccgccaccacgcctggctaattttttgtattttggtagagactgggtttcaccatgtttgccaggatggtctccatctcctgaccttgtgatccccctgccttggcctcccaaagtgctgggattacaggcgtgagccaccgtgcccagcccggccttttttcccccgcctagagatggagtcttgctctgtcgcccaggctagagtgtagtggtgcaatctcagctccctgcaacatctgcctcctgggttcaagcgattctcctgcctcaaactagctgggattacaggcatgcaccaccatgcccggctaattttgtatttttagtagagacagggtttcaccatgttaatcaggctggtctggaactcctggcttcaggtgatccttggcctcccaaagtgctgggattacaggtgtgagccaccatgcatggcctcatttgggaaacttttgatatcagaatcttaggtttttcattagagattgtcagatttccatattcctctggaaggtaaaggcctaattgctagcattctggaagccagttagggtaggagggtaggagggtagggtattgggtagaggataaagaaggggtttgggaaaggtggggggtgtctcttggcagttgtatggttaaattgagtttttgttttatttagtgatatgtgttttttgggtacatgtgatattttgatacctgtgtataatatgtagtgatcaaatcagggtgattgggatacccatcatttgaaacatcttttctgtgttaggaatattacaagtcttctagctgttttgaagtatacaataaattgttaactataatttctgtactgtactatcaaatattagaacttactaatcaaactgtatttttgtaacactaaccactttctgttcatctccaccactcccacttcccttctcagcctctggtaaccaccattctgctgtctacctccacgagatccacttttttagcttccacacatgagtaagagtctttcttttaaaactggttttgtgagcatatttaacatcagtagcaataaacttgtattttaagctcctgttgctgtattttgaggaccttctaagtccattggaaggattttgaataccatagtgtctgcagtgatagttgttgaaagaaagggaaggcatcagtgcaaatatttttagacagtttttaaagagactcaagtcacccaatttgtcttctaaaaatcctgattttggaagaggcagtggagtttctgttgataaaaaatgatttatagtttgtgcttggcacttcctaatggattacatcaggaaagatttattgtctggcactctcattttaacgatactacaattgattattaggtttagatgctaataccttttttacctttatttcagagaagcttgattctttgctctcagactacgatattctctctttatctaatatccagcagcattcggtaagaaaaagagatctacagacttcaacacatgtagaaacactactaactttttcagctttgaaaaggtaatttgaattattcatggaataatgttggggcactgggggcttggtttggcaaaaacaaaaaagtaagggtatctactgaaatcttgggaaattacattttaaagatttgtaattaatttccagtataatgcttattctaaaattcatactggggctgggtgcagtggctcacgcctataatccgagcactttggggggccaagacatgtggattgcttgagctcaggagtttgcccaagctcagcctgggcaacatggcaaaaccccgtctctactaaaagtacaaaaattaggcatggtgacacgtgcctgtaatcccagctacttgggaggctgaggcaggagaatcacttgaaccagggaggtggaggctgcactagccgagatggtgccactgcactccagactgggcaacagagtgagactctgtctcaaaaaataaataaataaaataaataaagttcatactgatgagtatttttaaaaaagtaaatagatattgcagaggtgttaatgatggtaacgatgtttagaaaattctaacataatttaaattaattgaatgcttataaaaccttttgtttttggtgctactttataaccatcaatcatgtgctaaatattatctttatatatgaagagataaagattttgttcaggaccccacagcctggtggtgagctgggtctagattttactgttctatttatttatttagctaactagttacttagtttccaggattctttaacctgcttcatatttatttatttttaaaaacagggtcttgccatgttgccaaggctgatcttgaacttctgggctcaggtggtctttccatcttggcctcccaaagtgctgggattacaggtgtgagccaccatgcctggcccaaatttaatattctttctacattgagttcctcttacttcttagcataaattgatggatatgttctatttcagtagtaattttaataccacgtattgttttgcacattgaaatgttaaataattgcaggcctctttttaaagtctttaggaagctttattcagtatcaaaaaacagacacatggagaattgactgaattattctttatttatttatttttttgagagtcttgctctgtcgtccaggctggagtgcagttgtgtgatcttggctcactgcaacctctgcctcctgggttcaagcgattcttgtgcctcagcctctcaagtagctgggactacaggtgcacagcaccacgcctgggtgatttttgttatttttagtagagacagagtttcaccatgttggccaggctggtcttgaactcctcacctcaagtgatccacgatctcggcctcccaaagtgctgggattacagacaggggccactgcatctggccatctttattctttatataggacaagccttctcaactatgttaaaaaataaaaggaatatgtgcgtctggtttaaaaaacaagccatggaggatatgcaaagtttttacttctaactcagttagacttctcagacccagagaggtttcctttgtaaacttccaattttttgttttgttttgttttttgttttttgagacagagtttttgctcttgtcgcccagactggagtgcaatggcacgatcttagctcactgaagcctccacctctcgggttcaagcagttctcctgcctcagcttcccgagtagctgggattacaggagcccactgccatgctcagctaatttttgtatttttagtagagatgaggtttcaccatgttggccaggatggtcttgaactcctgacctcaggtgatccacctgcctcaggctcccaatgtgatgggattacaggtgtgagccaccgtgcccgacccaaaatattttaatgcatgttttttgcctataggtctctgtgtgtgtataggtgatatagatagcatatttacctcattttaaacagctgcataaatattcctattgcatagaattgtaacaacatactgactaatacactacagatggatattgtttaaccaaagtgatttttttaatacaacaaacagtgctctagtgagtatctttgtaaatgtgtaccttgatgaggtgtttttataggatatattcctggaaggagaattactgggtcaaggatatgtatactatgtttattgatattgctctttcctcccaaagagatttgacaaatttattcttccagcagcaatatatgagtttacctgtttcctgttatctttgccaatagtaggtttatcagcctttaactgtcacccctctaaagggcatggcattttatagttgttttgattttcattttgtgtgacattgagcatctttttatatatttgtaagtaatttgttttatatttctgtaaactgcctttttatctcttttgactatttttctattgaatttgtctttctaactactgaattgtagcagtgcttagtatattaaggagattggttcattgtcatgtggttattttaggcaaatttttaatgcaaattaatttttcctagctattgcaattatccttaggttattttttaatgacttctttttattcgattttatgtcagaatattatagtattggttattagctttcaacttacaccaaatttgagcagattggtaatattaatagctacagttaatcaggtacttattttctgtaatttactggcattttacataagttatctctaaaagtgattccttttttgaaggaacaaaaaaaaaaaaattaaggcttagacagcttagtaacttgcccaagattactcagctagtaaatgacagatacaagatttgaacaaaggttggactccaaaacttgtgttatttctgctatactggtggagagtttggtgaagaagtggatatagtagcaagaaataagtaggagcgaaggaagagtgaggaaactataaaatgaaaagaactcaaagtttagctttttgggtttctttggatttgaagtggcctgtagaatccgtattctagaggcaaaaacttccatagccttacatatttctctttcaagtttcgtagatgacattgattccctaagaaaatattaaatcgtagccacttgttatcttttctctgtgtaagaaagcagggaagtatgtaatttattttacaaagtttccatactaaatatttaatgggaaatttatctaacagtctatggaattttataccaggtgttttaaaataggttatttcctttaatccccaaaaccgttcagttattaggtgatattatttccatttgtagataaatacttaggattcaaagattgaggccaaggtcggacagtgagtaaatgaaagtaggacttaagccaagtttgtcagactccaaagcccataccctttcttttctatcatattgcgtcattaaagtttaaaacaagaacaaaaacaaagatagctgaagtaatcagtttgtatcagggctgaattaactctatgaaacccctcattacttgatggtaaatgagaagattccgtttttcgatagcagtggaaggcaaagtaatttaaaccaagatcattgcattaaatttggatgtaactattagaggttgaaaaagcatagaaacactgagaggttgtatgaagagttgaagtaacttaagaaaaaaagaaacttgtttaaaatttgccttacaagtttcatttcctttttgttataaatcaagaaattatcagctaggcgtggtgactcacacatgtaatcccagcactttgggaggccgagctggatggatcatgaggtcatgaggtcaggagatcgagaccatcctggctaacacggtgaaaccccgtctctactaaaaatacaaaaaattagccaggcgtggtagcaggcgcctgtagtcccagctatttgggaggctgaggcaggggaatggcgtgaacccaggaggtggagcttgcagttagccgagattgcgccactgcactccagcctgggcgacagagtgagactccgtctcaaaaaaaaaaaaaaatcaagaaattatcttatttttaaataacgaaaaagctgcggagtatatactgttttgatacttttttgatgttgcctgaatttttttggaaaaagttaaatgtttctcctaaaagtgaaatatatcagattacttgagaaggtctagaactgataaagaaatgaaagtgatatacctgactaaatggaccattaaaaatggttagggtaataatgttaattcaaactggttagctggtctttagttactgtaaattcttaagtcaaaagtcagaaagataaaacgttaaagaaatctgtaagaaaatgacttcacataattttgggaggataaagtaaaagaaattttgacattctgttggacgttttataactcaaaagctaatattggaaaatcaaaaaacatgaattttataatcgcttggtctttatctttagaaaagattcttaatgtagcaaatgaaaaatgcaattccactgatttctttctgaaaagaacattaagtaatgttgcaactcttagctttaaaacaaaataataagacatttataataagtatgcttttgaaagttctcagcataactggagggaaaaatcataactgagaatgtgtgggaagatatgttttaggatagcagaagaaaatgttccaaggatttacgaaataatgttctattgtcttttccctttgaccattaaaaaaccacaagcaaactaaaattaccttgttatgctcaaaaagttaaaaatatttgttgccatggagatagtcccagtctagatttctttccggtagtttaaagacttttgcaatcccatggggaagtaatatattttcagtacaacagctgacaaaatttgtttctgtgggtgagatgaataatatacctttctttgtctttggtgttcatggacacattgaaagactataaataatacttgagaaagtcttgctcaccactcctagttttcatgtaaggatggaaagtcatagaaaacaaaaagaatagtaagccaattaaagaactggactgaaactcaacaaaaagaatagtaagcccactaaagaactgaagtgtataccccctcccctctcctcccctcccttcccctcccctcccttcccctcccttccccttcccttcccctctcttccccctccccttcccctctcctccccctctcctcccctctcctccccctctcctcccctcccctcccctcccctcccctcttttcctgtcttctggtgccaatggagtctatattctaatgtctgtcttagataccttgtatttattttcctaactgtaattgtgggttacttttttgcaagatatgttgttttgaggaggaaaaaaagcacgagtactttttttttttcttattttgagcgggagtctcgcgctgtcaaccaggctggcgatctcggctcacagcaggctccgcctcccgggttcactccattctcctgcctcagcctcccaagtagctgggactataggcacccgccaccatgcctggctaatttttgtatttttagtagagatggggtttcgctgtgttagccaggatggtctcgatctcctgacctcgtgatccgcccagctcaacctcccaaagtgctgggattacaggcgtgagccactacgcacggccgcatgagtacttttaaatatagaaagcagcatttattaattttgcacagcaataagaattttctcatagtccacccagcttgatagagacagcatagtacagggttttgaaataaaccaggtttatttcccagtttcaccatttactagctgtgtaactttgagtaggttgattagcttccaagcctcaatttgtacttgtgtgaagtggggataatagatgcatagtacctaacaccaagtaggtgttcaataaatggtatataataggattagtttttgataataatttttttagataatcaggattccaacttaactacgcagtcatgtgtgtttccttattcttcagtgttttccaggagagatgaatgtataagttctttgaatatctttaccctagtgtgagtttattgtgatctgctgtttttatagctaaataaattagttcatttgtcgttacaggagatatattgctctaagtacctaataagactttagttgtaacttgcatagtgttttattaatgtcaatgcttctggctttttaagaaagtttaattatgtgaaaatgagacttaaaatttgtgtgcttagagtaaaatatgaatgcatttttcttcaggcattttaaattatacctgacatcaagtactgaacgtttttcacaaaatttcaaggtcgtggtggtggatggtaaaaacgaaagcgagtacactgtaaaatggcaggacttcttcactggacacgtggttggttagtatggagcttgttggtttgcccctgtgtctggtgtattaggtctccaaatctaacttgattgcatattcttttctggtgcaggatagtggggacggggtgtcatagaagtgctattctttgacttttctttgaggtatataagtttagaggcaggaacattctaatagaaggaaatgagtattatctaaatgtcatactagctggctggtttaatgattaaaattaaattcttcttaagtgataggaatttaacctttcttttcctcagtgactgtaagctttctttatgatattttaaacagggaagcttggagataaaatacttggtgatcctattacgtatgtatttgagaaaatttatcaaacaagcaattgcagtttactttttgacctttttctgcaatgagaaaaaaaaatgtcattgaaatccacaaatagtatagttcctaggcctgtacattctaaatcatgctttctgtctctcttagttcttcctttacctagaagtagataaaattattccagaagaaaatcttagcagttttgtttgttttgggaaagggataggtttcaagtgactaaacttgaggctaccccttaggagttgagattatctagcttctttctggagcctttgtttcttgttttgcagagctctcacagtactaggcaaattccaccctgaaggatttaatttttattgagagtaatgcatagtttcttatttgatgtaagtatttttaaataataattttttttttctcttaaggtgagcctgactctagggttctagcccacataagagatgatgatgttataatcagaatcaacacagatggggccgaatataacatagaggtaaatttatatgtgaattttttttcagtagcttatatctctgattttcaaaaagctgctcagttctgcaaaggtgaaaagtaattatacttatttctttcctcttcgtatttgaagttttttactaggaaagtagactttttaaaaaaggataatctctaagaagctgtgttatgatacaccctgtatttctaagtaccataattgagagagttacatgtgggatggataataggaagagaaaactttctttccctcctgactcattttttaattctttctcaaataataaatgtaaacatcctcagaaatgaaaagtgaagtattatttttcaatttctctgtttttctgctagacacactggaaatgctagatcaatgaaaggtggtagttcatagtctgagaagttaaagaggaagctaggaaagtcaggctgtggtcactcttccattgaaagagtagcaatagaaatcaagaccacagtggctgcattggttaagacacatatctatctgtcagatattagtctacaaaacaaaacgtttcctcataattgtgaattgaagttgattctgtgtttcctgaaaaatgagaagactctgggtggtggtggtgatatcactaaaatagatcacctgtgggaaaactgagtaagattggtcaaaatgaaatgttcaggtgtatttgagtgcttaataggggtaaaacagtctgctggagctatatatactatatgttttaattatatccaatctacatgactgttagtcctttgactgtccattattgtgaaaaagaaacctatggccttgcagtatgttatagtttgttaatgtttaagctatttaatgtcaatgttttgaggagtctggcctaccagaaagagtcagaaatttagtagaaagtaaaggaactaatattataaatgcattcattctagaataggcaaagcatcactggaatgtcttaaatttgcctgttctttcaaatcaatttattttttaagaatacctttattttaaaatatatgctcattgcaaaattcggaaaatagattatctgtacttggacagataactactattgacattttgacagacatccttccaaatttttttttctatgtgtaaatacacaaataaatatagttatacccactattttttcctgcaaaactaggaccatacaatatgtacagtttgtcttcacacatttttcgtttaacaatatgattatgaaccttttcgtgttaatatagatctaaattagggttttgtttgtttgtttgtttgttttttgagacggagtcttgctctgtcacccaggctagagtgcaatggcgtgatcttggctcactataacctctgcctccccggttcaggcgattctcctgccttagcctcccaagtagctgggactgcaggtgtgcgccatgatgtccggctaattttttttcttttttttgagatggagtatcactctgtcactcaggctagagtgcactggcgtggtctcggctcactgcaacctctggctcctgggttcaggcggttctcccgccttagacccttgagtagctcagactacaggcacatgctacctcacctggctaatttttgtatttttagtagagacggggtttcaccatgttggccaggatggtctcgatctcctgacctcatgatctgccagcctcggcctctgaaaagtgctgggattataggcgtgagccactgtgcctggcctcaactgttttgtttctaacttttgaaataaaaggtattgtagtgaacagccttgggcacaccttttggtgcatgtgtttagttggaatagtctggatgataggtaatagtctgggaagttaaatgaagaaactgtaggaagctctgtctaggctgtgcgagggcttcagataaactcccatagctgagtagcttaacacaagcaaagttttttcttactctcctgtggcttgatgtgggttaggtggttctcctctactttgtggctttgacttttggacacatgtcctctgtagttctcacagaaagaaaacagagctagagaattatacaggatattaagggccaggcttggaaatggccttccgttcaatacattctagaacactttatctctgacctgctacaaaggagaatggaaaagatagtcgtaatttgagctcagaaagagaaaatagtgtggtaaatgcacagcattgtttttgctgcagtgcatatgtctgcttatttccttagaataatttattcttttttgtttttttgagactgagtctcactctgttaccaggctggagtgcagtggcgtgatctcagctcactgcagactctgcctcctgggttcaagccattctcctgcctcagcctcccgagtagctgggattacaggtgcgcaccaccacacccagctaatttttgtatttttggtagagacagggtttcacaatgttggccaggatggtctcgatctcctgacctcatgatctgccagcctcggcctctgaaagtgctgagattaaaggcgtgagccactgtgcctggccagcttattaattcttaagccaaaatatgtgtctttaggatccaagttaaatttgctcagattacatttttttttttttaagatggcatctcgccctgtcacccagactggagtgcaatggcgcgatctcggctcaccacatcctctgcctcccaggttaaagcgattctcctgcctcagtcccttgagtagctggaattacaggcgtgtgccaccatgccccgttaatttttgtagttttagtagagatggggtttcactgtgttggccaggctggtcttgaactcctgacctcgtgatctgcccatcttggcctcccaaagtgctgagattataggcatgagccaccacgcccagctagattactcatttttttcaaatacttccttttggaaaaataggaattctgtttccatccatacctttgtttcactaagtacaaaaatgagtataactaatatttcattgtaagatatttacttagccaggcacagtggctcacacttgtaatcagcactttgggaggctgaggcgggtggactgcttgagcccaggaatttgagaccagcccaggcaatatagggagaccttgtctctactcctccacaaaaaaaaaaaaaaaaaaaaaattagctgggcatggtggcacatgcctgtggtctcagctacttagaatgctgaagcagtaggatcagttgaattcggaaggcggagactgcagtgagctgagattgtactgctgcactccagcctgggtgacagagcgagaccctatctcacacatacacacacacaaagatgtttacttacaagtatactcatcagataccttgagggacttttgcatgaaattaataatgtttattgaaaaaatgatttactacttacaggggtgattttcatactctttataattcttttgatacttttatagttcataagtgtggtgattggctgttcacacacacatatgagatgtaccaccctagaaccttgttacaatgttagcacattaccagtctgacatgaaaaaaaataattctttacacttaccttgatgcaaaaacattgtctatctgcactaatatcttaggaatataagtgagcaggaaaaaatatatatcttatttttaacacatcatcattaaatattttgtttatgacagtcttacttggtcactcaggctgaagtgcagtggtgccatcatagctcactgcagccttgacctcctgggctcaaacaatccctcttttctgcctcctgagtagctgggactacaggtgcatgccaccatgcccaactaatttgttaaatttttgtagagtgtatcagatttttgatgaggtctcactgtgttgcccaggctgatctcaaatgtctgactgtaagcaatcctcttgcttggcctcccaaagtgctgggattacaggtgtgagccactgtgcgcagccgttaaatattttaaaccgtcactgactttaccatagcttactatttatataaataatcctgggttaaacttgcatagtgagataatatttcccccaacttttatttatttatttgagatggagtcttgctctgtcgcccaggctggagtgcagtggcgcaatctcggctcactgcagtctccgcctcccaggttcaagcatttctcctgcctcagcctcccaagtagctgggattacaggcacacgccactgtgcccggctagtttttatatttttggtagagacagggttttgccacgttggccaggctggtcttgaactcctggtctcaggtgatccacccgcgtcggcctcccaaggtgctgggattacaggcatgagccactgcatccggcctaatttttgtatttttagtagagacggggtttcaccatgttagtgaggctggtcttgaacttctgaccttgtgatctgcccacctcggcctcccaaagtgctgggatgacagacgtgagccaccatgcttggcctcccccagcttctagttttaaaaatgttcagctggtgcagtggctcatgcctgtcatcccagcactttgggaagctgaggtgggtggatcacttcaggccaggagttcgaggccagcctggccaacatggtgaaacctcgtctctactaaaaatacaaaaattagccaggcttggtggcttgcgcccgtaatcccaactgctcgggaggcctaggtgggagaatcgcttgaacctgggagacagaggttgcagtgagctgagatcgctccactgtactccaatgtgggtgacagggtgaaactctgtctcagaaaaaaataaaaaagaaaatgtgcaaatctacagaaagattaaaaagtaccctgtagttacagaaagatttttttaaaaaataccctgtagcccttaaacaatttctaacataatgtcctgttagctttctctctttttttcgtgaatcatatgaaaatcatttgcaaacatcatgacccttcacccctaaatacttctgtatgcatccttaggaataaaggcactcttttctatagctgtaataaaagtaacatacctgagaaaatgacaagaattctacaatattatctaataatcatgccatagtcaaaatctctagtcatcctcaaaatctcctttgtagattttttttggttttccagtccaggatccaatccagttttctgccttttagtcaattactcatcaaattattttttccagcaacttactagtaataatggtaatagccttagcttttattaataacaaccacttttcttttgaaatgttaatataaaactagatttattacctacataatcttcataatcttcaagttaggtattatcactactttacctaatgagggaggttatgctcagggtacttgtccaaggcacatagtgaggtatggttgaggtttgaactcagatatatctgatcccaaagccagctgtctttttctgtgctggactgactatactaggaaacaatcaatgtgaacttagaaatgtttgacccaaaagaaaaaaaatttcactcctattcataggctaaatgaactttactaaatatggaagattcctgtagcccggaagttgggttagttaacttttgagatctctgccaaccctgaaattctgtaacccttgtttcttacatctgcctcatacatggattaccaaagatgtatatgcatataatatttaacagttttattgagataaaattcacatactatattattcacccacttaatgtatacaattttgtagttttgtgtgtgtgtgtgtgtgtgtgtatttttgagatggagtctcactctgtcacccaggctggagtgcagtggcacgatcactgcaacctctgcctcctgggttcaagtgattctgtggcctcagcctgttgagtagctgggattacaggcgcccaccaccatgcccggctgatttttgtgtttcagtagagatggggtttcaccgtgttggtcaggctgttctcgaactcctggactcaagttatctgcccaccatggcctccccaaagtgctgagattacaggcgtgagccatcgcgcccggcagttttcgtatattgatggagttgtgcaaacaccacctcattcaattttagaacatttttatcacctgaaaaagaaacgctgtatcctttagccatacttcccccttcctccctaactcccccagctctaggcaaccagggatctactgtctatttagatttgtctgtttgggtcatctcatataaatggaattacataacatgtcttttgtgtgtggcttcaatttttttatttttttgagatggagtcttgctctgtcacccaggctggagtgcagtggcatgatctcagctcactgcaacttttgcctcctgggttcaactgattctcttgcctcagcctcccaggtagctgggattacaggctcctgccaccatgcctgactaatttttgtattttttactagagtcggggtttcactatgttggccaggctgttctcaaactcctgacctcaagtgatccacctgcctcggcctcccgaagtgctgggattaaagacatgagccaccacgcccagcctgtgtgtggcttctttcacttagaataatgtttccaaggttcatctgtgttgtagcatgtatctgtatcttatttatttttattgctgaatagtattccattgtatggataaactgcattttgtttattcattgattagttgttgatggacatttgggttgtttccactttttagctatatttacattactgcttgtgttttcatttctcttggttatatactaggagcagaattgctgggtcatatggtacttctacttttaacctttgaggacctgccagactgttttctaaagtggttttaccattttacattctcatcagcatatgtgagggttctggatttctctacatcctcaccagtatttgtctttgatcatagtcatcctagtgggtatacaggggtgtctcattgtgggggtttttttccccattggggttttgatttgcatttccctgatggagataaatatattttttgtgtgtccccccacaaactgcctggttctgatgagaccagtgttcttacagagaataactttgctttgaaacaaaacaaacaaacagccttttgacttgggtaacctttggagtatgttaattgtgatttactctggccttgtaacattgtaagtggagattttgtttaaaaactgcgttcgctgaaacaagtaataaggttcagacctattgttacaagttctgagttttctttcatataaatatgtttgttcttttgtgtggataaaacctaacgtggcaaaaaggtgtcaaacacctaagtattaaggaaactaaaatgaaaatgctgcatgaacagaaaccttgtccaattttcattactatagcaccatcacctataacagtgccagtgtacagtagatattacataatatttttgaatgaatgagtggaaaatgatatgcatttttctcttctgcatcctctgaaagatttcacaacgtgcaaagtatgtaaggctttatttatatacagataaaataatcagagtttataatctatgtatttactttcctgcatagaaactccatatgattaaaaattgagattatttattttaataacatgactaatcagtttacttaacctagaaatgaatgttatctaagaacaagcaaagaatgttagaagaatttagtgtttaggaattattattgttttccatctcagtcgtatatattttctgttttagccactttggagatttgttaatgataccaaagacaaaagaatgttagtttataaatctgaagatatcaagaatgtttcacgtttgcagtctccaaaagtgtgtggttatttaaaagtggataatgaagagttgctcccaaaagggttagtagacagagaaccacctgaaggtaagacttaaagagtgtatttcaaataagaaacaaacatactacaattgacttcagtaggggtggttgttatttgttaaaaaataacatgattgtcaagtaactatagtatttggcatgaaaataagaggtttgttccagaaattttcatcttcttttgtttataatgtaagagttgaaaactctggaaaataatgggaacaacagagattagactttaaaaaagattagggaaaagggaaatggagtgatctgagggaaaatattcctgcagatatttagaaatgataaaataatatggtggaaagacaatctttagagtttataagaaattaattggtagtaggagggacctatatatatactgcttagaatacaagaaggttatatccatcttgggacaatccatttagggtcatttaaaaaacgtaaccatcttggaattttactgcccaaaacacctctggttaggttttttgttttgttttgttttgttttgtttgcagcgcgatctcggctcactgcaacctttgacttccaggttcaggtgattctcctgcctcagactcctgagtagctggattataggcatgtgccaccaggcctggctaatttttgtatttttagtggagatggggtttcaccatgttggtcaggctgttctcaaactcctggcctcaagtgatctgcccacctcagcctcccaaagtgttgggattacaggcgtgcaccaacatgcccggccaaagacggttatgttattaaaattatatattagcattttaatatataaataaagaaattcttaatttatttcacaagaaagttgtcctattaaactaattttcaatgtgaatatcttgacatttttactgttacattggttaattcataaacttcttgttgtagaatatgactgacagcttcatagcccagcattaggtgactgttttactctgttgagcactatttatttatttatttatttagagatgaagtctcacttttgtcgccctggcttgagtgcaatggcacaatcttggctcactgcaacctccgcaccctgggttgaagtgattctcctgcctcagccttacaagtagctgggattacaggcgggtgccaccatatctggctaatttttgtatttttaatagagatggggtttcatcatgttggccaggctggtctcgaactcccgtcctcaggtgattcacccaccttggcctcgcaaagtgctgggattacaggcctgagccaacatgcccggccttactctgttgagcactttttaaagtttctgtattggaaaaattaaagaggcacttgtccttggttttgaattctacagtgttttaactttatgttacttttcacttttctgtcttcctccaaattattttttgttgttgttcagaatcctttagtgatattaagctcacataatgtttgtttcaaaaatatgttagatttaaagtgttaccataaaactccttgttttggtgaattttgatttaatagtgcatacaaattcatattagagcttgttcatcgagtgaaaagaagagctgacccagatcccatgaagaacacgtgtaaattattggtggtagcagatcatcgcttctacagatacatgggcagaggggaagagagtacaactacaaattacttagtaagtatttgatattgcatcgagtaattgaaaaaaaaatttgggtgggtacattccatgaaacttaatgcaaccagatctgttccagatactctgttatttccctaaaatatttgagggatattctctgaggtttttatgttactgtatggaaattatagtttcaaatttgtgacaacccattttacccttgaactaatattttctgcatgttagaatttatgcatatagggtttgggagaggttataatgtagtccttcctccttgatataagtgagttctttaaaaacatcactgctatcatggtagtgaacctgtggtgtcacatgtgaatgtaaaaatatgtatttgcatgaacccatgtttttcttttgcttatatgtatatttcagagaggaaggcgagttttgtttgtcatgttaaagacctaatcattggacttcacttgaaataggtgggactttcatggtcataactagttctagggcacagaagtgaaggaaagatgtaagaagtgatgatactggatttttaagtatgaactattatgatttttgaagtctggggaatcatttttcattgacattttttgctagtgtgacttcattcgtcatgattacttggcactgaccaaaatgttgttactgagggaataatggagaatgcagctattcatgaagcaagaagaagctggtgcagtaaagatgtctttctcattgccttgcttttcccatgctgtccattttattcataccctcccaacttctttcccttccctttcatgtcaagtggatttttttttttttttttcaacacagagtctcactgtgtcgcccaggctggagtgcagtggcacaatctcagctcactgcaacccccacctcctgggttcaagcaattctcctgcctcagcatcacaagtagctggaattacaggcgtgaaccacagcactcggccccatatcaagtgaatttattatgaggctagtaagagtcactgtgattcttgttcctaaataagagagatttttactttaaaaagcttctctcttaatctgggttttatattaaggggctcctcttattttacttctttgttcattgcactataaatatgaatataatgagagatctagtcttaaaaattgtatttttttacaacttcttaggcataacttgtttcacagttgctagaacaaacctcatcaacccagtttttgaacagtagaatattctctttgagaaaaagataggtaattagcattttgttctttctcatgtcattttccttggaaactatactgccttccttctccagttttcccaaatcagagaacaaaagaaggagggttgctgaaatgaaccttgttctttctggctgtcttcttacccattcctcagtgctgaactttttggggtgagagtgggggaatagggttggcagttgtctgccacggccccttacttgtttctggggaagacattcgaggtactcaccaagagatagagtgaagatggaattctttttagaagggaatacagttgacccaggaacagtgcgggggtgtggttagaagcactgaccttcttccctctgcagtcgaaaatcctcacgtgactttttttttttaaggctctgtcgcccaggccggagtgcagtggtgaaatcatagcttgctgcagcctctattgcccgggccaaagcaatcttcccacctcagcctcctctagctgggacaacaggtgttcacccttcctggctaagttttttgatttttagtagagatggagaatttcccaggatggtctcaaacttctaagcttaagcaatcctcctgcctcagcctcccaaggtgctgggattacaggcatgagccactatgcccggccactgtataactttgattctccaaaaatttaactactaatagtctactgttgaccagaagccttaccaataaaataagttgattaacacatttttaaaatatgtattattactgtgttcttacaatcaagtaagctagagaaaggaaaatgttatgatgaaaatcataaaaaaaaaaaaaagcccggcatggtggtgtgtgcctgtagtcttctgttactcaggaggctgaggtgagaggattgcttgagtccagaaattcaggctgtagtgagctatgatcgtgccgctgtactgcacccctggtgacagagcaagaccttgtctcttgaaaaaaaaaaaagaaaatcataaggaagagaaaaatacatttactattcactaagtggaagtggatcatcataatggtcttcatgttgagtaggctgaggaggaagaggaagagttgatcatattgtctctggtgacagaggctcaaggaaatccatatgtaagtggacacttgaagttcaaatctgttgttcaagggtcaactgtatttcaggtatactgattgacttttaaatttaatttttattattggctgaaacggtagttttaaaaaagcctgttacttgtcattttggttccatgtgcaattgagtacctgaaatttaggttaaactataccattgttttattctggtaacagcactttaagtttggggccaaaggttgggaatactctgatacagtaacatctcaatgctagtttttgcgaaagtagaaacttttgcaatggcctctaaactgagattttttctttccccatagattttatattgcattgccaggagaggtaaagagttacataatgtcttttttcttttttaaatacacacagatagagctaattgacagagttgatgacatctatcggaacacttcatgggataatgcaggttttaaaggctatggaatacagatagagcaggtatttatcaatagatatggcttatattacttaagttttgtaatgtaaatatttgtcacttgtattcaaaacctaaaaacttgtccttaacaataattgtaaataagttttctcagatgccaatgattttttatgatgaattgtgcagtatttttgatgttaattagttctagattgtgaagttttctgtccttagtctcgctttaggtagaaagccttttatgctgctgtgctttgttccttctttgaattcatggcctttatattctctgtagttttcttcccccctccgattatgcttaagtctttagttaaaactctggcatgcaccattgaatccttagtcagaaaatttactaaaaaatactgtgtacctttgcaaggctgtatttatatatacagaacctttaggttctttcctctcagatatctccttctgatttcttgtaatctgttaacagagtgtgtctagtaatgttatattaatgtcatcttaataatagctcatattaaaagttatttcaaattgctaggactaattaaaaaggcttctgacaaagggtattgctttgggcagagagacattttgatatgtaaattatataaattgttatctctatttttttccaagctttttgtagtaaaccatatttttataagttatatagtatagaatttagaggttgaaaaaatttttaaaaatcattcaccatgtttataaatgttaaactttgatattacttgtataaaactaagagaattatttttcccttttcattctctttcactgttacgcattttctttttaagttattatttgaataggtaacatgtacacagtacaaaagccagtgaaaagtaagtctctgcagcctgtttattgtcaaaccagttcctttccccaaagacattcatgtcactagtttcatatgtatctttctagagatgtcgtatgcaggtatagtgtatgtatatgtctgtatttgacacaacggtgctatgcagtacacttttacaccttgctttttcatttcacagtatgttggagagtacttcatgttcatgcatgtaaagctgcttcacttgttttattataaatagctgcatcatgtttgagtttcagggaacctgtaaattttctttttgctttaggcatttggaaccagtcgaagaaacaggaataatataggagattaaaacattaacttctttacatctgatgaaggatggattggagggtgtggtttagatgtgtatcatggtgggcttctaagtagttctatcccagatttgaccttgaccagccaccatcaaaactgcagagtccaccccagtaaacttaccacacagtggcagaggagaccagaatgggccttctctgcaggcaggcaggcaggcaggcaggcagagagactcacagaaactctgagctgagcatggtttccttctttatctcacacttactaatgggagcctttgttacttttttttttcttctttgcaggtttaatatgaatttgtctgaaatgcctgtataaggagaagactctattcttagccttttattcctttgatgcacaaagagatgtatattttattattctttcctgagttgtcgactgtagtcgtaataaatattttaggctcctgtaacccaagttcttattttttcaaaataaacatggaggatatgaaaatttaagagtacatttataatattataaataattcattgacatatgttttccataccatatgcttctctgtttgtttcaaacattgaatattggtactgaagaatttatgaattttggttttaaaatgttttttttctagaacgattctttttttgaacagataaaataatgcagtattcagagccttctgacttattttggaagtgttctaagtatatgatctctttaagtatagattcgcattctcaagtctccacaagaggtaaaacctggtgaaaagcactacaacatggcaaaaagttacccaaatgaagaaaaggatgcttgggatgtgaagatgttgctagaggtaggtcttagaatcctggatatggtgctaacaccactttgtcatttctgatatgtggattgtatgtgttttaatgaaggagcatgttagaaaagatggacacccagaagcagtctcctccagctgatccagcagtaaccccatcccatgtagcagcatagacaacaaataacaaaaactctatgaaaaagaaaaacgctataaagcaatgcttccttttttttttttttttttttttgagacagagtttcactcttgttgccctggctggagggcaatggcgtgatcttggctcaccgcaacctccatctcccaggttcaagagattctcctgcctcagcctcccaagtagctaggattataggcatgcaccaccacggccggctaatttttgtatttttagtagagacagggtttctccatgttggtcaggctggtcttgaactcccgacctcagatgatccgtctgcctcggcctcccaaagtgctgggattacaagtgtgagccaccatgcccggccaaagcagtgcgtcttaaccttaatatctttgaggatctaatgagacaatcagtggatcttctctagaaaataacatggatacccaatatatagagtttttgcacactgtttcattagttctgcacacttagttcagctctctctgaagcttatcaatttatcttttagggcagtaattatcaaacaggttatgaacatgtattggagagtagaaatatagcttggagatctgaaagttctctacaggaatttaaaatttttgtgtttttattctggcgattaatctaaagatggctaacttaatcattttatgtcatttggagtcttgccgtataacagggtgctgccatgtgattccagtgtcttgagtttgtgtgtgctattactttggtgtagaatgactttatatgaagcgatagtttttatcttttaatgtgttggcaagtttattagtttcttgttgttgctttaattatcacaagtggagcagcttagaacaacacttatttatcccatagtttgcatgggctagtccaggtatggtgtggctcatctggattcttgtttagggtctcatgaggctgaaatcaagttttcaaagcttcaatagaattaaaggatattataactattcatccagatggagaagcataatgtgcagcacctgtgtggtactcattcataccttgtctaatttgatctgctgagcaccctgagaggttggttgagacagcatccttgtgaggaggctcagcaagtgttactgtttattccagctgacatgacaaagcagcataggctgggggacttaaacaacagaagtttgggttttcacagttctggaagctggaagtccaaaatcaaggggtcagcagggttgatttcttctgaggccaaggtacttgtggtgtagatgctgtcttctccctgtgttctcacatggtccttccctcagtgtgtgtgtatattctgatctccttatcaggacaccagccatattggattaaggcccacccatatgacctcagtgtaccttaattacctccttaagggccctgtttccagatagagtcacattctggggtactgttgagggttaggacttcaacatttgaattgtggggtggcacaattcagccagtagcaggaagattaaatgacttgtctgattagtcatacaactggtgatggcagaggttgaattgagcacagatctcctgactcctagaacagctgaaccactgcgcctgtctgcttttctgtgagcctccagacagcccatggcaggggaggaaccaaagagaaaaatgacttatgttgacagatggtcctctccagttttcttccctaagcctcctagaatattcttagaagcctcatccttttaccacggaactatcagaatccccatgtaaccacacttcattcctcatatagggctctctggcctctcatttaaagcattttaaacattgagggttttggctaggcatggtggttcatgcctgtaatcccagcactttgggaggctgaggatgaggcagtggattgtttgagcccaggagttcaaggctagcttgggcaacatgttgtacaaaaaatacaaaaattagccgggcatggtgaggcacgcctttggtaccagcttcttgggaggctgaggtgggaggttcacttgagcctgggaggtcgaggctgcagtgagctgtgattgcgtcactgcattccagcctaggtgacacagcgagaccctgtctcaagcaaaataaatcaaaccccccccccaaattaaggtttttttaaacttggagacgctggacggttatggtagaggtttttaaagtaatgtatgaagcccttttaaattaagaaaaaaaaaatcctctcaaacctgcagtgttgatttaaatggatgtaaaatctttattttagtaacataaaactgggtatgtatgcttttctataagtgtatatttatataaatgacaatatattatgaagctcaaaaaagtttaagattaaaatttctataaaaccaattgaatccttgaaatacttgagagggatctgttttggcctggagtgctgcaatccccttatcgaattggagcatctctagtcctgggctgtatgtcttcagaacagccctcggaggagcagtgagttagttctgaagagctggagcaagctcccgaactattcccttttgtgtcccttgtcagatgacagtgtgtgcctctcacctgtgcaggtggagaagcactttagggaaagagcaaagcactgcacgaggttgtgattgctggtgctgagctgcatgccatcatagttctgttctggaatgtttagttgatttagattacatcttttagtctgatgtaattgttaatctaagaatgcttttttttttttttttttttttggtctttcaaagcaatttagctttgatatagctgaggaagcatctaaagtttgcttggcacaccttttcacataccaagattttgatatgggaactcttggattagcttatgttggctctcccagagcaaacagccatggaggtgtttgtccaaagggtaagtttttccatttcttgtgtgaatatgctgctgggattattaagatgattggattatattataattctgtatttaataagcaatttatctctgtttccttttgactttagcttattatagcccagttgggaagaaaaatatctatttgaatagtggtttgacgagcacaaagaattatggtaaaaccatccttacaaaggtatgttcttttatttctaaaagaatagtgttagagtttattgtagtagaacctcagttatatatttatgtaggtatttttttaaaaaatgtaatatatactgttttttaaatttctgcctaaataaaatttatgtatttttgtgggatatatgaaaattaaagcataaagaagaaaataaaaatggcctgtcagccttcttttgaaacatgtgaggaccactgcttttctcgaaccctctgtcctggacccctctgacctgcagcaactcttagagctccctgtctcctagtcctgcagtgcagctgtcattcaaggcatcccacaccctcttattttcagaaccccatggtctccctctttctcagtgccatcattttggtgtagtgtatcttgcaggagcttcctaagaaaacgtagatgacctgcatattgttgggatttcatatatctgaaaatgtctttattccactcttaagcctgattgataattttggctgagtatattcttagttctcatgttctctatggtcttctgtgcatgttgcttctaaagaatctgaagtcattttgagttcttatctttgtttgtcacctgtttttttctctggaatatcttaagatcttgtttttctccagctatgtctgttaaaatgtgtttgactacaaataacagaaaattaaataagcagtggtttaaataaggggtttatttgtctcagtcaacaagaagttcagggatagcattttctgggtggtacagcaactcagaggtaccctcagtggctcaagaacaagcaggaagtctttgtcctcatggatgtcacctcatggttttaagatggttctcttctgtgttggagaaaggaggagaaagagaacatggctagcctagtctggcccttctaaaaagcttctctggaggccccatcctggcttttgtttatatgttactggacagcactgggtcccgtggctgcccttagcctcaacggaatgtggaaagctggctattttagctgagtatattgctgtcctgggcaaaattagggctcattaagtaaggaagaaggggagagagatgttggtaggacatattagtatctgatatactgatttttaatttttatttaatttttattttttttgagacagagtcttgctctgtggcccagtctggagggcagtggcaccatcttggctcactgtaacctctgccttctgggttcaagcagttctcctgcttcaacctcctgagtagttgggattacaagcacctgtcaccacgcctggctaatttttgtatttttgttttagagacagggtttcaccatgttggccaggctggtctcatgaacccctgacctcaagtgatccactcaccttggcttcctaaagggctggttggtatactgattttttgactatgatgttatacttggtgtagggtatgggaaaacatttgcaaaagacacatctgagaaaagactgctatctgaaatatacaaagaggccgggcatggtggctcattcctataatcttcggcactttgggaggccgaggcaggagaatcacttgagcccaggagtttgaaactaacctgggcaagatggtcagaccctgtctctacaaaattaaaaataaataaataaataaaaatttccatatgtataaagaactgttaaaattcaacaataagaaaatgaacaacctaatttaaaaacagacaaaagagcagaacagatacctccaaagatatacagatagcagagaagcatatgaaaagatgctcagcgtcatatgtcattaggaaattgcaaattaacaatgaagctggttgtaggggtacatgcctgtagtcccagttgcttgggaggctgaggtgggaggattgctcgagcccaggagtttgagacccatcctgggcaacattagtgagatcctatttctataaaaaactttaagaaacccaacaacaatgtgctattactagtagcttattagaatggctaaaatcccaaacactggcaacacaattccaacaaggctatggagcaacaggaactctcattaattgctagtgggaatgcaaaaatggaacagccactttggaaggcagttggcagtttcttttctttttcttttttcttttttttttttttttggagacggagtttcactcttgtcacccaggctggagtgcaatggcgccatctcggctcactgcaacctctgcctcccaggtttaagcaattctgcctcagtctcctgagtagctgggattacaggtgcccgctgccactcccagctaatttttgtatttttagtagagatggggtttcaccatgttgtccaggctggtctcgaactcctgacctcaggtgatccgcctgcttcagcctcccaaagtgctgggattacgggtgtgagccactacgcccagccataagaatgtttatggcagcttaattcataattgataaaacttggaagcaaccaagatatcctttagttggtaaatggataaactggcacatccataaaatgagaaaaaaataaaaagctattaagccatgaaaagacatagaggaaccttaaaagcatactactaagtaaaataagccagtctgaaaggctacatactatatgattccaaatatatgacattctagaaaagacaaaaccatgcagactataaaatgatcagtgattgctagatgctgggggagggagggatgaataggtggagagcagggtaattactctgtatgatacttcaacagtcagtataagacattatgcatttgttgaaacacatagaatatacagcacaaagagtggaccctaacataaactgtggactttgggtgatttaaaaacaggtggtggcaggagcctatagtcccagctacgcgggaggatcacttgaggccaagagttagaggctgtagtgtgataaatgcaactgtgaatacccgctacattccagcctgagcaacttagcgagatcctccttttcttttttgagatggagtctcgctgtgtctcccatgctggagtgcaatggcatgatcttggctcactgcaagctctgtctcctgggttcatgccattctcttgcctcagcctcccaagtagctgggactacaggcacccccaccaccacgcccggctaattttttgtatttttagtagagacggggtttcactgtgttagccaggatggtctcaatctcctgaccttgtgatctgcccgccttggcctcccaaagtgttggaattacaggcgtgagccaccgtgcctggcctgagaccctgtctctttttatttatatatatatatatatatatatatatatatatatatatatatatatatatttatattttaaatttaagttctaggatacatgtgcacaacgtgcaggtttgttacatatgtatacatgtgccatgttggtgtgctgcacccattaactcgtcatttacattaggtatatctcctaatgctatcccttcccccttccccctccccccaccccacgacaggcaccggtgtgtgatgttccccttcctgtgtccaagtgttctcattgttcaattcccacctttgagtgagaacatgcggtgtttggcttttgtccttgcgatagtttgctgagaatgatggtttccagcttcatccatgtccctacgaaggacatgaactcatccttttttatggctgcatagtattccatggtgtatatgtgccacattttcttaatccagtctatcattgttggacaatgttgaacaataatgtagagtggtatgagaaaagaaaaagacactaattagcttttgggaatcttttaatttctttttttcttttcttttttttttttttgagatggagttttctcttgttgcccaggctggagtgcaatggtgtgatcttggctcactgcaacctccgcctcccggattcaagcaattctcctgcctctttctcctgagcagctgggattacaggcatgcgccatcacgaccagctaattttgtatttttagtagagatggggtttcttcatgttggtcaggctggctctcaggtgatccgtctgcctcggcctcccaaactgctggattacaggcgtgagccaccgtgcttggccttaatttctaaatttatttttttcttatggtactttgttttaggggaaaaaatctctcaaactgtgttttccctctattctcacatcacaaccatcatcatcaacacagaagacttgtgtgaccagaccaaacgtgtggggatttccccctacatatcaagcagtagacatcagctaggtgtcctccaattcaattcaaacactctccacccggaaatagtatcagatctcacagtttgagggcccagtcccacaagactgactgttccctcctccccaccagttacaagtctgagcctccagaacttctgaccaactggcttcaagttggggtttccacattctcctctttgggtctgattaatttgcttaagtggctcacagaactcagggaaaagcttaacttagtttatgggtttattacataggatattttaaaggatacaaagaagctgggtgcggtggctcacgcctgtaatcccagcactttgggaggccgaggtgggtagatacctgaggtcaggagtttgagaccagcctgaccaacatggtgaaacctcgtctctactaaaaatacaaaaattagccaggtgtggtggtgcatgcctataatctcagccactcgggaggctgaggcaggagaagtgcttgaacctgggaggcagagattgcagtgagctgagattgcgccactgtactggtcaacagagggagtctttgtctcaaaaaataaaaaaaaaagaaaggatacaaagaaatagccaaatgaagggatacatagggcgaggtctggaagggtcccgagtacaggagcttctgtccccatggagttgggatgtacctccctcctggcacacgaatgagttttgcaccttcctgtcaacctccatgtattcaaaatgctctctggaagctctctgaatcctgttttttgagattttatggaggcttcattacataagcacgaatgacaactgtgtagaaatgtgattggacaaaatgggtatgttctcatactaaccgactgagtggggaagcccaccaaggcctgtccagattctccttgacctctctgtgcagcattcctccctccacagtaaagggcaggaccctctctagaatgagaatgagaatgaggatctctggacccacaatcagattagagtcttgccttggatcaggtaaaaggaggacaggagaaggtcagagagagagattctgtttcctgaggattgctcctgagccctaaagcaccccaacattataacagaagaccgtaaccagggctacggagggttgtaagccaggagccatggacagaaacatacatgtgtgtacagtagctcacgcttttacttttttggagtcacaacttcttaatggcttgatttcatgacatattttctttggtcttccagaactttcctcttaaaaaaacacagcaaaaaaacaaaatttgatttgaaatttttgagatttttttttaagagtcattagcaaatccactaatgaattttccccaagcagttaggagatatttctcttcattacacctttgggatttgagtgcttttgctaaaaatttaagttttttttcccactacggttttaatatgaacatgtggaaagacttcttgtatagaaaaatgacttgcaaaatattattttttcaggttctatggagtgatttcccccccttaggaaaaaagaactcaggaattttaagtttatatgtatatatatttattttattttattttatttatttattttaagacagactctcactcttttgcccaggctgggggttcagtggcctatctcggctcacagcaacctccgcctcctgggttcaagcaattcttctggctcagcctcccaaatagctgcgattacaggcgcccaccacaatgcctggctaggttttatatttttagtagagacagggtttcaccatgttggccagtctggtctggaactcctgacctcaagtgatccagctgccttggcctcccaaagtgctggaattccaggcgtgagccactgtgcctggcctttaagtttgatattttattcagataaatatggaaaaaaaattttagctttattggcaaaatttattattcatatagaaatcatctgataatctgatagattaagtacagccctgcaactggattctaataaaccaagtcctctaggtcattaagattgttattggacatgaattcagtcattgagaaaataaaacattgttttgttgttcctcagttgtggtttttgttttttttttaagatagagtttcactcttgttgcctaggctggagtgcaatggcatgatctcagctcactgcaacctccgcctcctgggttcaagtgattttcctgtctcagcctcccgagtagccgggattacaggcgtgcgccaccacacccagctaattttttgtatttttagtagagatggggttttactatgttggccaggctggtctcgaactcctgacctcaggcgatcaacccaccttggcctcccaaagtgctgggattacaggtgtgagccactgcgcctatccgtactgttttttttaccccttgctttttttttcctttctgctgagatgctttaggttttaacagacatgtgattgggccgaggggcatgtgaggaggctggacaattaactacagttagcttattgcatttatcagcaccagattgtgtgtggttgaaatggccaaggtttgatgttttgttatgaatgttccagtatatcttataaattacattttcttaaattgatttgttactacttacaataatgtttgatagtattaaataaaatcctacttattctgttaaattcatataattggtagaagaatcatagtccggttattactcttttttgagacaaagtcttactctgtcacccaggctggagtgcagtggtgtgatcatagatcactgtagcctcagcctcctgggttcaggtgatactctcacctcagcctcccaagtagctgggaccacaggtgtgcaccaccatgcctggctaatttttttttttttttttttgagacgaagtctcgccctgtctcccaggctggagtgcaatggcgtgatctcagctcactgcaacctccgccccctgggttcaagcagttctcctgcctcagcctcccgagtagttgagattacaggcgcgtgcctccatgcccagctaatttttgtatttttagtagagacagggtttcaccatgttggccaggctggtctcgaactcctgacctcgtgatccacctgcctcagcctcccaaagtgctgggattacaggcgtgagccaccatgcctagcccacctggttaatattttttattatttttgtagagatagggtctccctgtgttacccaggctggcctcaaactcctagagtaaagtaatcctcccatctcagcctcctaaagtgctggtattataagcatgcagttcttattctcttgttgatctgattataaggctctatttaagacagcataggcccaactggcagaagtaggtgatggctggatattgagaaataatgttttctttgcatgatccttaaggaagctgacctggttacaactcatgaattgggacataattttggagcagaacatgatccggatggtctagcagaatgtgccccgaatgaggaccagggagggaaatatgtcatgtatcccatagctgtgagtggcgatcacgagaacaataaggtatgtgtgtgtcgagaattttttatgtggtttggaaagaggctgtgtataatgatcataatgagagctcagaaacgtattccattcctaggcgtttccctagggatggatgtgcaaattacaaagtaccttgaaacgtggttgtgtgttttggggtgaagcacggttcatctaaatctggttaaaactatcatttggactttgttgtcaagcttaatggtgtagatttgagctctaggaaaaattactaataataatggctttttttggagttctggatttcagggtctggtgggctcaggctttatgttaaaaatttgtcatttcatttacaagttgtcattcattttaactctacaatttacatgtacagtttacacgtttttattaacttttgcagttaaacacatagtttgcctgactacaagcctcatgggagaaaggcccttccttgtctgtcttattcatagctctatcttattcatagctctatctccagtgcctagtaggagtatctggcatgtaacaaatatttgttgaataattaatggaatcatttactattgggggtttctgatagagaatactagttgatttgtgatactgtaaaacactttcagagactttaagagtgccgtgactaactcttagagtctgaactaaaagttgtgttaataaatatctggttctttcattttatttgaagttaaacagcataaagcagtgtgaggaaaacaatagttgcactgctgagttaaagagggtcggtggggagagcttaaaggagtctgattctaatcacaaaagattgtgaagtatttgtcctgactcctattttgagcttggctgtgggctaatgtgcaagccttccctggacacagagggcaagattacttctgcttttccctggctctgacaccctgctttctgaaatttctgcctcctgttctttttgtgatctttgattgttgcatctcatttttttttggctttttatgtatattttctgcatctcattttctttggctgttatgtgtaaacagttcctctgttactttgcatgttatgttttatttttcctctgcttgacaacttgtgccagagaaacatttttctacccctttttgtctactcttccaacctgtcaaactgttgaattttccttctcttttcatagtctctgcatttctaatcatgttcactatagttcagtgctgcccaatagaactttctgctgcggggcgggggatgttttgtgtctgctctgcccagtatagtagccactagcccagtggagcaattgaaatgtggctagaaactgaggaactgaattgtaaattctattttatttaaatttttaataatgtttgcctgtgatgggagacgggaatgggcattaactgtaaaaggacatgagtgagattactggaaggatggaaatgtcctaaaattgacttatagcaatggtttcaacacttggtaaagttattagaaatcactgagttatatacttgaaatggatcaattttgtgatatgtgaaatatgtcttaataaagttgttaataagccaacaaacaaaaacagcagtgtgggagcagaggaaaagtagcgcggatgtagaggagctgtgaagtcataagttgattattgttgaagctggtgaggggcacgggggcattcatgataccatcctgtctacttcatagatgcttgaatatttctgtaatagaaactgtaaaatatgtgactaggaacaaaatttaagtagccacatatggttggtggctaccatattgcatactgtttctctaagtaataggtcatatgcttcttggttatgaggatagtgtcagaacttgggagcaaaatgttttactttgcagactgcctgggtggacatgcatgctgctgactcttcctgctgccagttctggggctcttcaaaacagccctgtaagaacttgccagtgaggcatggtggctcacacctgtaatcccagcactttgagaggccgaggtgggcagatcacttgagcctaggagttcaggatcagcctggacaacatgtgaaactccatctctacagaaaatacaaaaattagctgggcatagaagcacatgcttgtagtcccagctactcaggaggctaaggtaggaggaacccggggagttcaaggcggcagtgagccaaggttgtgctactacactccagcctggatgacagagtgagactttatctcaaaaaaaggaaaaagaaaaaaaagaacttgctaatgagaatggggcctgggaagaactttttttttctggagctgccagtctgtatcaatgaagaacaatttatttattttgtcctgagcacatcatatttagtctgtgtttttctagtttggttgcccaagtaggagtccccttgtaagaagataatgtgcatcttctatgttttatttatttattattatttattatgattttttgagtggagtctcactctgtcgcccaggctggagtgcagtggtgtgatctctgctcactgcaacctccacctcccaggttcaagcgattctcctgccttagcctcctgagtagctggggttacaggtgcatgccaccacacctggccaatttttgtagttttagtaggatggggtttcaccatgttggccaggttggtcaactgactggtcaacaaactcctgacctcaggtgatccacctgcctcgacctctcaaagtgctgggattacaggcatgagctgctgtgcccagcctatgttttaaatgaattccttaataaaaatatttttaactgatgaaaagggcttacaggacaaaaataaagtagttccttgacctagaaagacagaacccatcaccctctactaggcaagcctatgaagagcagtttgccacaggtggacttctctgtggacagatgacattagtgaaaaggaatgtaggacctttgagattgtaacttcttaggaaggtttgctgaacggaagaggaagtcttatgacaaggatgcaaacagaagctgccagatcttcagggatgtgtaggcagaaagccagagttgcgggttggtccttttatcgttagtgctctccagctgcttgggagttgtaactctgacaaatcagtgaagaggtcttcttatctgttcactgtgaattttaactccattttaacctgataaaatggaacccagagatacatgatgttgatgaataaacccaccaaaatgacaactgcctgaggccccgattagaataaccagaccccttagacatctgtactgtaacgacagatttgggccgggcgcggtggctcacgcctgtaatcccagcactttggagaccgaggtgggcagatcatgaggtcaagagatcgagaccatcctggtcaacatggtgaaaccctgtttctacaaaaaatacaaaaattagctgggcgtggtggcatgcacctgtagtcctagctactcaggaggctgaggcagaagaatcacttgaacccgggaggcggaggttacaataagccaagattgtgcctctgtagtccagcctggtgacagagcaagactccatctaaaaaaaaaaaaaaaaaaaaaaaaaaacagatttgaagatgttttttaaaaagccagttagtatttctgtgtaagatgaggtctttgctatctttctgaaagtagctcctttggtgtctgatttggtggttacaggcacctttggagggtctcatacacttggctctcaggggcttcatgattgttgtctggggtgaaagtgaagccattttggcatctgcagagcactttggagaccccgacctaagaagtaactatgctcagttttccctaagcctcttctttttttgataacttcaggaggtctggaaaatgaccgcagttttagagctcctgataaaaccctcagccttaaaagggagttatcctagtggttctgtactccagggtgggaaggtagtgtagagactttttgagacactggtcttgctggttgatgaaaatgtttaggtaacaattggggatttaatttatataaaatgtactattatgcctattactaagctcaaatatttaaacaactttaaacttggatcatccatataagtagccaaagaaggagaagaaaccccttctcctgcatttctgaattgttttgtctgggacaacattaacctacagaggttcttaattcttgtcactgcatgagtggcatgcctgaggtgaggagatttcaagtctgatggagctacgagctctctgttgtgctattctgcttgtccttaagtgggctttgactgggatgtttggtctcagtatttgtatagcttgcttaccttcgtaagaagaattatagatccttaaccaagttcacatcagccatttagcattctatggagggaggttcccagttccatatcagtggcctttggaggagactgtggtggccttgccataactccagggtggctctgatggtggttttacattaagagtttgtctctagagaagacacaaacattgcatgggaatacatttttatgatattattttgggtccttattgccttttttctctcaagatgttttcaaactgcagtaaacaatcaatctataagaccattgaaagtaaggcccaggagtgttttcaagaacgcagcaataaagtttgtgggaactcgagggtggatgaaggagaagagtgtgatcctggcatcatgtatctgaacaacgacacctgctgcaacagcgactgcacgttgaaggaaggtgtccagtgcaggtgaggagtctctccacagggattttgggaagttggtataacaagatgtccaaaataagagaagactgaacttgcaggggctttagaatcaactgaaaggggtgtgagtgtgtttgtttacatctacctcttttgcccttcacagcaagaaattgctttctgggcctggcacggtggctcactcctgtcatcccagcactctgggaggctgaggtgggagaaatgcttgagaacagcctgggcaacatagtgagacactatctcttaaaaaacaaaaaacaaataagaaaagaagaagctttctggaaagcagtgtgacattatgtaacaaaatccttgaccttgcatgctccttggtttagcagtcctatagttaaaagaatcttttttttttttttttttcctgagacagagtcttgctctgtcgccaggctggagtgcagtggcgcgatcttggcttactgcaatctttgtctcccgggttcaagtgattcccctgccttagcctcctgagtagtgggactacaggcacgcaccaccatgcccggctaattttttgtattagtagagacgaggtttcactacggtggccaggatggtctccaactcctgaccttgtgatccatccaccttggcctcccaaagtgctgggattacaggtgtgaggcaccgtgcctggcaaaataatcttttttatttaatttaatttatttatttattttgagacggcgtctcgctctgttgccaggctggagtgcagtggcgcgatctcagcgcactgcaatctccgcctcccaggttcaagcgattcccctgcctcagcctccccaataactgggactacaggtacgcaccatcacgcctggctgattttttgtattttagtagagacggagttttagcatgttggccaggatggtctcgatctcctgacttcatgatctgcccaccttggcctcccaaagtgctgggattacagaggggagccaccgtgcctggcctttattttctttttgagacagggtctcagtctgttgcccaagatggagtgcagtggcatgatcatggctcactgcagcctcaacctcccaggctcaatcagtccttccacctcagcctcccggatagacaggactacaggtgtgtgccacctggctaattttttttgtattttttatagagatggggttttgccatgttgcccaagcttgttgtaaagtcctgggctcaagtgatccacccttctaagcctcctaaagtgtggagattctaggtatgaggcaccatgcctggcccaaataatcttttatttctttttttttttttttgagacggagtcttgctctgtcgcccaggctggagtgcagtggcgtgatcttggctcactgcaacctccgcctcctgggttcaagccattcccctgcctcagcctccccagtagctgggattacagtgtgcaccaccacgcccagctaatttttgtgtttttagtagagatggggtttcaccatgttggccaggctggtctcgaactcctgacttcgtgatctgcctgcctcagcctcccaaagtgttgggattacaggcgtgagccactgctcctggctgcccaaagaatcttttgggcaacagagataagatttaacaagggtataagatttaacaaggtttttttatggctacatcctaatagcaaaattttggaaacaatcaaaatgacagtcttgggatatgaatgttatcatgattctatatactggaatagtgtggaggaagtaggttacaagttagaaagttacccaggttttcattttttatatacactgatagaccagtgcctggcttagaagtaaaagggttaaacttcagttttctggtgaataattgagatttaactggatacagtgcatattaacgctgtaaatactgatggggagtagagttctggctgccgagtgtcttagctatggattgccttgtggccccaccttgtcttttttttttttccttgtctttttttttttttttgagagagtctcgccctgttgaccaggctggagtgcagtggcgcgatcttggctcaccgcaacctctgccttccaggttcaagctattctcctgccttagcctcccgagtagctgggattacaggcatgtagcaccatgcccggctaattttttgtatctttagtagagacggagtttcaccatgttggccaggctggtctcaaacccctaacctcgtggtccacctgcctcatcttttttttttttttttttttttttgagacagaatttctctcttgttgcctaggctggagtgcagtggtgcgatctcggctcactgcaacctctgtctccggggtccaggcgattctcctgcctcagccttctaagtagctgggattacaggagcgcaccaccacgcccagctaatttttgtatttttagtagagatggggtttcaccatgttggccaggctcatctcgaactctcctgacctcaggtgatccacccacctcggcctcccaaagtgttgggttgggattataggtgtgagccacctcgcccagcccatcttgtcttttttaaattaatgcgttaaatgaatgaaaaccaagggcaccaagatgtttcacaggtgattgctgtgttcccattcttttctcctatagtgtggcatttatgtgacctcacgcacattaggaagggacaaagtgtgtgcaggtagctctagcagcggagatgtctgatgatgtaggagtgggtgacggagccaggaggtcttccccggtgatcttcaggtcactgtaacgtaactgtagcgtttgatttgatatggggccataatttgaattgctctgttcctgtctgctgttcttctccagtgacaggaacagtccttgctgtaaaaactgtcagtttgagactgcccagaagaagtgccaggaggcgattaatgctacttgcaaaggcgtgtcctactgcacaggttcgtgttcttgttgcttccttggaatgctgtgggtcaagtgtgtgtgtgtctttgaaaaacaagattatgttttgttcagatgagagacaccttatttttaatctcatatgccgggttgagtttctggcactccttagtttgtgacacttggctttggtgggtttaagacctgtttctatttctctttcatttccatcactctcctctttctcctcacagacatccactctactgtggttaatatttgcctggatatgtgtatatccttgaaagatcatatagtgttattttgtgcatgtatgtgtttttaatgtgccaaaatgatattctaccttaaatttacttttaaaaaattcagtatcatgttttaaagaattacccatattgtgctacagataatataacaaggtttttaatggctacatcctaatagcaaaattttggaaacaatcaaaatgacaatcttgggataatgaatgttatcatgaatctatgcactggaatagtgtggaggaagcaggatacaagttagaagggtaaccagtttttctatatgtatctatatgtatttcactgttggggacacctacatattgtttagttatatgattggctgtgttttacttacaagtcaccaagtggtagctacttccattgccttcatccccttgatattccagataggacacagatcacatcctcctacgtcccttcaggaacctgtgtgtttctctgggtactgaggagtgtcattgtgtagtcacagaggcaggatgtgctggtctctagagcaccactgctaggttgcctgtgtctgaggactccttatcctgacgttctggccaacgcttggaattaccctgctgtcctattagcatgatgagtataaagtaatctcttgttcttacttttttttttaacagcccttgtcctaatgcacttacttacatttttcttgagcatctctttatatttttcagctattcagatttctcctgtgaatagccagttcatatatttggttcattttttaaaaattgggtttcatgttatttcactactgtgaatttggaggagttcttatgtaatcatccatttgggcatacgtctcctatctgttgccattctcagaacagaaatctttaacgtaatcaaatccatcattttgttgtgtgtgtgtattttttaaacacatggttcagaaaagccatggcggatggttaaaaagatattttccacagctgcttctattagcttcataagttgtccttttacattcaggacttgaatctttctggagctaacctttccaggtgtccagtatcttttgttcggtcaattgttgctttaaaaatttcaaagctatgttattactaggtatataaacggacatatctctacatctttatctgctgttccttaccagtatataatgttccttttttacccttgcgatgttttttgacttaaattgtcaaaaagcaatattcagtttgctattctagtttttttgttcctctgatatatctatctgtcccattcttatatttttcaaaatttgtctctcttggttggttggtttgattttgtaatagctttattgatacataattcacactcatgtagtttgcccatttaaagtgtacagtttaatgatttttagtatattcagatttatgcagtcatcacaattaattttagaacatttacattactccagaaagaaaccctgtatcctttagctatgatcctccaatccccccattccccacaactcagagcaaccactaaccaccctattctttatggagttgtctgttttgaacatttcatataaatggaattatacaatatggtttcgtgaccacatattgtatgactggcttctttcactgaacatagcatttttaaggttcatgtatgttgtagcatgtatcagtacttcatgtacttttattgctgggtaaattccattgcatggatatgccacattttgtttattcattcattggttgatagacatttgggttgcttccacttttttgctataacaaataatgctgctgtgaacatttatctatgagtttttgtgtggacagttcctttggatattattcaggaatagaatttctgggtcatgtggtaactatgcttaatcttttgaggagctgtcagactgttttccaaaatggctacaccattttacagtctcagcagcattgtatgagggtcccagcttctccatatcctcaccaacacttgttatcttttttattgtaactatcctaggttttgtgataaggatgcaaacagaaagctggaggtcttcagggacctagtgaatgaagttgtgtcctattttggcttgattttggttttccgtgtgcatagtatgacatgttgcccatgtttttatcttttgggatctgtcactatcacattactttgccaaatgttaggaacctgatggcccggcacagtggctcacacctgtaatcctagcactttgggaggccgaggtgggcagatcacgagatcaggagatcgagaccatcctggctaacacggtgaaaccctgtgtctactaaaagatacaaaaaattagctgggcgtggtggcgggcgcctgtagtcccagctacttgggaggctgaggcaggagaatggcgtgaacccgggaggcggagcttgcagtgagccgagatcacgccactgcactccagcctgggcaacagagcaagactccatctcaaaaaaaaaccaaaaaaacaaatgttaggaacctgaatatctaaatcaagctttaaagaagcatttgctagctatgctcaatgtttcatcttcactgtaataataaaatagattgagaaaaatgctttcttttaaataaacgtaagtaaaacaatttgaaaacgtttgttcttatcaaacagccttttgttcccttgatattttatacaaaatagtagatagcagaggataagttcctgataaggaatcagtattttctagcaggaaaagctagagaacaacaacctcaaaaaaaaaaaaaaaaaagaagaagaaagaaaaaaagcaattagcatttcacaaccagcagcagcagcatcacctgggagcttattagaaatggaaattgtcagtcccctccctggatctactgcatcaaaaaatgtgggaagggaggccagcagtctgtgctgtgtaaccttctgtcaggtgatttccatgcatgctaaactttggggaccatgctagatagatgataccattttcagaattattttcctacctgtctaatactctgactttagtcttttaagaacagatgctcaacagatatttattgagcattttttaatgtatcagggcagtatcatataccaaaaatacaataatgatccacaatataaaccttccctgagctcactggacatcatactttcagtaatagtttgttaaatgactgttgacatgatgaatgcccagtgctcatgaaaggttttatgagaaccagaggcaaagtgcctggttatctgttgggtacttaataaaccatcacttttgtttgaaactggccagattttctgtacattttgtgttactgctctgaaaccctctaagtcagaattcttttgattggcttcattcttcagctgaaaggccagtccagagctgtggatatatagtccattgctttcataaagtgttttttttctcctcctctatttgtgttgacttttagctacttgtgctattcattttccagaatgattcactcattccatcctgtctctcccagtttaactttctttggtgggttttctttggcattattggcctgggcacagtggctcatgcctatcattccagcacttggaaggccaaggtgggaggatcccttgagcccagcagttttacaccagcatggtcaacacagggagatctcgtctctcaaaaaaaaagaaagaaaattagccaggtatggtggcgtacgcctgaaatcctaggtacttgtgaggctgaggcaggaggattgccggaacctaggagtttgaggctgcagtaagctatgatcacacccctgccttccagcctgggtgacagactgagaccctgtctcaaaagaaaaataaaaagaataattgatttatttaagaaatatttgtagtatacctataatatgatagggattggagataacttaatagatttgatcattgctgtcatggggctttccagtctagtagagggaaaacagaaaataacattaaatatatatatataaattgcaaaacatatgcaatgaaggagagaaggagtgtgatagtgcataatggaagtgggaggccacatcaacttagcatcctcagggatatctcagaaaacctttgagacaaaacttaatccataagaaaagccagctaattgccccaaaagagtggaaacaccagcattccaggtagaaggaatagtatctgttaatattgaaggaactgaatggaggttgtcatagccaaagcagtgggctgtgggagagttgtgtgcgatgaagtcagggccagatagggaaggccgtggagttcttttaagccttcatacaaagtttgcaatttattctaagtaatagcacataggatattcttttatatatgactgtgagatgcagaagtggagaccatgcattctaactggggcttgggaggccagggactcatgcagcctagcctggcacatagccaggcactcccatttaaatgctgattgctggtgagatgcaggctcttgtcctagctctgtaggtcactttttgcttttgcaaggtaagatgctcacttgtatgagaaacagcgtattatgcacctgtagaactggtggacctgtgactcattctttttgttatgactggtgtttgcttccaggtaatagcagtgagtgcccgcctccaggaaatgctgaagatgacactgtttgcttggatcttggcaagtgtaaggatgggaaatgcatccctttctgcgagagggaacagcagctggagtcctgtgcatgtaatggtgagcagttttattcccagtccagcagcaggagaaaacatggcctttgtctgccaggctcccttcctccatttggaggttgtgcgaatgacagcagtggtgagatccaagccgaggatgaggggatggggaagggcagggtggtgtctggagacaggcatctctgcatgcagatccaccatacctgggagacctatcctgttggtgtttcttcttgctgcagtttcaggccatatggcaggctttgaggtgggagaggagggaattttgttgggggtgagtgggtgggtaggtagaggtgtgtcctagccttcctctgctccatatcatacaaaccacaaaagcagcagtagctatctacattacattggcatggaactaggatactcctgcaacaactccaccagagagagctgattccaggacctaaccccactagatgaggatttttgcagttatcaagaaggctgggtctgctcccctctgatctcttagagcagcctggggcaggagcctctctcctgctggcctgtcagttttccttaggtttctgtgctattttggaacccctgggtttgagggcatcctcatggactggtcagggactggctggactctgcttcccaccccacttaaaccatgggagtcgatgagggagttctcttgctttcaaaatagacagagagccaggtgtggtgactcacacctgtaatcccatcactttgggaggccgaggtgggcagatcacttgaggtcaggagtttgagagcagcttggtcaacatggcaaaacgctgtctctactaaaaataaaaaaaattagccgggtgtggtagcgtacacctgtaatcccagctgctagggaggctgaggcaggagaattgcttgaacccagggggcggaggttgctgtgagctgagattgcgccgctacactctagcctgggcaacagagcgagactccatttcaaataaataaataaataagtaaaaaataaaataaataaaagacaaagaacccggtagttaaataaaatcactgggttggaagctcaccatccatacagtggagtgaggaactcttccaagttcaataatgtgtaggtaaagaagataggttgagggcagtgtctcacatctataatcccagcactttgggaggccaaggtgggtggatcacttgagctcaggagttgtttgagaccagcctgggcaacattgtgaaacctcacctcttaaaaaaaaaaaaaaaaaaggtaacacgtagcagatgccaaataaatctgttgtgttgaatgccaagaggcttggggtgctctggaaggacagagcccgacacagtaaaagtccaagaaatattttataaattagtgaatgatgaaaaggttttctttttttttttttgagatggagtctcactctcgcccaggctggagtgcagtggcgcgatctcaggtcaccgcagcctccgcctcccgggttcaagtgattctcgtgcctcagcctcctgagtagctgggactacaggcaagcaccaccacatctggctaattttttttatttttagtagagatggggtcttgccatgttggccaggctgttctcgaactcctggcctcaagtgatctgtccgccttggcctcccaaagtgctgggattacaagcgagagccactgctcccggccttttctgaaaaggttttctttttgcttgtttttgtgttctagttgatttctttttctcctaagtatggtttaattttctggcatttctgccattcttatgtatgcccacatggctcacagatgcccggtgttttatcctgtgacctgtcagagctgttcttgggaggagttgtggagctttggctgcagggctcatgctcctggggtcactgagctccccacccaagggtggacagttgtgtcccagctgctctcgctttcagggagccagtgtgggccctgaggggcacactttagactgaaaaaccaaggattgaagtcagcagggtgacaagaaagttgggacaaagggaagcatttagaagagcattgtgaggggcttgaaggggagagaatagttagactttgaagagaggtcttgaatctagaatggatttttctctgcatttttttttaaaccttgtggcctctgtcactgaaggctgaggagtgtgacctcagaaactactccttggtgggggctatggatagtattagctatttaaataaaaaataaatgtgatttcttacctctttgggagcatggtcagggaggaaagaggaggcaggaggagaggcaggtctcagaacaatccagctgtcaatgcgtgttctctgttccagaaactgacaactcctgcaaggtgtgctgcagggacctttctggccgctgtgtgccctatgtcgatgctgaacaaaagaacttatttttgaggaaaggaaagccctgtacagtaggattttgtgacatgaatgtgagtatttatgtacagctttttctgtaacagccagataggaagtttttattttgtaagtacttgattttgcagatgaaaacaaatcaaaacacaagtggggctacatccttctggcccattgttatctacgggtattacttaggaggagaagacggagtgctttcaggtccctgcctgtagtttccttctgtggtgggaggctttgagcccagagactgagaaggactggggtggggactttatggtaaagttggttggtttcaggcagtgggtcctaattatgttttcctagattacttacagaactgactaagattgcaaaattattcagggtgtgattttgaaacaggtgctgaatgagtaggaaagacctagaaggctgcttgacttacttaagccagacccttttgttctctagagaagcataatttttctcatgcagaatgatgggagagggttttaagatttacgaggcttcacagggagtctggctgtgttgttcactgtccactgtgtatgtgtagagtccttactggaatgcctcatctttagcaaactggtttccttgatttttgtctcctggtaattctaaatcacttgtaaaaatggagtaattatgaaagtgttaatgacagatgttctactttcttgggtactcattacgcggaagttattgccttgtgtcaaagatgggaaaacgtttgattttaatgaagccctttacatgtcagttatttttataaagctacattgcttctgaatacattgtgtttgggaatgatgctgtatgtatgttttttcttcatagggcaaatgtgagaaacgagtacaggatgtaattgaacgattttgggatttcattgaccagctgagcatcaatacttttggtaggtgatttccccagattacttactgagagctgagtcaatttctgtgatgacattagaaaagtgtgctttcagagtgatgtgctttaattctgcagtagaaggtggaactattcacagctttagttatgaaacaactttgttggctagaataaaatgaactcatagatagtctgtccccgtggagcttggatgcacagattttctgacaagggaaataaagtcaaaatactggcttccttctttacccaaaaatatccatgtgattagcataagcatagtttaatgctatagactgaatcctgattgatgtaagagtgtttatttgactgaatgctatatactgaatcctgcttgatgtaaaagtgagcctcatattttgcagaagcagggtatatcatgttgtcacgagtccataatttaatcacaaaaataatatccaggtaacaaaaactttgtcttcttaagcatttactagtagtagcattccatattaatctgttgacacagctactccaggtaacatgttgaatattctgcaatctcttcctgtcagccagtatatgagggctatttctttaaaagcacttggtatggagagatggtgtggtgtaatacaggcagcacagacattctgctctcggtagtatgtctagccagcagctctggcatttgacacaatggtaatatcctaagagcatttcactttagatttgtgaagtacttggtcaagacattaactgtttggaattgttcacaggaaagtttttagcagacaacatcgttgggtctgtcctggttttctccttgatattttggattcctttcagcattcttgtccattgtgtggtaagtcatcaacttttaagtaattaaatgttttatttaaattttgatcaactccaaccatgtaatctctggaaaaggtaaaacttgttcttagcaaagtttggcctgatatttccaatagctttttttgttgttattcctaggggaacatgtcttgtagaaagcttaactaatggtcttttaaaaaaaatactatttttgtgtgttggtgttttaatatataaatttcttaggaattttatacttttaagcataggagactgtttaactggatttgtccaggtcctttgatgagtaaagcccttattgaagagcattttcaggctgacttcgttgcaatagagcaaatatcaaacatcggcatttcagatgttccccatatatcatgtagattattggcagcagatggctatgtcttcagccttctgcacaaataggatgtagggactggggcccagctgtcatatagagtatttacatcttccccaaaaaataagagtaagcagtcttttctgttctcattcagaatcagtaacagctacaagttgaattgggctttgactaaggaactcctggtcctttataaatttgaggccctttttcataaatgttcttacgaatccattcacttgcatctgtggggaatggggatttgtctgctgtagagatgagaaagtcacacccaggcttccagacttgttttcccaaactctttcatagtggccttcctatgagcatttaaaaattccagcacaactctgatgacaaaggagtttttcctactgcctccttcctttcctttcctgctggcttctcctgcctaggggccatctcacagagcagctcttcctcagggtggtgagcatgatgggtataggaagatctctagggagcacttgtgctgaagaaagctgaaggtgacgtgcttgaagctttgacagatgtctctggatgacagtgccatccatcacgattgcttctattggaggatggaacctattttgtttacagggaagttgcacatgtggacaaggcacgacccttgatttcagagcaaagcctccgataggagggagggccatggcttgtttttggtcatagaatgcattgatggcacccagacaggaagcctagtcctggattcttggtccttgccctctgtcacctattatgcttcagccacaggcagggatggggcagcagatggccatgtggttagccttctgcagaagtaggatgtagggattgaggcccagttcctccagcagagcatggtccacagaaactgtggagacagctaagagagtgaggccatgggccggggcagtgcgaagaatgctgcaggcccagccacctgggtcttcctaccagttgcccttccagtcagtgcggtcctggtgtacccagcatctgggacatttgtcatttcatgcacaggaagatgcctttattattcccctgcccacagagggataaatttctcagaaaacatagcacttaaaccttgcctctttctgtacttaacgccaaaatgtatttcctttgagtgcaaaggaaacacttctagactggtggcataactaaagcttgggtgagaaatggattgtcatctgttgagcctgctatcactttctacaactcaggttctaagttcttcagttagtgttaggaatagcctgtgatgaaatagtactcactaactgaattgtatttgtagggaatgaccttcttgctgtttctttctaggataagaaattggataaacagtatgaatctctgtctctgtttcaccccagtgtaagtataccatatgaaagaaacataatcttcgcctggtctgaggccctgttaggcaaagaccttcacctgacccagcaagagctttcactggctgatggaaggtcatgttgcagcaggaagggtctaggttggaatgtttacccttctgacaacagtgatggtgaacttcgattagttgcatggatggacatttaaagagctgtgctgtccccttcccaagccataaggagtgatttagccattcaacacttagttaatattttgagttcaatttctctcttgggatcttaccttgagaggtttgaatcctcttttgggtcttcaaatggtaagtaagttttcaggatgcttgaaagctagtaattactgtttttgccattaaaagtaatggcattaattacttttgcaccaacctagtattttttagtcacttaggttgagtgagcctcacctagcacttttttcttagcatcacagtgccaacagaataagaggctgtttgatgggtaagggtggagctgtgaggacctccgattcatcttttattcctatcaatcaattgaacccatgtctttgcagaacgtcgaaatgctgagcagcatggattctgcatcggttcgcattatcaaaccctttcctgcgccccagactccaggccgcctgcagcctgcccctgtgatcccttcggcgccagcagctccaaaactggaccaccagagaatggacaccatccaggaagaccccagcacagactcacatatggacgaggatgggtttgagaaggaccccttcccaaatagcagcacagctgccaagtcatttgaggatctcacggaccatccggtcaccagaagtgaaaaggctgcctcctttaaactgcagcgtcagaatcgtgttgacagcaaagaaacagagtgctaatttagttctcagctcttctgacttaagtgtgcaaaatatttttatagatttgacctacaaatcaatcacagcttgtattttgtgaagactgggaagtgacttagcagatgctggtcatgtgtttgaacttcctgcaggtaaacagttcttgtgtggtttggcccttctccttttgaaaaggtaaggtgaaggtgaatctagcttattttgaggctttcaggttttagtttttaaaatatcttttgacctgtggtgcaaaagcagaaaatacagctggattgggttatgaatatttacgtttttgtaaattaatcttttatattgataacagcactgactagggaaatgatcagtttttttttatacactgtaatgaaccgctgaatatgaggcatttggcatttatttgtgatgacaactggaatagttttttttttttttttttttttttgccttcaactaaaaacaaaggagataaatctagtatacattgtctctaaattgtgggtctatttctagttattacccagagtttttatgtagcagggaaaatatatatctaaatttagaaatcatttgggttaatatggctcttcataattctaagactaatgctctctagaaacctaaccacctaccttacagtgagggctatacatggtagccagttgaatttatggaatctaccaactgtttagggccctgatttgctgggcagtttttctgtattttataagtatcttcatgtatccctgttactgatagggatacatgctcttagaaaattcactattggctgggagtggtggctcatgcctgtaatcccagcacttggagaggctgaggttgcgccactacactccagcctgggtgacagagtgagactctgcctcaaaaaaaaaaaaaaaaaaaaaaaattcactatctacaaacctagaatatttaaaatacaaagattgcctgttttcaaacactattgaataagagggtgagatatttcttaacaacaacaacaacaaaaaaaacaggttgttttgaatgtgatgagccagccaggagatagaatactacctgcccttagggttgggggctgtccccacaagacttgatacttcagaaaccctttttattgacccacaagcagatatttgaattacttcttactttattgctccaggattctggatgggctgcatttactgtgtgaaggataaaaatcattagcctggattctgatttctataaattgccattaaaagctttttttcccctaagaactgaaatgtgctcaccagccaaaacattttaacttgtaaattttgagggcagttaaccaaacctgtgactaatcatatctcctcctaccccccatttccaaggacatttgttactcagatacttgttatactaatacttgaacttgtaccttatggtatttgctatcttttaactagtcatgatattcttatactttagttacacttttggaatttgatacaaggttgagtggggtgtgtgggtgtatgtatgagtgaaacagttctcaaaagaatgtaagaaaaaccatttttataaaattgtgactttttaaaaacatagtctttgtcatttatagaattaacaagctgctcagggtatattttatagctgtagcactgatatctgcattaataaatactgtcgaaacacaa

SEQ ID NO: 1129 - DNA, 45045 bp, Homo sapiens
caactggcgagaagcagggacaggcctcatacttgggtctttctggcttcagcacgctttccttccacacacgtgtactggcacccactaaatgctgagctctgctcaacgctcggaagaagcaggccctgccttatcatgcgcacactctaggggaaaacaagtaacagcgagtaaacaaaggaacagacgacatcagggtaaagtgatggagagactgcggtgaggccaccagcctccataaggagacaggccttggtgaagtcgctgtgcctcggttctcagtggtgaggtggcccatacttactcggtgggtggggctggggctgcctccttagctttccgcttcttatgctcgatgtcccctcgttctggaacaatatcaccatttgtcctttccttggttcctttcttattgtgctctgttccactggccttggtgcgaggtactggcgccctcctgtccatcttggaacctgaaggaacagagcccctgctggcctcctggtcttttcctgccggcatctcctctcccttcacttgaggcgaggtctcttttttgttttgctggataattttgggcttctttttggaacccatctgagagatgacaagaggcttttctggggcctgagatttttgtttcagcagccactgggacccaaaataaaatacatgctgcatttgaatttggaaattacacacagcagattgaaaaaacttacgtgtgtatgtatatacacacatatacaccaaacacatctatacaattcccatccgcatcactgaaattcattttcaaacggtttggaaaaagctctttttcattctcatgggtcacttgtggtgaaatgctgtttctttgcttatcttattataatgcattttgcacctgctccttcatgcatacaaaatgtcaaactcattctacaccttgggtacctgttgagtggctggacaccacagaccacttcccttttcagcttatctagaaagaattttggagttaacttccctcacagcttgggccaacatcctgctacacagaaatcgctttttttttttttacaagattccctggtttgctactgctgtgaagatctcaggaaggtggggggtgtcataaatgaaaagaaaagcttctgtcaaactggagtggctgaagaactgctagcagccacacaccttggctgtcacccaagcagaggctcctgtagtcttagagcccagcttcctccctgtgttcaaatccccagtgggagtgggcgccaccacagtgcgatgatgaggcgggtgctacttacctgttctgtgataggtaaagaactgaagggctgactttcttggatgaattagaaaacactccaaagtttccctatagcacacatcccttccattcacttattttgcttttctttcttgggagaaggaagaagagttggtgttcaagaaatcccacagaaccctggggctgcccacgggaatttgactggtcctgtgtgttaagacaggaatgtctgcactgagatactgtgcagagtattaggaggttcaagaagcgctcggggaggctgaggtgggaggattgcttgaggtcaggagttgaagaccagcctgggcaacaaagtgaaaccccatctgtattagttcattgtgcactgctataaaggaatacctgtgtttggtaatttataaagaaaaaacgtttatgtagctcatggttttgcaggttgtacaagaagcatggtgccagcatctgcttctggtgaggccgaaggaagcttcccatcatggtgtaaggtgaagggggagcaggtgtgttgcgtggtgagagagcaagcaaaaaaggtgctaggctctttttaaacaaccagctctcaaatgaaccagcagagtgagaacttactcgttactgaggggagggcaccaagtcattcatgagggatctacccccatgacccaatacctcctatgggccccatctccaccactggggatcacatttcttttttaaaaaaactactttttacttttatttagagatggaatctcaccatgttgcccaggctggacttgaactcctgagctcaagtgatcctcctgcctgggcctcccaaagtgctgggattacacgtgtgggctactcgggaggctgaggcaggagaatcactggagcccaggcagcagtgagctatgatcctaacaggaggtagctccaagggagctccaagggatgtggtaagaatgtatgagtgacgcacgtggaagagtgtctaggagagagcaggcaacctctacagaagtgcaggtcactagggagacagcaggtacaacacagccttaaaagcatggactccagagtcagccacctggttcccagccgcaatcttagatgatctatttaaacttttccagcctatttcctcatctgtacaatagcgatgatggaagtgtccacctcacagtcttattgtggggattgcaacacgcatggcatagagcacatggcagagtgcacatttttaggagctcaattagtatttacttcaagaccgtaagtgtcgctagaaccccatcacatgtctgctatctgcttttcacttctacacaggaatcttctttctccctgtcttgctacacagaccagtgtgttctttcgttgttgttgtttgagatggagtctcgctctgtcgcccaggctggagtgcagtggcgcgatttcggcttactactgcctctgcctcccgggttcaagcgattcttctgcctcaggctccccgagtagctgcgactaccggcgcgcgccatcacgcccggctaatattttttgtacttttttagtagacacggggtttcaccatgttggccgggctggtcttgaactcttgacctcaggggatctgcccgcctcggcctcccaaagtgctgggatcacaggcgtgaggccccgcgcccggcctggtttcgggattttaagctaaatttctctttgtaaaatccattctagttagttcattatgcaaaaggtacaagggtttatctttgcttttttgtacttgaaataattctttcatcaatttctttcaagcaaacaagttcgagacctccctcaacaggccacctttcttgtgaaaagctgtttacaagatttcgattcaaatctgcctttacaggtcttttggggctacccaagtctttccctccgtcgcgttctgcgggaatgagctgcgcagcgctccgcccgggccccctcaagcctcacctcttgcagcgccttccagttttgagaaaagtcttctggtgcctttggaggtcgcaccacagcaccggggccgcttgctggcttcttgcttacttcccgcgccttgcttttccaaaacctttttttcttcttgtttttcttccgagtgagcgtcttgacaggacccggcttagccacggggctgctcggggcgcgcttggaggcggggaccttcgccttccccatcctgctgccgtccagcgcctgggccggcggccacccgagaccccggcctccccgggcccggcgccctggcagcacaagcgcctgcccaggccaggccgaaacacacccaccgcagggaccccgtccaggaaaagactccggaagagaccccgcacgcgttgcgcatacctcagcacgcacgctccagtccccggaagcgctcgtctctccacaaccggctggaaaccggatccctgcctctggttccgcgcagcctgggcggttcacccgcacgggacttgggccgccgccttagccagcggcatccggggtcatcgacctcgagtttgactggggcaagccgaggacctccccaagatccgggatggggatgagagatgcgaacgccggaagggaactggggggccgctgtgtgtgtagcacctggtagggcagctgagctgggggcactgggcggtggggctagtgagagccgggctaggtcgctcgcctgcgtcctggactctcgagcctttcccgccttgggctgctccttgctcagcctcacagcggctcatcttccacgtacagtggggaaactgaggcccaggcaccgggaggagttcctgccagttcactctgtagcaggacgagccgcagacaagaacccctcagacaccgaattgtagaaggaaagggctttatttagtggggagcatcggcagactcacgtctccaaaaaccgagctctctgagtgagcaattcctgtcccttttaagggcttacaaccctaagggggtctgtgtgagagggtcgtgatcgattgagcaagcagggggtacgtgactgggggctgcatgcaccggtaatcagaacgcaacagaacaggacagggattttcacaatgcttttccatacaatgtctgaaatctatagataacataaccggttaggtcaaggattgatctttaaccaggcccagggcgcggcgccgggctgtctgcctgtggattttatttctgccttttagtttttacttctttatttggaagcagaaattgggcataagacaatatgaggggtggtctcctcccttacttctgccgcctgggttcaagcgattctcctgcctcagcctcctgagtagctgggactataggtgcacgccaccactctctgccaatttttgtatttttagtagacctggggtttcgccacgttggccaggctgtcttgaactcctgacctccagtgatccatccgcctcggcctcccaaagcgctgggattacaggtgtgagccaccgtgcccggccgggagtgggtagatttgatgtgcgtgtgtaacaggcagaggttgatggagtaacagggaagtgaggctcctaggattttggtctgagcaattgggtgtggccatttatcatctcaataaatgtctgcggggagcagggtgaagtatgggggtggagccatgagctccttttcacacttgctgagtttgaacgggccgtcagtcaccaaggagagacgtctaatcagcagcaggatataagattcctaagcttagggaagggtcagtgctggagatgtaatttggaaatcgtcagcacataattagtgttgaaacatgaacctgggttagttcatccaaagagagagtaccaatatagggagtgaagggttaagaccagatagcaggtgctgggggctctccaggggcgaagcagcagaggaggctgagggggagcagtcagtgcagtgggaggagaagcggatgtgagtggcatcagagaatccagggggagaataaaccacatcagatgctgctgagaggctgagaaggacgaggacagagagatgggaaccagatatggcactgagattgtcagcaagtccaccgaaaagggttttctttttttttgtttgttttgagacggagtcttgctctgctgcccaggctggagtgcagtggcgtgatatcggctcaccacaatctccacctcccgggttcaagcgattctcctgcctcagcctcctgggtagctggaactacaggtgcacgccaccatgcccagctaattttttttttttttttgagacgaagttatgctcttgtcgcccaggctggagtgcaatggcgcaatctcggctcaccgcaacctccacctcccgggttcaagtgattcttctgcctcagcctcccgagtagctgggattacaggcatgtgccaccacgcccggctaattttgtacttttagtagagatggggtttctccatgttggccaggctggtatggatctccagacatcaggtgatcctctcgcctcagcctcccaaagtgttgggattacaggcgtgagccaccgcacctagcctaatttttgtatttttgaaaagagacggggtttcactatgctggccaggctgatctcgaactcctgacctcatgatccgcgtgcctcgtgatccacctgcctcggcctcccaaagtgctgggattaaaggcgtgagccaccacacctggcccaggttttctttttaaaaaaggaaaaaaactttgttccagcagtttgtaaaccagggcaatgcagccttctgtacaaaggtgcattccagggaacaaagagaacaaagaaagaggtcgtcttttgtagagaacttcctgcccaggttcccactttggtccacttatgcaaatgaggaaggcacacttgcttagttctgattggttaatacttgctgagttcagattggtcgatgcaggtcacagtcgatgggttgattctggcggcataaacaggaacagatagctgtgaaaccatcccagagttaagtgagagtgggggctttccaggaacgcagaatgtgtgtgtgaccctagtcagcaaatggctgctaggtcctactttgaatttaggcccagttagtaacttgggatccatcaagaaggattggctctttcagggttcacaaagttattggtgaccttttaaagatcaatttcaatggtatgtgggaattgaaggcaaggaagtggagatagccactgaaaataatgtttctaagttcttaaagacagccagaaacagggctatggcaggaggacagtgtgggtcaagggaaggttgttgattgtaatcaagagacaccagagtgtctgggcttggtggctcatgcctgtaatcccagcactttgggaggccgaggcagtcagctcacctgaggtcaggagtttgagaccagcttggccaacatggcgaaaccccacctctactaaaaatacaaaaactagccaggcgtgatggcgggtgcctgtaatcccagccacaagggaggctgaggcaggagaatcacttgaacctgggtggcggaggttgcagtgagccgagatcgtgccactgcactccagcctgggtgacacagcaagactctgtctcaaaaaacaaacaaaaaccaaaaagagacaggagagtcattcatgctgatggagtgagccaggtaccaggatctcgatatctaagcatgcccccttctccaacagcctccttaccttcctgcatgaaagcacacccttccctccagtcccccattcctttattctgctgtatttttctccataacacttaccacctttgaacatactacatatacaacatgtgtctgtctagcaactttgctgtctggctctcttccctagaatttaagctgtgagaggccgaggctgctgtctgcctggcttggggctgctttcctggtgtctagcacagagcctggcctgtttcaggggctcagtgaaacatttgttggctgaaggaatgaatgaatggctctagcagaggggcagaaactaacgatgcaggaggagagagctgggaagggatccagagccagggcctggcaggaagtgtaggtgtgtcctccctgatcgcagaggaggagagaggctgcactttgaggggtggaaagacaaggtgaatccccctgctggtcatcagcttgtgcggctctgtgggtgtaaaagagtggtttggagcatgtgaagtgagtcttccaggagatgaaggggattgccaggccgtttgtgatgatgctgagatctggtgccgtgcagcctgcttctgcgactctcctcatcaggcgcaggcacagagtaggtggagagttgagccagaaccacgatgtctttggcacagcctctcatctgtcagatgggagcggggaccccggagagggagtcagccgaggtcctggcattccttgtgaacccccgtctgtgggtttctggtccagtgtcccttctccagattagatggcttaggcctcctctaagggggtgggcgtgcacatccggagagctgtctggtgtgcaggactgggctgcaggttaccctgaactgcaaccatcttagagcaaggcccagcttgcagcaggaggagctgcaggccgcccaccctagccacggcccctgccctggcaggaagcttccaagagtaaacactgcctaatcgtcccgcccagtagtgagcaggcctgtcccattccatactgaccagattcccagtcaccaaggccccctctcactccgctccactcctcgggctggctctcctgaggatgcaccagcgtcacccccgggcaagatgccctcccctctgtgtggccggaatccttgcctgtggctttctcctgggctgctggggaccctcccatttccagcaggtgggctcatttgcaggagcgggggtattctgggagcctctgggtggggtattctgagctacctggggcgaggggagtgccaaatagctgactacatcagctttggggtttgcgctgggcaggggagtctgtacttggggctttgggggatgaagtgtgctcactgaagagggagttggtgtctcagtacgacctgctcattcggtgaagctgaacagacagatactagtttgtcccaaactgtgtaggttgctcttctctgcctctcccttcctctccctgtctctgatttccccctctccttcttggttggcctcacccacctcctgcctcctgtctccctcttcatccatctctttttgttcttttttctttctctctctctctttttttttttttttttttttttaagacatggggtcttgttatgttgccccagctggtctcaaactcctggactcaagtgatcctcccacctcggtctccccaagtgttaggattacaggccagagccactatgcccggccccatccatctctttttgtcttgcagagttgtcttcaggctttggagccacaggccgtgtcttcttacttgagccctggtgctcccttaaaaggtacttgtcctggtgtcttctctcccggggggagtttctcaggactttcaaggggtatctcaccactgagtcagtggtctgggatttttggtggatctggaaggagaaggtcagagaagctgctgtcaaccctgttaattaactctgttacttcctgccaagttgatataagctggtctgggtgttccagccaggccagggttctcaccctagcttctgttaaatatcacaagggaacggtcaccgattggctggcccctcctgccccatggcctctgctgagctggctgattttcaggagctcttgtggtttctgaccgtggatgtaaatatttattccttctgtgggaaacaagataggtactggctcaggctacctcctaaggccatggatttccttatgataaaggcctgtccccattgcccacaggcccatgtctgtgaccttctccggtgcgagcccccttcccagtagggccattggcaacttgactaatggctgatgggggccagaggcaggtgggctagtggtcaggggcaacaggagggcaaggcccactttgtgacctggttctttgtggtctaggccagaggcacactgaccagtgcctggggccacgctgggggctggatgcagccgacgctgtctgggtatcccatagcctgggtccttccagcgctgccgctcctgaaaggctgggagatcattgcccagggtccctgaccctctaagggctcccttgggagaggacagtgagggctggcctgggcccctgcttcccaagagaccactgggctccactcgtgttcagtttcctgtcggggtccatgatgttacttgtgaaacacctgtgcccagagcagggtccaggaggcagggcaggggctttcccctttgggcagagccaccagggcagtgggaatcttgtcttgatggggtgacccaaagcacacaatagcccaacagctcctcctgggccctgccctttgcgtgcctagtcactaatggggtctggctcttggggtgggggtgacacgcaatgtcttgacttcggaaggccatccttccaagacctgccagcccctttcctgttagctttccactgcttgctctctagaaccatcgccctctgctctccctctccccctccaggccgccctccttcccctggcttccagaggcagaggcagaggcagaggcgggctgcaggcggcatcctacacctggagctgctggtggccgtgggccccgatgtcttccaggctcaccaggaggacacagagcgctatgtgctcaccaacctcaacatcgtgagtgccccacgctggactgtgcaggtccccacggccagggctggtgaccaatgtctgtgggctggtgtatctggtagtctgaatacagtgggttaaactcaggtagaatggctcggggttcttcctcttctccctccctcccctgggtggaggtgggtgaggtcccacaccctctctaggctccatggcacatgcacaccctgcagcctctcactactcaagtcccttcacctggggccaccctcaagcctggcctcttccccagtatccatttgacccccacaaagctcagctaaagcaaccctggcaaatgggatacgggctgctcacactgccctctgcaccccgaccctgccctctctccattctcttgtcccccgctcagagtggcgaggacaggtcacccgtctgaagtctaaacagagactgctggcaaaggagatgcccaccttcatttcttgctagcacctgaatccctgcagccccccttcacttgaaagctggggaagggcgggcagggaagcactcccccactagccgccgtctcagaaagacaaacaaggccaggcgcggtggctcatgcctataatcccagcactttgggaggccaaggcgggtggatcacccgaagtcaggagttcaagaccagcctggccaacatggtgaaaccccgtagctactaaaaatacaaaacttagctgggcatggtggcaggcgcctgtaatctgagaggagcctgcgatctgagaggagcagcgtttgaccggaatatccgactcgtgaccatctgtgtgctctcatccccttgctttggagtttgttttccttgcgttagttggccttcctgagccatgagctgaggagcaacagaggcacggctgactgtgcagcacattttaggagccccccgccccgcccggttcccacacatgctggtggagtagcctctccagctcttcacactccgggggcccctgggagtcagcagctgcctggggctggcaatgcccacccgacgggttacctctctcatctgcccttgcacagggggcagaactgcttcgggacccgtccctgggggctcagtttcgggtgcacctggtgaagatggtcattctgacagagcctgaggtaggcatggagctggaactcagcacaccatacagagcgggaagcccaagtcatcgcatctccatcctctttaacctcttgtcccggatgccccaagcagcatggatcacagaatgcattcagccagacagaccagctgccctcccagctctacccagcactcagcacaggctgcctgactacttctctgagcctcagttgtctcatccctaacacgggctagtcatagggttgttaggaggactaactgggaaacaaaccgaccgcagtcagcaccgtgcctggttggggtgtcctaaatgcaggctttgctgtgggtccgcagggtgctccaaatatcacagccaacctcacctcgtccctgctgagcgtctgtgggtggagccagaccatcaaccctgaggacgacacggatcctggccatgctgacctggtcctctatatcactaggtagccgagctttctgatgggtgctggccagccagcctgggaaggctgctccctcagcctcctgccctctgcaaaggtgaccccagggcaggcacgtgccttggcaccacccaagtgactgttttctctcaccgaggtttgacctggagttgcctgatggtaaccggcaggtgcggggcgtcacccagctgggcggtgcctgctccccaacctggagctgcctcattaccgaggacactggcttcgacctgggagtcaccattgcccatgagattgggcacaggtatgtagccccaccagctgtccccaggatctggcaaggagctgacctgggtacccagggtggaggtggtcttggcaagcagtgggtccttgtagagtttctccagaggagcctgtacccctcaccccgacagactcaggtgtgaggacaggggaacctgatactgtttgattaaaagaactttttttccaaaagacgagcaagacacctttagcaggtagaaaataacttctgtagaaaattcaggtaaagaaagagcaggctgtaaaaattatctcaaatcccaccatttagagataatgtctcttcacattttgtatttaatttcagtcttttctttacatacacacacatatttcttatttgcaaaattgggatttagtttggatccctgaaaaaaaggaaaattgtgattatgctgtgcattgctttgttacctgctatttctttttcttttcttttcttttttttttttgagatgaagtttcgctcttgttgcccaggctggagggcaatgacgtgatctcagctcattgcaacctccacctcctgggtgcaagtgattctcccacctcagcctcccaagtagctgggattacaggcatgtgccaccacgcccagctaattttgtatttttagtagagacagggtttctccatgttggtcaggctggtctcgaactcccaacctcaggtgatccacctgcctcggtctcccacagtgctgggattacaggcgtgagccactgcatccagcctttcttttttcttcctagggtaagtgcaggatttacctgttctttatgtaataatatatcccaaacattatcccaggtatcttagaggtgtgcaccgtaatttatttaatcagtcccctcttcttggatgtctaggttgtctgaacacgtcttcctgttgtgaatgttatgcattcttgtgggcaaaccttcactcttacctataaccatttacctagagtgatgggtttcttttcatttctttagttttttaagtatgaaaataatacccaattgttgtaaaaattcaaacagtgcagagatttctaaagtaaaaagtgaatttccacattccttgcccaccaacccccacccgacccctttcaacccctctgagcctgggagggttgaggcagggttcctgggtgtgggacaaggcagggctccttctccctcagagggagcatagttcccttctgctcctgtgatgcagaagacgtgagcccccaaactggggcttagcctgggagggttcttggcttcaccgaggaaagaattcaagagggagcaggtggtgttagacagcaactttgattgatgtggcagtgggcagagtgtacagccctgtgactgtatacagcacagcatagccccttttgaagccaggctaccccatagacactgtgcccaaaagagcagctcaaaggcagggctgcagtcctagttaatacccacttctaattatatgcaaattaaggggccagattatgcagaaatttctagaaaaagggcagtaacttctaggttttcgtcatggaaaaggggcagtaacttctgggttttgccatggcaatggcaaactggtatggcacactggtgggcgtgtcttatggaaaggggcttcccacccctccctgttttagctagtcctctggtccagtgtccaagcggggcctccagagtggagtccacctcctacctcaccggtgcctggcctctcccaccccattaggagtcctccatcagttccgctttgggtaaagcaagctctgttgtgacagtttggaaacggttcaccttcctggcctaggaatgcaaacaatggccaagggcaagcacgttttaactgaactttaaaatcgtgctttcctcacagtaggtgaatttcacgctcaacacatccatgtaaacagtccccagagcagcccttcaaggccccggccagtccccacctccccacagactcctaacaccatgatttaatgtggcttgcacatttttaaaggcttttgatatttattagcaaaagatgcgagagccaccctgctgggctagcgctcccttctgggggaaactgaggcagggcgcacgcgaccctctccactgcgcccagttagcagatggcggcgtcaggggtcgacccgggtcggaaaactcgctggcgctgcggcactagggcgccgggccgctgactcgccgacccccgtcccgcccccacccccgcccccgcccctgccggccgccttagcgcaactccccgccccccgaccagcttcggcctggagcacgacggcgcgcccggcagcggctgcggccccagcggacacgtgatggcttcggacggcgccgcgccccgcgccggcctcgcctggtccccctgcagccgccggcagctgctgagcctgctcaggtagcggccgccccgtgggaggggcgcgcgagcctccagccagcccgctgggccgccagcgccacctctctctacgtccgtccccactccgcattcagccctccttcctgtcccacccctccgtccaacccacccctccgtccaaccccgcgcccaccgctccgtccgtggaggggcgggcgcgcgagcctccagccagcccgctgggccgcccgcgccacccctccctacgtccgtccccacctctccctacgtccgtccccactccgcattcagccctccttcctgtcctacctctccatcctgacccactcctccgtccaaccccgcgcccacagctccgtcccatcccgctgcgcccactcctgcgcccacccctccgtcccaacccctgcacccacccccccgtcccacccacctgccccaccccctgcacctccccccgtgctgtcccactctgcggccacccttctgtccaacccctgcgcccaccgctccgttccaccccctccctgcgcccacccctgcgtcctccctcgcccccttgcgcccacactttcgttccagccaatctgggcacgcacccctccgtccatccccatcccgccccttgactccacatacactccctggttctctcccacttgcctacacccacccctgcatcctaccctcctccatccacccctccatctcagccccctgcacccaccccgttcctgggcccaccctgttcctgcacccaccccctcacttcacccccttacccttcgtctgcctccacccgcccctacccctccgtccactctccacgctccatcagtcccacacccctatctcccccacccgcgtacatgtatccctgcgtccccttcccgccgaccgcaccgctcccgggcctaacctgcatctgctccatcccactcagacccgtccctccgtcgccgctccctctgctggccacccacctctgcgccggcaggagccttagtcttggtcccagccaagagccggctcctggtggggggcgcgggccgagaactcctgttcccactcacaaaaggccacgcttccaaacgcttccatcctcgtgcccactcctccgtcccgcctcctcccggtgtacaccccgggactgagccgggcctgagccgggccttgtcgcagcgcaggacgggcgcgctgcgtgtgggacccgccgcggcctcaacccgggtccgcggggcacccgccggatgcgcagcctggcctctactacagcgccaacgagcagtgccgcgtggccttcggccccaaggctgtcgcctgcaccttcgccagggagcacctggtgagtctgccggcggtggcctgggattggctgtgaggtccctccgcatcacccagctcacgtcccccaaaacgtgcatggtgagaacctgctgggtgccgtgctaggctgaggtactaagccagggcggcttagtttaatgctgtctgtgccctctagaaattatttaaaatgtttgaacaaaagctccaacatttttgtttgactgggccccacaaattatgtagctagtcctgggagggcccctgtgcccaaggactcctggctgagtgaggacaccaatcttaaacagttaccaaggacttccccatctattgtggctggagtcagactggagggcttcctggaggaagtggcctctaaactgaacccacagcagaagtggggctggtagggggaggggagatgaaggagagcaggcaccccaaaagacagacttcctcgcaggattgcataggacattcatgggctccaggcacttttgccttgatgggccccttcctccacaaaaaaattgagaattatgttttaatattcttatacaatgtataaagttttatgtgttactataaatacaagtctttttttttcctatttttttttttttttgagacagagtctccctctctgctcactgcaggctccgcctgccagattcacaccattctcctgcctcagcctcccgagtagctgggactacaggcgcccgccaccacgcctggctaattttttgtatttttagtagagacggggtttcactgtgttagccaggatggtctcgatctcctgacctcgtgatccgcccgccctggcctcacaaagtgctgggattacaggcatgagccacagcgccccgccaagtctttttttttaaattcttttgagacagggcctcgttctgttgcccagggtggagtgcagtagcacaatcatagctcactgttgcctcaacttcttgggcacaaacgatcctcccacctcggccttggagtagctgggactacaggcacatgccacaatgcccagctaatttttaaattttttgtagagatggggtctccctttgttacccaggcttgtctaggactcctggcttcaagccatcctcccaccttggcgtcccaaagcactgggattacagacatgagccaccacccacgcctgatcagcaaatctattaatattatatattacaacattaattttgacctggaagttcattttttcatttttttttttttttgagacagagtctcactctgtcacccaggctggagtgcagtggcacaatcttggcttactgcaacctccgcctcccaggttcaagtgattcccgggcctacgcctcccgagtagctgggactacaggcatgtgccaccatgcccagctaagttttgtattttttagtagagacagggtttcatcatgttggccgggctggtctcgaattctgacctcaggtgatccgcccgccttggcctcccaaagtgctgggattacaggataagccaccacacccagcctagttcatttttttcttctgattttattttatttatttatttattttgagacggagtctcgctctgtcacccaggctggaatgcagtggctcaatcttggctcactgcaagctctgccttcagggttcaagccattctcctgcatcagcctcccgaatagctgggactacaggtgcctgccaccacacccggctaattttttgtatttttagtagagatggggtttcactgtgttagccaggatggtctcgctctcctgacctcgtgatttgcccgcctcggccttccaaattgctgggattacaggcgtgagccacagtgcccggcctttttccttctgattttaaaagaaattaggccaggtgtggtggctcacgcctgtaatcccagcactttgggaagccaaggcaggcggatcacctgaggtcgggagtttgagaccagcctgaccaacatggagaaatgccatctgtgctaaaaatacaaaaaattagccgggcgtggtggcgcatgcctgtaatcccagctactcggaaggctgaggtaggagaattgcttgaacccaggaggcagaggttgaggtgagccaagatcgcgccattgccctccagcctgggcaacaagagcgaaactgtctcaaaaaaaaacaagaaagaaaaataaattaaaacatttgcctcttgagcttcaagtcagtgacaagttaagaaggaaaaaaagaaaaaagacacaaaaaacacatttccatgggcccccaaaagtgtgacaggacctggtcatggtcccggttccccatcgatgggtcagtcatgccttgtcctctgagggcaccagtgcccacggtgcagagtgttggctgtgtcagtgtgtcctgcagtctgggagggacagttaaggttggacactggcctggaaggccctggtggcccctgagctcgccacccacctgtccaccctcctaggatatgtgccaggccctctcctgccacacagacccgctggaccaaagcagctgcagccgcctcctcgttcctctcctggatgggacagaatgtggcgtggagaaggtcagagccaagagtgaatgagtgggctcctgtgagcacgtgcacgtgggtgcctccagccaggccgccctattcctaggtcaggaggcaggaccagtatggggcagagagtcttggagttggccttggggactgtcctttgggttggtggtctgacctctttcctttagcatttgctcccatgcagaatgggaatgtgggctgcctgttgtatggggggtgcccatgggtgtggggttcctttgggtggggtccctgtgtgaaggtccttgtggatatggggtgtctcgggggggatccctgtgtaaggggtccctgtgagtgtagagtccctgtgggtggggtccttatgtgtgtgttggaggatccctgtgtgttgaggggtccctggggggttctgtgtgtatgttggggggtctctgggtgttggaggatccctgtgggtctgggggatccatgtggctggggtacctgtgtgttggggggtctctgtgtgtgttggagatccctgtgtgttgggggatccctatgggtgagttccttgtgtgtgtttgggggtcgctgtgggtggggtccctgtgtgtgttggggatccctgaggatgttgggggactctctgtgtgtgttgggagtcctgtggtggggtcactgtgggatgggagatgaagccatccttgccttgcagtggtgctccaagggtcgctgccgctccctggtggagctgacccccatagcagcagtgcatgggcgctggtctagctggggtccccgaagtccttgctcccgctcctgcggaggaggtgtggtcaccaggaggcggcagtgcaacaaccccaggtaccgcagggagggtgcttttctgtcagggagtgtggccataccatagtccctagttgaaggcagtggtcaccctgctctctcaccctcctgtctgctgggcattttcagacctgcctttggggggcgtgcatgtgttggtgctgacctccaggccgagatgtgcaacactcaggtaggcctgcttcctggggtaggagggggcagctggtggcaccgggccctgggggagccaaagtgaccatctgtggttcacaccaggacacatttgagaaggacattggggccaggtgaggtggcttatgcctgtaatcccagcactttgggaggccaaggcaggtggatcacctgaggtcaggggttcaagaccagcctggccaacatggtgaaatctcgtctctacagaaaatacaaaaattagccgggcgtggtggtgggcgcctgtagtcccagctactcgggaagctgaggcaggagaatcacttgaacccaggaggtagagcttgcagtgagccgagattgggccattgcactccagcctgggcgacagagtgagactctgtctcaaaaaaaaaataaaaattaaaaaagagagagaaggacattgggaccccagttcataaaccaggccagtcctgctgatgcccacagagcccctgaagcgtcccgcctccctccctgagtgccactttgccctccagagcgcatctctgcagggagaacctccccactaggaatacagtgcgctgctgcatgcctgcaaaggaattttttaaatattatttttatttttttagacagagtctctccctgtcacccagactggagtgcagtggtgctatctcagctcactgcaacctctgcctcccaggttcaagcgattctcctgcctcagtctcctgagtagctgggactacaggtgcccgccaccacgcccggctaattttttgtatttttagtagaggaggggtttcaccgtgttagccaggatggccttgatctcctgacctcgtgatccgcctgcctcggcctcccaaagtgctgggattacaggtgtcactgcgcctggccgaaggagtcttttatttataaattgaggtgacattcatgtagcatgaaatcaagcattttaaagtggcaactcagtggcctttagtacactcacaaggttgggcaagtactgcctctgtctagtttcagaacgtttccagtactctggagtactctggagtgaaccccatatggtaggctgtcactccccatttctcctccgccactcagcggccattggtttcccttctgtctctgtggattgacctgttctagacatgccacgtacctgaggccagacaacaggtgtgcttcctgcctgccttcctcccccagcggcacgtccccaaggctcacctgtgttgtagcctgtgtcagcgcctcattcctctttctggctgaatcatattccactgcagggatagaccacattttcatccagtcgtctgctgatggacatctgaggtgttttcaccttttggctcctgtgaacagagccgctgcgaatgtgcttgtacatgtttgaatccctgttttcaattcttttggcagtatgctgaagagcggagttactggatcgtatgggaattgtatgtttgacttttttttttcttttttttttttttgagacagagtcttgctctgtcgccaggctggagtgcagtggtgcaatctcagctccctgcaaccttcgcctcctgggttcaagcgattcccctgcctcaccttccggagtagctgggattacaggcacgcgccaccatgcctggctaattttttgtatttttagtagagatggagtttccaccacgtcagccaggatggtctggatctcctgacctcaggtgatctgcccgccttggcctcccaaactgttgggattacaggcatgagccaccgctcccggcctatgtttgactttttttttttcttatttttttctttctttctttatttttttttttttagagatggagtctcgctctgtcgcccaagctggagtgcggtggcgcgatctcggctcactctaagctccgcctcccaggttcaccccattctcctgcctcagcttcccgaatagctgggactacagacgcccgccaccacgcccggctaatttttttttgtatttttagtagaggcggggtttcaccatgttagccgggatggtcttgatctcctgacctcgtgatctgcctgcctcggcctcccaaagggctgagatcacaggcgtgagccaccgcgcccagcatgtttggcttttaaagaaactgccaaaccgttttccacagtgcctgaactgtttcacattcccaccagcattgcgccagggttccagtttccccacatccgctgcagcacttgctgttttctgttgttgttttttcttttctcttcttttttttttttttttttttaatagagatggggttttgtcatgttggccaggctggtcttgaactccgaccccaggtgatccgcccaccttagcctcccaaagtgctgggattacacgcgtgagccatggcgcccggcctgttttctgttttttgattttggccatctcggtggtatgaaatggtagaaagattctttttacattgagttaaattctatctcctgcttcgatggccctgggtgtgggtttgtccctggctgtattacagttctgcatgtggtgagaccctccctttcctccttctccaaatggaccaccaagacctccccagaccgtgaggggagggtctttggctggagcacagggtggtgggatttcgtggaggcagtgtggtcagtgtggctgtccagggagtcaactccggttatcttctgtcagcccataaaagtccaagacgcctgcctgagtgcagaggcttcggtggtgaggtctttgctccatgctttggttacctgcctctaggtgcactacctaaagaatacacatccccgtccctgttttattgagttcaggccttggaagcagaggctctgagcgtaatgctctttcctggctttcttcttcgttgctgccctgtgttctttacggattccccggggttttcccatcaatagagagaggcaggcacttttgtcaccccagtttacagagcagggaaccgaggcacggcctggagctgaggccacacccacatcttgatcctgtactgtagggtgccatgtagtctcccagtgacaacacccgccccccgccccaccgccatccccctcctctgcctcctcctggccaggcctgcgagaagacccagctggagttcatgtcgcaacagtgcgccaggaccgacggccagccgctgcgctcctcccctggcggcgcctccttctaccactggggtgctgctgtaccacacagccaaggtggggcctgcggagtgtggggttgggggaggagccagccctggagaccctcggacagggcagagtcataggggggttggcctactatccctccagcactgggcaaagtggttcaggctctggcatcccacagaccatggatgacatagtggccaggcctcgctggtagatcaggcactgacatcccatctctgagtctcaatttcccatctgtgaaatggagataatagcagtaggtccctccctgggcgctacaaggattcagggagataatcggaaaatgccaagtgtgttccttggttcatgatactttttttgtgagacagagtcttgctctgtcgcccaggctggagtgcaggggcgtaatctcagctcactgtaacctccgcctctgggattcaagggattcttgcccctcagcctctcgaatagctgggactacaggcttgcactaccatgccggctaatttttttgtatttttagtagagatggggtttcgccatgttggctaggctggtttcaaactcctgacgtcaggtgatccgcctgcctcggcttcccaaagttctgggattacaggcatgaaccattgcgcccagccttggttcctaattcaataccattaattattagattagattaggatcgtgattaggattattgccttaggaggtgggatgtggggaagatagaaacccttgccccagatgcaaaggatgaagctgggtgggggctgggggacttgcccctcctgctcggttcaggacaccctttttcactctgccctcccaggggatgctctgtgcagacacatgtgccgggccattggcgagagcttcatcatgaagcgtggagacagcttcctcgatgggacccggtgtatgccaagtggcccccgggaggacgggaccctgagcctgtgtgtgtcgggcagctgcagggtaggcgtgtgtggacattggcgatggccctggggcctacctgtcctatcggaaggctcctgggggcaggttggtgggtgctggccctgatggagctgcagtgccctctgcaggggagtggtgctggggaaaaggatctggacttggagtcagcctgggttaagggctgcagtgtgaccttgggcaagtcactgagccctctaagcttgcttcctgtgtagatggtggggtgctatagaagtgttgctggttttgtggatcccagaatctcagagctggcagggctgcagagtcattgaggccagcaccctccagtgacacgggccctctgtccttccctttgcatagacatttggctgtgatggtaggatggactcccagcaggtatgggacaggtgccaggtgtgtggtggggacaacagcacgtgcagcccacggaagggctctttcacagctggcagagcgagaggtaggcggcctccctcggggcagaggctgggcttcccccagcctccaagatggccacagcccagagcgttggtgcaggggctgctcaggtcacagggcctgcacactcactcagccctggatgcctcctgtggtgtcagcgtctccctcttccacttcgccacccttctgtggcaggctcaggttttggccttgatgctgctgggactgtggtgcctcagtaatggtcactcactgtagccgtgctgcaaaaaaaacacagacattggccgggcgctgtgctcacgcctgtactcccggcactttgggaggctgaggcgggtggatcacctgtagtcgggagatcacctacagcctggccagtatggtgaaaccccatctctactaaaaatacaaaaattagctgggcatgatggcgggcgcctgtagtcctagctactcaggaggctgaggcaggagaattgcttgaacccaggaggcagaggttgcagtgagccgagatccctctgcactccagcccgggcaacagagtgagacactgtctcaaaaaaaaaaaaaaaaaagtatggacgttgtgcattctgtggcagctaccctcttctctcctgctcaagaaatcccactgagagggacacaagtgaatgagagggttggtagttacatttggaaaatctttgactttggtgtatatatgaggtcaaaaaccatttgcaaatgccagtgcttctatggagagcagagacttgagccctgcctccctctggcttgccccactgtgctggagaaccttggacccggtcccttctcccagccagggcagagccttggcaggtggtcctccagcctgcttttaattgcccccatgacaggggactcactgctgctggagccagccccatggcattgttcaatttttcccgaccagctaagatcagctccctttgtctgtggtgtggtggctgtgaggtccacgcatctctccttcttttcttctttctagaatatgtcacgtttctgacagttacccccaacctgaccagtgtctacattgccaaccacaggcctctcttcacacacttgggtgagttgactggaggactcccacccagttagctagactgcaaaggtgcagagcactgttgccaagatgccctcacttctgacatcacccgcaagttcagggggttccccaaaccaccctcaggcttgatagttgactaggaagactcccagagctcactgagagctgtggcacatggctgcggctccttccagaagaacacaggttagaattgtccaagggaagagatgtaggcagagtctgggagggtccaaccaggaggcctgatgtctcagggatgtgacacccttctagcattggagcgtggccatacgcatggagtattgcccacacagaaagcccactgagtgggagttgagagtttttcctggggtttgagtgcaaagacatgattgactaattggccaggtggatactctcagtctcttggtgacccagcccctatcctaaatcacatagttggtctttctggtacagccagcccctgccctaaaggaggacacttctgcctggtgtgacccgtgtttcctcttggaagccaacagcaaaagctggacttctctttgggcaaggcccgcttctttgctattgagggccacagtgggtctttctggagtgtgtctgcacctaacctttgaagccttggttgccggcacttgccatggggtccctgagccctgagcctgttgagttctgtgcgtgagtgcacttggtcatagcactcaccaggttgtggaaagaggcctagagcctccgctgtggggaagcctctagctcagatgcctgtggctccttagaggagggctggggaccccgggaaggagagtcactgacatgtgcctgtgaggaggatgggtgctcagctccacacagctaacagggctggttccccgacagcggtgaggatcggagggcgctatgtcgtggctgggaagatgagcatctcccctaacaccacctacccctccctcctggaggatggtcgtgtcgagtacagagtggccctcaccgaggaccggctgccccgcctggaggagatccgcatctggggacccctccaggaagatgctgacatccaggtcagcaggagagcctgggggaggccagtgggggcttcttcttgggggctatggctgcttgctcgtttgtctatccatccattccctgattcgttcatttattcattcagcggtcacttacaggggacccactatgtgttgggccctgtgctaggcaaaatgtagctagctcctccaggggcttagggtcccacaaatatccaaatgtgcctgtgcccagagcccgtgggagaaggccctgcagttctgggatcaggtaaggttggagggcccaatgcaggggtccagggctccctgggaaagagtgatggagctgaggtgtcagatgagcagatgttgctgggccaagcagggaaggaagcgtatggctgagggaacagtgtcagtgtgggagggatgaaggaaggtcctactgtgtgggtttgtggggagatgaaggcatggacgcaggtgcagtggcatctggggagtaggccttggtgctgaggaagctgagaacagatgctggctctcactgcttctttggtgcagtgtgtgtgggaaccggaaggccttgttcaggcgtgtcctcagtgacgtgtgctcgcccatgtatgtccccattggtgcttcgctgaggaaggcacgtggagggtggagagacataagcgcaggctgaaacagacctgagaaccttgggagaggggcccagtctcagcggccggagcagcgtcctctgcccctacagcagccagagacaggagggcctcccacagatcaggccaggccgggccaaagcaagcccctgtgagcggcttatcccttctcttcccctgatatggttcccttcctcccctccccttgcctgggacattgtatccagatgctagctgccgagtggctctcccatcatcctctgcagtgtgtaaaaaagcagattcccgggtcctctgcatattccctgaatcaggacttccctgtgttgggcctgagaaaccgcaccgtaaccaacacaggcttgcggcactggccagatgtgggcatcgagggggcaggtgcggaatgtcacctcgccctgggctctggcctccaggctggcctctttcttgggctggtcttgggcacaggacccagttaccctcctgaagagccttaggcccaggaacctgctgaagttcttcctagtgctctccgggccagtcccaagccagtagctggccacaggtccccagggatccagtttcttcctgccgaccctaccacaggtccccagggatccagtttcttcctgccgaccctacgggcctcagctctggctccagaagcactttctgtgctggccctgccctagcccttcttgggctccttagcccagcctaaggtgggcctgcctcctccactgcactttatcctctacccagccagcttagggaaccttctctgtgctgcccaaataccctatcatgtaacccaccaatgacttggtaattacctccccgagccctctatcccaacccactgagagctccttgcagctcagccagtgtcctgtgcactgtgctatccccagagcctggtacaggtcagtgttggtgattgcttcccgttatttttgtctttgttgtttttttagagagggtctcactgttggccaggctggagtgctatgttgcccaggctgctctgaaactcctgggctcaagtgatctgcctgcctcaggctcccaaagttttgggtttacaggcatgagctaccgtgcctggccagtgattgcttgctgaacgaaagattatagggatgcaagaagaagttggaaggcttcccaggggaggtggccatgacagtgaccctcagggaacccactggacaaggcctgaagctctttgtctgcaggtttacaggcggtatggcgaggagtatggcaacctcacccgcccagacatcaccttcacctacttccagcctaagccacggcaggcctgggtgtgggccgctgtgcgtgggccctgctcggtgagctgtggggcaggtgagacctggggaaggctcatccacagcacggcttgcccctgcagggaggcggcctagccctccctcttccctcccagggctgcgctgggtaaactacagctgcctggaccaggccaggaaggagttggtggagactgtccagtgccaagggagccagcagccaccagcgtggccagaggcctgcgtgctcgaaccctgccctccctagtgagtgtggtgctgtctgcgcagctccaagggggagagagggttccgctggggctgctgggctctgtccctggcctatggggcccatgtggcagggccgggctgagctgctcctgtgcaggctctcattacccctgcccacagccctgcaaggggggctctgtgagtgcccccattctgcaggtgaggacactgaggcttggggcagacatggtgacaatgtcagcccagtgggacccacacctgctgccaccttgtctgggccaccgaggcctctcttgagctcaggtactcatggtgagatggaggtgattgcctacctggagggttgtagggagacttgcggagctcctggtgcaaagcccctggctgtcaccacacctgacggggcacactgttagggacgaggccattcctgctgggtgcaggacagggcagctgctcaccagcctgtgattcggttgtcctcaggctcagccgtctggcagcctgggaacacctggagaggctaggctggccgtagtgcccattgcttgtcccagaccgggggagtacatcagcacctgccaccccatcaccccaggccagcctgggacctggccagggtcccgacgctctgtctccttcctcagctgggcggtgggagacttcggcccatgcagcgcctcctgtgggggtggcctgcgggagcggccagtgcgctgcgtggaggcccagggcagcctcctgaagacattgcccccagcccggtgcagagcaggggcccagcagccagctgtggcgctggaaacctgcaacccccagccctgccctgccaggtgagcccagggctaggtggggctgggagagggccttcctggcagagctcgtccctgcgctgagcccccatccttctgagaatcccctcctcctgaggcctccggcggggcctcaccatccagggtgatgggcagtgtcacctggcggttgtaagtgctgctgtcagagttccttactacccaggagagcctgggcccattgtttccctctctgagcttccgagcccctgctctgaaatggggatgccgacctgcctggggagggggggcttcgaggatgaggtcaaactgaacggagtgggagatgtcactttctcatcaccaccatctcccccgtgcccacgtggctgcatctcatcccctcagtgtccaagttgacagtggcttatcatcctgccctgccactaacgagctgagtgacagggcaagtcccctcctctgtgggcttcagttttgcgacctgtccggtgggaggggattggtctggattgttggtggcccactcatagctctggactcctttccccgcctcgtcatccgtggcagacaaaacagtcaccactcttccccgctgaggccagatagggcctcagaatccttctcacacagctctccaggcagccactttagcgcagggctgactcacagctgaaacccattggccacccttgaacctggtgatccaattccatgtggcacctgtttctctgcacctgctatggtgcatggagtcagtgattacctggctggaggtcggcctctgcctctggagagtaggagggatgggttctcttttttttttttattaaaagacagagtcttgttctctcacccaggctggtatgcagtggcatgatcttggctcactgcaacctcctgcctcagcaagtgtgcgccaccaagcccaactaatttttgtattttttgtagaaacagggttttgccatgttgcccaggctggtctccaactcccgggctcaagcagtctgctcacctcagcctcctaaagtgctgagctaccgtgcctggccagggataggttctgtctctgcaccctgggtgcaggtggggtgcctgactgttgagcagcgagtgcttgttgaatgggaacctgctggctgatgaatggggaacccggtgcttcagggagagaccctgagcttcacttctctgtggggctcctctttgggctcctggatgttggggagcaggtccccttcctccctgcccctagcagctgggctataccttcccctgggtggcagaggcagggcctgatgactgtctcatgccatcctcaggtgggaggtgtcagagcccagctcatgcacatcagctggtggagcaggcctggccttggagaacgagacctgtgtgccaggggcagatggcctggaggctccagtgactgaggggcctggctccgtagatgagaagctgcctgcccctgagccctgtgtcgggatgtcatgtcctccaggctggggccatgtgagtgccctgggcatgagggtggctggggctgttgagtcctttacctggctgggagaacgaggagcacccattgccaccgtcctccaggccagagcaagaacaccatccttctgtgggaatgctgtctgagggccacccctgctcagaaaagaagcttagaaagagggctcagggcccctgggaaggctcccattccccttgcaagccgggctgagggaagcatctgaggagagtgtaatgcagctgctgtgcagagaaatgctgccaggctcccgcctggcgtccaggggctggaggctgactggccttgctctctggcctgggtgctggcaaccctcgcccctcatggctggggggattgcagggccaggcatgctcccatgtcccactcttggtccccagctctcggccaggcccacagtgagcactcatgctgctgaggagcctgcaaaggtggggtgtgcagcaaggatacccgctgcgagaccggggagccgatctcgccaagggaggaggggagggagcccctggtgcacacacgccacttcctggtctctctgctgctgcctgagaagatcgagacggggatcgctgggtcctcagaggaggcccagacccaccagcttgttgctattccccacagctggatgccacctctgcaggggagaaggctccctccccatggggcagcatcaggacgggggctcaagctgcacacgtgtggacccctgcggcagggtcgtgctccgtctcctgcgggcgaggtgagggcccccgggatgctcctggggaccagcactcatggtaactctcctgtccacttgcatcttgcctcgttctgaaaagcatttgaggtggattgcagaaaatccagactatatgggaacacgtggtaatacacaaggagactaagcatagtagctgacagccacttcaaatgtgggtgttgattggctgaaaggtaggaaaagacaataacgcccggcagtgtggcacgagagccattccttatggtcctagcagagcggccggggggtccccaattgatgacccgagcagagaaaccttagctttaagatacacagcgttcttctattttcccaatcttgttttattgcagtataacacagatattataaaatttaccatccaaactgtttctccctgtgcaggtcagtggcataaaagcacagtcacattgttgtgcggccatcaccaccaacctctccagaacttttccagtttcgcaaactggagctctgtccctgtgaaacacgaactcccatttccccctccgcagcccctggcaacctccattctcctttctgtctccagattccacaattctagggaccttgtagaagtggaatcatatagcatttgcctttttgttactagttttcactcagcatgatgtcctcacagttcatccatgttgtagcatgtgtgagtgtttccttcttaaggctgaaaaagattccattgtgagtgtatcctttacaggtttatccatttattcatcagtggacacttggcttccttccacactttggctattgtgaataatgcttctgtgaacatgggtgtgcaaatatctgtttgagttcctgctttcagttcttttgggtgtatatctagaagtgtggtagctgggtaagatgagaattctatgtttaatttttgtggaactgctggactgttttccccagtggctgcaccattttacatttccactaatggtgcataagagttccaatgtcctcccatccttgccaacactttttatttctatggttttttttgtttttgtttttgtttttgagacagagtctcattctgttgccgaggctggagtgcagtggcatgatcttggctcattgtaaccttcgcctccggggctcaagtgattctcgtgcttcagcctcccgagtagctaggactataggcgtctgccaccatgcctggctaattttttgtttagtagagatggggtttcaccatgttggccaggctggtcccaaactcttgacctcaggtgatctgcctgccttggcctcccaacgtgctgggattacaggcgtgagcccccacacctggcctatttctgtgttttttttataatggccatcctaatgggcttgagaagacacaccatgttcttaaacgaaaaccctgaccacttgctcagtaaaatgtcagcctgtttaaaaccgagaccaaaaagagatttctttttctctcttttcttttttgagacaaaaaagaaaacctctgtcaccaggttggagtgtagtggcacaatcttagctcactacaacctccaccacctgggctgaagccatcctcccccctcagcctcctgaatagctactataccctgctaatttttgtagttttggcagagatgggatctccctatgttgcccagcctgatctcctgagctcaagcgatccttctgcctcggcctctcaaagtgctgggattataggcatgagccactgtgcccaaccaagagattttttttctttttcttttttttcttttttttgagactaagagttttcctctgtcgcccaggctgaagtgcagtggtgtgatcttggctcactgcaacctccgcctcccatgttcaaacgattctcatgcctcagcctcctgagcagctgggactccagctatgtgccaccacacctggctaattttttgtattttattttattagagagggggtttcgccatgatggccacgctggtctcaaactcctgacctcaggtgatccacccgccttggcctcccaaagtgctgggattacaggcatgagccactgagcctatttcttttgaggatattcctaaaagagagacttgagaaaactggccctaataacatctttatgatagacacaatcagagattttcatattgtgatttttttttcttttttttttttttgagatggagtctcgctctgtcacccaggctggagtccagtggcgcagtcttggctcactgcaacctctgcctcctgggttcaagtgattctccgtctcagcctcctgagtagctgggattacaggtgcgcaccaccacgctcagctaatttttgtatttttagtagagacggggtttcaccatgttggtcaggctcgtctcgaactcctgaccttgtgatccgccgcccaaagtgctgtgattacaggcgtgagccactgtgcctggcccatattgcaattcttataatgcctctcggtcaacaataacagctaccatttgtcaagtgtctactgtgtgccaggcacttgttatcttcccttttaaaaatctttataaatgattctgcaaggtagatgccattatctttttttctaaatctaagattcagagggttaagtcagttgtctgaggtcacacagctggtaagtggcagagccgggattgaaacccatgcgggccttatgtgctagaggtgtccagtgagcctgggctgcagtccttgctgagcctgtcccttggggctctgggtctctgctttgtccacgcaggtctgatggagctgcgtttcctgtgcatggactctgccctcagggtgcctgtccaggaagagctgtgtggcctggcaagcaagcctgggagccggcgggaggtctgccaggctgtcccgtgccctgctcggtgagtgaggggagcaagactgtgtgctggccttctccctgtaagtgggagacccgagccttggctccatgcccggtgacctgcggaggggggcaggtgctgctggctgtgcactgtgtgaggctggaccatggccgccccatccccctgcctcactccaagtgcaggccagagccccggcccagcccctttgaggactgcaacccagagccctgccctgccaggtgggccccttcccaaggagacagggggtgctaggtctgcatcctggctctttcctcacctccaagccagaccttttgaccctcagtgtcctcaccagtgggagcaggtcattttgtgcccccagaagactgggggagtttaatgaaaggattagatgcatgtaaagtacatgctaaatgcaatgagtgtaaaatgcatgctcgatgcaacgcgtgtaaagtacattgcacaggatctgggatgctgtgggtgcacatggttgctggtgcgtttcttcatcgcctgctctttatggagcacctaggccccggggccgtcctggagctaggggacacagcagagaacaaggcagacaaatgtccctgacctcctggagcaaatgcagggggaaagggggacagataataataggacaggcggggaatgcagtttgatggatggtgttcagtgcgatgcagccaaacacagcgggaggggaggaggggagggctggcggggtgggctccagggcggtggtgctgggatcactgttgaagacagacatgcagggcccttgggtgcccggacccctgcccccactgtctctgggatacgacatctgtcgtttgccctcacctttctcttctgtaaaatgggtttgtccaaatgttctgtccactctgccaagcctcttggtgaggacacaagggggcctccagaaagagaacctctccgggcccttcccagcttcctgtctcttcctagtctggggaaatgaaggggagacctggctcccctgggttcccaggccctggggctgtttggggtccctgactccagtttgctccaggtggcagtacaagctggcggcctgcagcgtgagctgtgggagaggggtcgtgcggaggatcctgtattgtgcccgggcccatggggaggacgatggtgaggagatcctgttggacacccagtgccaggggctgcctcgcccggaaccccaggaggcctgcagcctggagccctgcccacctaggtgagtcagccggtgatgggaggggcagctcctggtgtgtgcagatgccaggccaggcgctgtggtgtgtgcctgtaatcgcagctacttggaaagctgaatcaggagaaccacttgagtccaggagtgcaagtccaacctgggcaacacagtgagacctcatctctaaaaaaaaaacaagacggggccaggtgtggtggctcacgcctgtaatcccagcgctatggaaggctgaagcgggtggattacctgaggtcaggagcttgagaccagcctggccaacatggtgaaaccccatctttactaaaaatacaacaattaggctgggcgcggtggctcactcctgtaatcccagcactttgggaggctgaggcgggcagatcacctgaggttgggagttcgagaccagcctgtccaacatacagaaaccctgtctctactaaaaatacaaaattagccgggtgtggtggtacatgcctgtaatcccagttacttgggaggctgaggcagaatcgcttgaaccggggaggccaaggttgtggtgagccaagattacgccactggactccagcctggctaacagcagcaaaactccatctcaaaaaaaaaaaaaaaaaaagaaaacccacaaaaattagcctggcgtggtggtgtgcacctgtcatcccagctacttcagaggcggaggcaggagaatcgcttgaacccgggaggcggaggttgcagtgagccgagatggcgccgctggcactccagcctgggctacagagcgagactccgtctcaaaaacaaaacaacaaaacaaaacaagacggggtggggggctcagtggcccaagagccagtctgtaaggaatagggctacctggcaggctgtgctagttgtgggaggtgaagtttaagcaccatgcaggcagggtgcagtgtggggaggcctgggggacagaggaggcagcatttgagcagaacctaaagctgtgagcaccagcattctgatgtggaagacgggagggatggaggtctccacagggacacacacagccacactaggacacgggacagaatcatgttcaagtccgtggggtccggagcccagtggtaaagggcgaacatttgcctacctcatttacaattctttaatggtttctttttgtaggtttgcatttttagtaaagaaatacttttctatatcatacagaaacgtccagaaaagaatgtaacagacatgtatgttccagcactccagtttaatagatagcatcctactgccatgtttccttcctgtccacttacttttatttatttaatttatttattttgagacggagtctcgctttgttgcccaggcagtgatgcaatcttggctcactgcaacctccgcctcccgggttcaagccattctcctgtctcagcctcccaagtagctgggaatacaggcacccacaaccacacccagctaacttttgtatttttagtagagacagggtttcaccatattggtcaggccgatcttgaactcctgacctcaggagatctgcctacctcagcattccaaagtgctgggattacagatgtgagccatcacacctggccagcctccttagttttaaataaatccagttacagataagatttcacttaaatttaggctggtcatggctcacgcctgtaatctcagcacttcaggaggctgagatgggtggatcatttgagcccaggagtttgagaccagcctggacaacatgccaaaaccttgtctctactataaatacaaaaattagccgggcatggtggtgcatgccagtatccccagctactcgggaggctgaggcaggagaatcacctgaaccttgggaagtcaaggctgcagtgagcagagatcacaccaccactgcatgccagcctgggcaacagcatgagaccctgtctcaaaaaaaaaaaaaaaaaaaaaagattttacttaaatttaaaccctgtactaatctgtgatttatttggagtatgttgcaaagtagggaccaaaggatttttttttttttctaaattgttaactagcatctgttggacaagccctgatgcctccaggtggctccttggtggtattggtgtgtgttagaatctatgtctgggctttctactgggtttttttcttctccttttttttttttgagacagtttttctctgtcacccagggtggggtgcagtggcgcgatctcagctcactgcaacctccgcctcctgggttcaagtgattttcatgcctcagcttcccgagtagctgggattacaggtgcccgccaccacccccaactgattttgtgtttttaatagagacagggtttcactatgttggccaggctggtcttgaactcctgacctcaagtgatctgccaggttctgttttttgtgctttttttttctagctattctcttgcccatacaaaattgttttaaatgttgtagctttataaccatttaacatctgtgtcactagtgtgtcctgatttctttgcctatgctaaagtcccttggctgtgtgtcccatttatttttccacatcacatttagagatgatctgggattttatgggaattgcagggtttttcacactgcacgctgcctgcatggtgcttaaacttcacctcccacacctagcacagcctaccaggtagccctgttctctacagaccacctcttgggccactgagcctcccctcacttttttttagagatggggtctcactatgttgcccagtctggacttgaattcctgggctcaagtgatcctcctgcttcagcctcccgagtagctgggatgcaggcacacactacatgagctctggccatccctctgacgttgctgtagccacgctggcctcattgtcctggaacattccagggatactcccctgacttagggcttctgtgctagctctcgctgcctgatgtcttctgtggatatcctcgaggccctggatatccctcccccaggctcggctcagacaccacaactccaaagtggcccagtgccctccctgagcgtcggtccagaacggcactctcgtccctcctgtgacgctctgcttggcactttgggaggctgaggcgggaggattgcttgagcccaggagttctagaccagcctgggcaacatagtgagaccccgtctctacaaaaaatacaaaaattggctgtgcgcggtggcttatgcctgtaatcccagcactttgggaggcgaaggcgggcagatcacgaggtcaggagatcgagaccatcctggctaacacggtgaaaccctgtctctactaaaaatacaaaaaattagctgggtgtagtggtgggtgcctgtagtcccagctacttgggaggctgaggcaggagaatgacgtgaacccaggaggcggagcttgcagtgagctgagattgtgctactgcactccagcctgggtggttgcagtgagctgagattgtgccactgcactccagcctgggcgatgagtgagactccatctcaaaaacaaaaacaaacaaacaaaaattacaaaaattagccaggcatgatggcacatgcctgtagtctcagctacttgggaggctgaggtgagaggatggcttgaaccctggaggttgaggctgcagtgagccgtgatcacaccactgccctccagcctgggtgacagggcgagaccgtgtctcaaagaaaaccattaaaataaaataaaaaataaaatttctgcgatgcacacgacagcctccacagcaaatcagcatccagttgctcatgccagtgatgccccaatggagaacaatccacgctctgagaggaggtggggtctggtttggttcactgccacctcccagtgtcatgtagaacagtgccaagccgcggaaggcacgggtccaagaggcagcgctgcagggtcatgggggagcacagtattgcgatgaagatcccagctcccttgcaggctgcctgggtttgtgtctgggctctgaagaatgcgggccataattagttattgattgattacagatcaacatgggcagccttcccttgcccaagggaagggaactcggccttcccttgcagaacgtggggtgttgagatctgtctcctgttacccaggggctcgcttcctgttgctgttacttgggtccataggcaacccctggggtgctgacaggtgttctgtgataaaggcgactagagggggatgtgcaattagggaaacaggggcctcttccccctagggccttttggtagctctcctgtggccgtgagccctggccccagacaggaggggctcagtggctgcactttccatcttgcctggccacggaagctgtctaggcaactgtccgagtacacgtgggtggagaggggcctgcgtggggcagtactgtctctggggagacctagcctctctctggggtcttctcttcctgcaggtggaaagtcatgtcccttggcccatgttcggccagctgtggccttggcactgctagacgctcggtggcctgtgtgcagctcgaccaaggccaggacgtggaggtggacgaggcggcctgtgcggcgctggtgcggcccgaggccagtgtcccctgtctcattgccgactgcacctaccgctggcatgttggcacctggatggaggtgagcacagcgggcactcggaatccctatggggctggggtgggcatcagctgtggctcctcatgtgtgagggagtctaggaggcattggctcatcgtgtcccctgaaaggaaggagagagctgcgcccgttggtgagggggcacctagaggcagagagacagagggcctagagacctgcgggcagctaggacttaagaggcccttaggtttggggacgctggaagatgaatggcaggccactcagctctacacagatgagggaatgccagctgtgccacgcacctggcaaggcaggacagacaagggtaaatggggttcaggctgccccctggaggggctcgctcatggtgtggagggggcataggggcacagcagacagagatgagccgcagccccgcagacctgcttgctctaaggcttggagggacagagaggccgtgagggtgacagggacccagacttgaattatggctcctcccacctatatgacccatgcaaggtgccctctctgagcctcagttttctcatctgtggaatggagacacttaactgcctcccagcttgtacaaggattatattggatcactcctggcctgtggttaccactgtccttgtcaccttctggcagggtcagctgtgactcctcctcccctctcttggcagtgctctgtttcctgtggggatggcatccagcgccggcgtgacacctgcctcggaccccaggcccaggcgcctgtgccagctgatttctgccagcacttgcccaagccggtgactgtgcgtggctgctgggctgggccctgtgtgggacagggtacgcccagcctggtgccccacgaagaagccgctgctccaggacggaccacagccacccctgctggtgcctccctggagtggtcccaggcccggggcctgctcttctccccggctccccagcctcggcggctcctgcccgggccccaggaaaactcagtgcagtccagttatgtcctgtcctccttcctgtcaggcagctgctgcaggaggggtgggcaaaggcatcttcctctgggaaggactggcacaagcacttggtccctgggttgtgtgcctgggaggccgggatcagggctggccctctttctccctggcaaagcaaaacctcccttttactactatcaaggggaagtaacttgaaggtaggaacccagcttgtgagccccctagcctctgggctgctctgcatgtgccccctcttgctggatcatctggtagcagccctgtgccctgagggtgatgctctgacctatgcagcccccctccctgtcctgagaaggcttccagctgggccttggaggacagggtccacccctacctcctggtctccttcctcagcttggaagccccggagcctgccctgctgggaatcggggaagcactgcttacctgtctcctgctcccttttcaggtgcctgtggcaggcagcaccttgagccaacaggaaccattgacatgcgaggcccagggcaggcagactgtgcagtggccattgggcggcccctcggggaggtggtgaccctccgcgtccttgagagttctctcaactgcagtgcgggtatgtctagggccatgcaagcgatgctgccagttatgggccctgccaggagccagcacgacgctgcatgccccattcctggcaggagcccatgtgcattcccacctgtagtttgcatcccatctcatgactggggagtgatgatctgcattttacagatgaggaaactgaggctaggagagattaagtgatgtgcccagttacttagagtcacatagccagcagtgggagaggtgggacttgaactcggctcagtctaccctggagccactcctctgctgaccaggcgtgggagtgctggaccctcactgccctgccgcttcctaggggacatgttgctgctttggggccggctcacctggaggaagatgtgcaggaagctgttggacatgactttcagctccaagaccaacacgctggtggtgaggcagcgctgcgggcggccaggaggtggggtgctgctgcggtatgggagccagcttgctcctgaaaccttctacagaggtatggccaggccttctccacctcccttgggtgctccagtcctggcagggaggctgggtgggtgctgctggggatggggccagtcccagtggggcagtgggaagatacggagggaactgactgagatggaaggaactggggttggccagtgtcagtctgcacgtgccagggaggggtcacaggatgaatgctatatccctcctttttgggaccgtgcagcaagatggacggatgtgggacatggtccacatcctcagtcagtccctcaggcctctgccccacacccacctgccccgcccccacccctccagcctttcaagggcttttagggttttgtggaagccactgtccctcagccctgtttcagtgcactggtgtaagcagacatgcttgtacatgcatgtgcacccacaagcacacctcaggcagaggatgccacctcagggactccagccttgcccgtggccccctcgatatcctctgatagccctctcggttgtcctggggggcttgccctctcccaacagcccgagctggccgaagttggcttccctagctggttccagaggttcctcggctcccccaggtgtctggggcttagtggcaacaggggcttagcctctgcagagacctagtgcgccgcctccttgccccagacctgcccgggcagagagccgtgtatgtgtcccagtgcacaggcgctgctgggccctgccaaaaggccacaagcccactgtcaccgttcacattgcttctcgcttcccggcccagccccgcccacacaggcatctgccttgaaagaggtgcaggaggtacaggcaggtgggggctccagtgagctctgaggaacagcagtggccgccatgggtggagcctatctttgttgccagtttcagtgttaaacactcttgcacgtgtgacatcattgagtcctaaagaccactctgctcagtgcatgccattgtttccttcagttacagaggagggaaccagagcccagaacatttagcctttgcctaaagtcactgggccaggaagtggtagaggtggggttcagcaggatttgcctgggaaccccaatattgaccacagtgccatgctgccctgcacggctccctggctgtgagttgtcctggcctctggcaccaccggtctgtctgggttcctatgtccctatgtcccacctgcagaatgtgacatgcagctctttgggccctggggtgaaatcgtgagcccctcgctgagtccagccacgagtaatgcagggggctgccggctcttcattaatgtggctccgcacgcacggattgccatccatgccctggccaccaacatgggcgctgggaccgagggagccaatgccagctacatcttggtgaggcccagcatggggacttgtgctgtgattctggacagctttccctagggcgtgcagggctaggggacccccttcagtttatttcagactaaaaccctcaaaatcattagtgaaagaatgggagaagatagcttcctccacatattcaccaagaaatgttttttgagctacctacaagagtgaaatagtggctcacaactgtaatcccagcactttgggaggcccaggagggcagatcactcaaggtcaggagttcgagaccagcctggccaacatgatgaaaccttgtctctactaaaaatagaaaaagtagccaggcatggtggcgtgtgcctgtaatcccagctacttgggaggctgaggcacaagaatcacttgaacccgggaggtggaggttgcactaagcccagatcgcaccactgcactccagcctgggcaacagagtgagactctgtctcaaaaaaaaaaaaaaaaaaaaagcgaaatggtaaagaatggtaaagacctttctgatgtagactgacagctaacccaagactgaagcataattttacagtctgatataacttggacagaatagcaccctgcaccctccccgaggtttcaagtgtcctgggagaactgtgttctgcagggtatcagcttccccagaggaggcagcctggccccgctctggcaccctgactgtgtgtccttggggaagtgatgtaacgtccctggacctcggttttctgggtagagtaatggcgtattcctagtagggctttgtaagcattaaatgtgatccggaatctgtgagcccttgcacacgaaggcttccgtgagtgctaattattacttgtggccggtccttctgggctgccccttttctctcagatccgggacacccacagcttgaggaccacagcgttccatgggcagcaggtgctctactgggagtcagagagcagccaggctgagatggagttcagcgagggcttcctgaaggctcaggccagcctgcggggccagtactggaccctccaatcatgggtaccggagatgcaggaccctcagtcctggaagggaaaggaaggaacctgagggtcattgaacatttgttccgtgtctggccagccctggagggttgacccctggtctcagtgctttccaattcgaactttttccaatcttaggtatctactttagagtcttctccaatgtccaaaaggctagggggttggaggtggggactctggaaaagcagcccccatttcctcgggtaccaataaataaaacatgcaggctgaccggcgtttttttctt

SEQ ID NO: 1130 - DNA, 61434 bp, Homo sapiens
cccacagtgaactgtgctctatttactgtacttcccacagttcagtgtccaaactgagcactgttgccgtgaagatgtcagggtgaacgaggagccctgtgatctcctgaggttcaagagagacttcagaaggtatggagcagccatttcagaaatggtggattatattttattttcttgtattttacttatattttggttaatactttaaccaaaccttttttgtactaccgtacacccagtgtttttgcagtagaggatgttgtagccaaaacttggacccttaaaaacagacccaagatagcctacacctctggtgttaacagcagctcttgggtagggcagggtggctcacgcctgtaatcccagcactttgggaggccaaggggggcagaccacttgaggtcaggggttcaagaccagcctggccaacatggtgaaaccctgtctctacaaaaaatacaaaaattagctggatgtagtggcaggtgcctttaatcctggctacttgggaggctgaggcacgagaattacttgaacctgggaggtggaggttgcagtgagtcaagattgatcacgccactgcactccagcttggcgacacagcaagaatctgtcaaaaaaaaaaaaaaaaaaaaaaaaagaacagcagctctcatacatataatagaattctttaacagtaaaatatcttctatatttcaatagatgtattttgctctagaaattatgaaatgatatcataagataaccctgtttagtttgatcaacaagattttgtctatagaaactagtaatatttctaggaaacctctaaatatttggaactgtaacaacacatttctaaatattctatgaaaaaaggaaaaatatattggaaatttgcagaagtcttactagaaaagatatcctccagtaattgggattggcatgttttttcaatttaaatcaaacacaataagaactccagaggaattccacttagaaataaaatagcacatttcaaaatcacccatgcttcaaatagaaaatcacaagagaaattaggatatattttgaactgaataaaagtgaaaacagagtatggtagtatttgtgatattcacctgaagtatttctcacaaggaaattgattatcttaaatagcagcatgtagaaaaagaaaggttttctgaaacttaatgaaacaaaacaaaacacaatgaaaaattaacaaagcagaaattgtttctttgagattaagttgtcagaactctagtaagattattcagagaaagagagaaaatagctgcataagaatagctatatttataaacatacctaaattcagctattctctctgtatttatactgtgtaatataaatatagtataaaaacagctattcccatgcaggtattcttactataaaatagaattcacaacaaaatctttgtcaagggaaacaccaggataagataggttcactattaaattcataagatattttatgtagaaataataacaattccagaagctttttaaaaaaaacataggacaaaatgttccctaactcatttcataggagcaaataaccttgataccaaaacctggcacaagatatcaaaagaatatacttgaagatttaaataatataaaaacataatcaaaatattaagaaattaagtaaaacaatatttaaaagtaaaatacaccacaagcaagtaggatttatcctgggaatgcaaagttcgttcagtagcaaaaatcaatcaatgtaattcactacagaacagaataagaagaaaatatataatcaccttatagatgcaaaaagtgcatttgactaaattatgcatctatccatgaaaaactgtcaaaaacacaatgaaactgtcttaatctgattaaggccatgttaaaaaaaaaactatagctaacaaaataattcatgtgaatgaccaaatgtctttcttctaagatcaaaaaaaaaaaaaaagaaagaaaaaaaaggaaagtaagtctgctctacatacttgtagccaatacttcactggagctcctagccagtggaaaaaagcaagaaaaataagaaagatttaaaatgaagaactaaaatagcctctttttatagattatattattgttcctatataaaatcctaagtaatcaaaaattgatctgccaaaattaattaataaatttagcaagggtttaggtggcaagccctttggaaaaaataaattagaattctaaatatattcaaacaactagaaaatataattttaagtggtttatgccataaaataccaagaaatataattaacaaaattatggataacatctatgatgaaaaacataatgttgagagaaataaaagactatccaaatataaatatacagtatggcaatggtatcaataggacatcaattcttacccaaatttatttatacagtaaatgcatttttaatccatatcctgacagatatttctgccacagaaactgataagctcattctaaaatgtaagtagatatcaaagaatctagaaaagcaaaaataattttgaaaaatgaagttgaaagagttacactatattatttccagacttactataaagcaacaataaccaagatatttcagagttagtataaatttaaacatatagatcagtggaacagaaaaaaagtcagaaatagacccatacatatatggtcaatgaattttttacaatgacaaaaatacgtttcaatggaaaaagataaattattcaacaaatggtgtcttaacacttgtatgaaaaagaaaagcaacctctatctcacactatgaaatttatttgaagtggattagagagaccttattgtaacagctaaaattataatacttcttaagacatagatggaacacaaaaagcataaaacatacatttttttagaaaggataaattaaacatcataaaaagtaaaaccatctgcctttctaaagacagcattaaggaaataaaattagaaaccacagacatggaggaaaaatatacatttatctagcacatacaaatgatttttacaataagaattaataacacaaacaagccaaaaggacttaagtaggtactacttcacaacagaatggtcaataaatacattagaagaggttcaacatcattggtgatcagaaaactgcaaattaaaaccataatgaatgagataccagtttataacaaatataatatctaaaattaaaagactaacaatacttttagtgaaaatgcatagccactgcagacctcctatgctgctgttggtgaatttaaaattatggccacacaatcccacacatggatacctactcaaaataaataaaacttatttctagaaaaagacttgtacgtggcaagacttgtacataaccccaaatcaaaaacaacccaatggttcaggtacaagcaaatgaatttaaaaattgcagcatattcatataactgagagctacttagcaatgagaaaggactaacacacaacctggatgaatctcaaaaacatgctgagtaagagaagccagaaataaaaaaaacgcaacagcgtgcatccatctatttgacgttgtggagcagctgaactgagcaattgtgatagaaagatgagtgagtggggttggaggaaacctgggatgactcttatggacaatgatgatgctcctgtcagcacacacttaaaatgtttcctttttgttgtatgtaaattatacctcaatatagatgacaaaaaaaaataaaatagagcattccattttaaatgacagcaccatgaacatggtgaacactcagtttttgagctgttttacgaccaatgagctcattttactctacaggaagtttcagttgtgtgactataaggaataattaaaggcatcacagaattttaacaccctgtgtgtttttaaaaattgaatacaatttatagatgtggttaaatgtaagcttcctgtcgccttgctactttgaggatttgggaactcttgaaaccggctaaaagaagaacaaataaaaggccatggaaattataatgttctgaccaaatgccccccaaaaaattaaaaaaaaataaatttaagagagcacggcaggttttggaatagatttgttactggatttgtcagatccaagagaagattcttggatctcatgaaggaaggaattcagggtgattcacaaagtgcagtgaaaaaactgggtttattaaaagttattttattatagagtagggcaccctcggaaagcaagaggagaaaccaccaggctttgttttaagttttccttatataggggtcttgtctatgtaaagactaagctaagctgtatctacgtgcaggtaagcaggcatcctgacacatttattgctgtattgatttaaagaaaactagccttgaccgtctagtgtgtgagtacatcaaagcataactattattatcttcaaaacatatattgttatgggtattgggacatctggactctctgttgttgtaggagtgtgtccttgcaggtacctttaagctgtttcctttaatacaaacatcccatgaatatgggtcatgaccggcaaggcatgcgttttgctagtctcagaatggaactaaactaaaaaggcattacattgtccctccttggctcctgcttccctgacaaattgaccatcattagaatgtctggagtgtggcaagtgatgggttaaccaccagtactatagacattattctaaggagtccagagtctatatatgaggcacacatagtttaacatagataagatgcatccaacaaatatttctttttcttctttttttttttttttttttttttgagatggagtcttgctctgtcgcccaggctggagtgcagtggcgcgatctcggctcactgccagctccgcctcccgggttcacgccattctcctgtctcagcctcccgagaagctgggactacaggcacccgccaccgcgcctggctaatttttttttttttgtatttttagtagagacggggtttcatcgtgttagccaggatggtctcgatctcctgaccttgtgatccacccgcctcggcctcccaaagtgctgggattacaggagtgagccaccgcacccggcctcaaatatttcttaattacaaaaaaattacagttgagtgggggattacatatgttaaaagaatttacataaagctggaaaacactgacatctgctctttttgctcaaagtacttcaagagtacccaggatgtaattagacaaacatatgtatacagtaagaaaaaaatacgttattaaaacaattgagactaggctgtgtcagaaataaaatgtttaaacactcaagtgatctaggtatctctctgcagaaagataaattatgttgcagtaatattttaaagagaggaatttttagtttctgcaaagacacagaaaaataaatgtttatttacaggaattttgttcaattatgcattccagttttctaaacctgaaaatgccttagaatgtgtgaaaggaaagccacctgtcatacttctataagcaaaaatccaaaacatatgatttctaatgatgtaggcatatggcctttaaaagttataaaattcacttgcgttgaaaatgattttttaaattgcaaagtctctatccagattatagccggatactcaatccttttctgcaactaaggactcattatcattatttcatggagaggtgtttatgttttgtggagattcctgtgagcttctacctctgctggtgtcttggggttctctcttgggggctcagaattccctgcactccatccctcagccacgtgaatgacacagattttccctgtttctgccagtcagaaacctttgcttatgctcttctcttggtctgaaatgctgtccccctactcccacctgctaaatcctccttgctctgaagtctgagaagccttctctgaccccagttcctccctaggaattccccctccagctgtgttacaactatctctttgctgtactctctttcctactggattccataagggcagagcctgagttctgttcatcattcatcaccaagaactagcaaagggcctggaataaagtaacaggtagcacttgtcagataaatcaatcaatgaaggtgggacagcagcagctactttgcttcttttttttttgtttgttttacttttcttttttttaattaattaatttattttttattattattatactttaagttttagggtacatgtgcacaatgtgcaggttagttacatatgtatatatgtgccatgctggtgcgctgcacccactaacttctttttcttcctgagctttcattttgtggtggtagctgttgctctgtgaggcgggtggaagtccttccaaggcctgaaatggattctgtaatctttcatggtatgttctcgatttctactccaggtgtgagagaggacttcttctcacattcacaaacctctcttagctgatttagcttggttacttggaataagaatttcacagttcatggaacataatgaaacatgtcctgtgctggcagaagtgattttgtgtcaaaaggaactaatttttaacctacctacatcattacctacatctattaagctgaacaatttcaattatttttgatgggctcagtttctcacttatgaaatgagggattgaaagatatgatcttagtggttctgaataatacatagctctcagataaaattaccaaggctctcacagcatatatactcagaaatatgtgatgcaaatgtgtggtttaaaatatattgtgcattctgtaaattaaatcttatgaatcaattgtattagcaaatgtgacagtgtaacaaaaatataacctgcaagtcgcaactggaattagctcaagctaaaaaggaaagttattgacacattaactgaaaagtcagagtatttcaagtttcttttttctttttaaattatactttaagttctcggatatatgtgcagaacgtgcaggtttgctacataggtgtacacatgccatggtggtttgctgcactcattaacctgtcatctacattagatatttctcctaatgctatacctcccgtagccccccaacccccgacaggcacccgtgtgtgatgttctccctgtgtccatgtggtctcattgttcaactcccacttatgagtgagaacatgtagtgtttggttttctgttcctgtgttagtttgctgagaatgatggtttccaggttcatccatatccctgcaaaggacgtgaactcatactttttttatggctgcatactattccatggtgtatatgtgccacattttctttatccagtctatcatggatgggcatttgggttggttccaagtctttgctattgtggatagtgctgcaataaacataaaagtgcatgtgtctttacagcagaatgatttataatcctctgggtatatgcccagtaatgtgattgctgggtcaaatggtatttctggttcaagatccttgaggaatcgccacactgtcttccacaatggttgaagtaatttacactcccaccaacagtgtaaaagacttcctctttctccatatcctctctagcatctgttgtttcctgactttttaatgatcaccattctaactggtgtgagatggaatctcattgggttttgatttgcatttctctaatgatcagtaatgatgagcttttttcatatgtttgttggctgcataaatgtcttcttttgagaagtgtctgttcatattcttcactcactttttgatggggttgttcttttcttataaatttgtttaagttccttgtagattctggatattagccctttgtcagatggatagattgcaaaaatttctcccattctgtaggttgcctgttcactctgatgatactttcttttgctgtgcagaagctctttagtttaattagatctcatttgtcaattttggcttttattgtcattgcttttggtgttttaggcatgaagtctttgcccatgcctatgtcctgaatggtattgcctaggttttcttctagggtttttatggttttaggtcttatgcttaagtctttaatccatcttgagttaatttttgcataaggtgcaaggaaggggtccagtttcagttttctgcatatggctagccagttttcccaacaccatttattaaatagggaatcctttccccattgcttgtttatgccaggtttatcaaagatcagatgcttgtaggtgttatttctgaggcctctgttctcttccattggtctatatatctgttttggtactagtaccgtgctgctttggttactgtagtcttgtaatatagtttgaagtcaggtagcatgatgcctccagctttgtcctttttgcttaggattgtcttggccatatgggctttttttggtcccatatgaactttaaagtaatattttctaattctgtgaagaaagtcaatggtagtttgatggggacggcattgaatttataaattacttggggcagtatggccattttcacattattgattcttcctatccatgagcatagaatgtttttccatttgtttatgtcctctcttatttccttgagcagtggtttgtagttctccttgaagaggtccttcacatcccttgtaagttttattcctaggtattttattctctttgaagcaattgtgaatgggagttcactcatgatttggctctctgtttgtctattattggtgtataggaatgcttgtgatttttgcacatagattttgtatcctgagattttgctgaagttgcttataagcttaaggagattttgggatgagacgatggagttttctaaatatacaatcatgtcgtctgcaaacagagacaatttggcttcttctttttctatttgaatacgctttctttctcttgcctgattgccctggccagaacttccaatactatgttgaataggagtggtgagagagggcatccttgtcttgtgctggttttcaaatggaatgcttccagcttttcccattcagtatgatattggctgtgggtttgtcataaatagctcttattattttgagatatattctatcaatacctagtttattgagagtttttagcatgaaggggtgttgaattttatcaaaggccttttttgcatctattgagataatcatgtggtggttcttgtcattggttctgtttatgtgatggattacgtttattgatctgcatattttgaaccagccttgcatcctggggatgaagccaacttgatcatggcagataagctttttaatgtgctgctggatttggtttgccagtattttattgaagattttcgcatcaatgttcatcaaggatattggcatgaaattttccttttttgttgtgtctctgccaggttttggttatcagggtgatgttagcctcataaaatgagttagggaggagtctctctttttctattctttggaataatttcagaaggaatggtacaacttcctctttgtacctctggtagaatttggctgtcaatctgcctggtcctgggcttttttggttggtaggcttttaattactgcctcaatttcagaacttgttattggtctattcagggattcgacttcttgtatttcaagtttcaaaagaaatttcatgcatgctgcagttctgctcctctgattttcctggttctaccagtcttttgtgtctgggctgcacactcaggctgccttcctttctggtagcaaatggctggctgaagttccaagcctgtggtccagtctcttccccaatcatgaaatgaagtcctggacatcactctgattggaacaaatagaagaaattttctatccccaaaacaaccaatttgagcagggctggagtcaggacaggggttgcatttgggagctgtgtatatgtgtcttaaacctgaatctcctttctcttataataacaccagttattggatttagggccaatcccaacccaaaatgatgtcatcttgaaattcttcctttaattgcatcttctaaaatctttactccaaaaaaaggtcacattctgaagttcccagtggacatatcttttggagaggcaccattacagccctctaccatctgcctactgtctactccaaatccatgtctgctccatgagaaggtgacatctacctcatcccaacatccctgacaattttaacgcgttggactatctattcttagcctcaaatctcacaaaaaatattatcaagtcaaagataccaaatctaatcatctaaatcagatatgggtgaaactttgggaaggatccatcctagggtgatgatattcctctccttctgtggacttctgaatctagcaaacaagttatccgctcccaagatacattggtgtgtttacatcttctccatttaaaactaggaagacatttgttattgctttttcttttattccaaaaaggagaaaaacgggagggataaaggggacactggaattaagcaaaacctagcacagcacattctattaggttttacggcctgagaacaatcttttgcggcatgatcctgcacaccctgggcccacagcagctccgtggatggcccctgcccctgggcctgcagcagtgctgtgactggcttctgggtgcaggtggcggtagctcagtcgctctctacatccacacctctgtccttggagtcattcttcctttttctgaaagggtagagcatgttggctgtcaagtagccctactggcgtttcctgcttgtaaagtttataagtcccatgactttctctcattttgtcttgtctctgtccctttgggtcaaagttggccgtgtttctactgatttaacattctcaaaatcctcataggttcctgtgtatatcgagggaatctatgtcactagacagaagagttctccagaattcttcctgggtaaccctgtctctattcctggattctgctgagattggatccgcgatacatgcctaatcttttcagtgaaaagttttctgggcactcccttggtgttcattatagaacatcctttctctgtccacagtgaatttcctcatcacggtatcctttgctttccaaaaaggctcagaacttcctaagtcatcaggtcctggttccttttttgctccaacattctttcctcaaattatctctctcctctcatattttaccaaaatgattaagaagaaaccaggccttactttcttcacgttccttgaaataccctcagctaaatagacagcttcactgcttacaaattatcctttgcactcaacctcagaatacaactcaggcaaatttctgccactttataacaaggatttcctttcctagcatttccagtaacacttttctcatttccatctgcgatttctgctgaggtctccatgtcagcagaatcactgtaagcattcatatttcacctcagcagaatcaccttaagcactcatatttcccccaacaggcttgtccaggcaagctagatttttctgtcatttgcctcaaagttcttctagcctttaacccccaattccaaaaccacttccacatttttagatatttgttacagaaggaccttgtttcttagtagcaaaatctgtatgggtttgctagagctgcaattactaatgaccataaacttgtggcttaaaacaccagaaacttgttcttccatagttccgaagattagaaatccaaaaggaaagcgtcagccgggttggttctttttggagacactgagggagaatcaattccatgcctgctaaacagagaagcacatggaggctgtgctaaaggatatggaatttcattcatctttcatgtagcaattccacagtgagtggtccaggctgtggagcagtttgctgtatggaatcatttacttaggctcctctcatagtattattaaaccacactctaggcaacagatctcacccttatcatatgtagtgctctcttttggcagcatgttaaagcctatagactcctcaaaaagaaataataatataaatggccaggcatggtggctctcacctatatgcctataatcccagcacttgggaagacgacttgagcccaggagttcaagactagcctgggcaacatagggagatcccatctctacaagaaatttaaaaagtagccaggcgtggtggcatacacttgtggtcccagctacttggaggctgaagtgggaggattgcttgagcccagaagttggaggttgctgtgagctatgatcgcaccactgcactccaacctaggtaacagagcaagagcaaaaacaaacaaacaaacaaaaaacagatggctacaaaggaaacaaaatgaatatagttttcaaaatataaaaatataaaaacaaaatatttgaaaactgtgttatggtaacatatgtttctttaataagacattaaataacccagtctgaaggaggaacttggtgcccagcatcactttgaagtggtgatgagcataaacgatacacttattttgaagtctcttccattactgtgatacgatatgaaatcatctaacgtttcagttggtggatcagaggcactgctaaagctattgtttcttttttcctcattgctagttaaaggcaatgataaattttttagaagttcatacaaataaggtaataattatgattttcataactagttcatggaaacctaggctaagattctgtgccctggaggctttttctactttgtagatttgaagccaggccactggtatgtccatgttctatagcagacgggaaagaaaagtccagagcagagagctctgtgactgaggtgcacatgcacacacacacatgcacacgcacacagacacgcacacacgcacacacacacgcacacatacacgcatgcacacacgcacgcacacatatgcacacacgcacacattcccttcactccattcaactggcctgaactccgttgtgaagatggaagggaatggaggaatatggttggtgtgggtggccacattcctagctaaaacttagaaggaaggttcagttactttgaaaatgagcggagactggatactgggatcttcagcattttctatcacaacatcccaccaacctcatatccaggtctgtagggtccttggatcattgtctgccagtgattcttggtcagagccacaagctcagcgcctccacgttcctctttacctaccttggaaaggagggatgagtcttagtcacctccttgcaagttcccttggcttcttattcaccttgcctagactcttcgtgaaccgaatgccctagggaaacacagcttttcccaagacagtcacacgcactcacctggaaccagaagattgtagcattgtctttgctcagggcctaggcatctgctagtctaacatttcaataaccaagagagtcattggagtgacttagaggatcaaggataactgtgctctcatgtgaaaatatagctctgcccacccagaagggcagccaacaccttcttgattatgggtgtcttattccacttattactccattaaactaagatatggtccctggggcaggggaaaggtgggtgggtggggagatgttaaggttggttttataggtgttgcatttcaggtccctgtgggactgttgaagggagatttttaggaggcagctgaacattctccgtggatctctaatgagaggtctgcactgaagatataaatgctagaaacatcagcctagagctaatcacagaaggtctgagagagaaaaggatgcccctaggagcatgtgggataaaaagtggagacggtagggctgagatctgaagagcatcaacactaaagagacggtatcagaagagatgtctacatgggaaactgcatgaatgtagccagagaaatataggtcaagtaagataagggctgaacattaccaatgtgtttaaggtgtacattggcaactttgaagagacaaacttcagtgggagaaagtgcaggctttgggaactgaaaggcagggaagcaatgggatttaatgcttgtgaagttctctttcaggaagtgtatttctaaaaaccatggcccttcatgggcacggtaacctggaatgtgtggggatatctgcaagtgtcacgatgggtgtgggtgtcactgttatttagtagagcatgtcaggggatccgactgtcctacagtgagtgggacagcagccaccgccatgcagagccatcctcctcctgcacagcctgccagggccctgctgcttactcacagactctcagacactaatctatttctctgagcctccacaagcttaaataaagcacacatttttgcatagttttaatatacactaaattttatagaaattcaattaatgtttaaattgagagaagatggtagtttaagttcagaaatgtaccctaaactctccatatttcaggaaaatcatcacaaagagcattgctcttatggcatttaagcatccgatacaactcacctatatcaaattgctccgtatttgaatgtaactgtcaccttcacagtgattttacacataatggatgtgcagttgggtgtgtcttagtatttaaatactaaaatcatatcattttatcttaaattatcttccttttgtttctcctttacattacagtcagggcagtatgttgactttcaaacattgtttgtgtggttatataacattatcagattttctatcagatcatgaagcgggggtgttgggcacccttgcattgaaagctctgttctgatttcacaactcctggatccactctccaagcccaaaccccttcctgagaaacattctaggtataactgatgaacctgagatgtcatgagagcagggcaaggccaacaggatgctctcttcctggaatgtggatttggatttcaaactctaacgagtgtctgtaagccgcttaactggtgtcctgcaggcagggctgaggagagtttgggttgttttgactcatgcacacccaaaatcagaacatgtttgtttgcaaggagagaaaagaacaaagcagaagagagacacagagatgagaggtttgtcaccttgggtcacagcgagcctgtggcatggttccctgggaggccctgctgcccctctgccttcccttaggtgcctcagatctgtaccacagcccttggtgctgcattctgccagctcagaggggttttgttaattgcaaccaaaaagacttgcttaagtattttaatttccacttcctagtggttttaattaatagttgttagatgaattaatgtaaaaacaaatgaataaagtaaccgctttagatgaattttaaaaattttattaaaaacatgaatattatttcttcaactaattatctacatcagtgttttttatgatttctctccaattccactctttcccccaccaaaaaagagacagttgtctttcagacactcttaggattacctcatccaaaatatttgttttaaatgaaaagacttgatttgtgagggggatgtgtatatatgtgtgtgtgtgtgtgtgtgtgtgtgtgtgtatgtagcagaaaaagaggggaggataaggtccttttctatgcaactctctgagcaaaaacaatgcagtcctttaaaaaattgttatcttctaatgttaaaatagctaattcttatttaaagatttagttgtaagtcttaaagaaaatgttagtcttttaaagatacaagaagtgttaagggcttctccacttttattgggctgttggattgggtattaaaattgagaaatatgccttataaagttgtttttaattgtaaataagttcatgcattgttaaattcaattcttgaaatattctgtttctaagcaaatacacaacagtacatagccagtttgctatagtttcatgttttaaattttgtgtacatttcatgtcacatgtttcttaatttttagatgtttacatatctgagcctatgttatccttgtacaagtttgatgggaaagcaaccaacacactgatcttttattcttattcaatttttctttcataggtaatttctgcactagttttattttacctgaatttgatcagatgttttaaatgatccaaattcctagcactagaaaaaatccaggcttttgtagtttatgttgttgttgaacgagaagaagaccagacaagtagacacacgttcactaatcataggggtgacttcctttccagtgttcagcaagggatggggtataaggcaatgccaaacttcaacctgcccatcaggtgaaagagtgaagaatgtttaatgtagagttgttcttgaaactaggccagatgatgtcacatactggcttaattttttctattggatgcttaattatttgaggattctgcaggaaaagtccgggttgagttggcttgttcaatactaaaatatttttctcctgctaaagcacacacattcgctcacagcagtgtatatggaacttatagatgtttatttttacctctttttttcttttcccttcctttcttactctcactacctaagttcaaggtctgtggactgtgtacttgtggaggaggagcaccaggaaggggaagggagggattcctgctggcaggaaccatggagagcacatccctacctaaccctgcagaaaagtagccacagctcaaggaggtctctcatgtagatctatagagtagcccgtgcaaaatagcatctttcatcacagagtgactgacttttaacaaagcaataaagctaagcctctttggcccatctaccagaatgaggacactgcgttgttaagaaatcactcaattaaaataatatttgtcgaaattgtacttgacctgtaatcaagagcgacatttgacaccttagtgcagcttctcaaatgttacttattatgacttggaagggtaacaataaacaaaaacaacacaacaaataaatacaacaagaggcaaatcacacttccctttggtttcagaatctacaatgactgcttgaacatttgcctagtttaggaatatgtctttgtctcaggattttaggggtgcagaaaggaatgagagtatatggagcccaccttttctgaactagctttcccagtagcctggaaacagaaggattttcttgcttggtagagagtattgaaccctgtccttctgtgtgtccaggccaatgtctgtcgagagcttgactctctgtgctggaactaaccttgtccatcttcccatagttcagtattgtcttcctcaaaataaaggaaattatctccaacttcttgaaacatgcagaattttgaaatggttttctttataaaaacgataatatcagcatattttctaaactgcttgttagaggtatagagttgtgcagcttagatttggctgttgtgtcagacctctgtgttccagtcctcctgtggagtggacctgtgacatcagaacacacagaggtggggactggaatatctcagagtttccccaggggctccaaagggctggaagtgtgggtcccacctccttccatgaggggcagaagaaatgtgttgaaaaccagcgatggacaggtgatgcatcaggctctcaagtctcatttctagattccatcatccacatcaatttttcatctattacttttactcattgtaggcttttaatgagatgtagagaaaaatacaagctgaaaagaatcaacaacattttacttcaaaagattaaagacataattaccagtggttggtagtacgtctatgaggagcagcgaaggcatcgctcatctcgggcttttgagacgcgtgccattatcaagcctaaccgtgcaaaccagagatgcagagctgacttaaaaagctgctgttttgtcccaagaaaatcccttaatacagtatctgtttttcatagtagtttggctaagcttctgacattaccatgacttgcttgcccatgtttctaaaccatactgactcaaggaaaaggagtctttggatagagataacatgcaattgaaaatctgatgatattttgcatagtcagaaagacttttcctgcttagaaaatgttttctgtataacacagatgtgtttttcaatgccttggaatttcctctttagaaaatatgttgagtcaaccgaatttttaaagaaaataattatatcctgaatttagctctgctgaaagagcatgcaaaagttgcaatcatgtcctttgtaaatgtgttttaaagttttcccagagtttatcacgtgaggatgaaatgaaggagctggggtctcagggttaatgtatactttgatttgcagaagaataagaaagtgtatacaggtaaaaataaaatacatatgtgccaacatgtacattatcactaatcctcagaatttaaaaacctctactttttaatattcaaaatccttattggtccttatttggaatatgtttatcattaaaagattcctagtaaaataaagattggaagtgggtaaatgtgtgaatatggtagaaaggtctcttcatgtttccagtttccagggaggattacaaacaaagccactttaaatgtttttttccaaagtgactataccattggcatttctaccagcaatagaggagagttctgtttggtcagcatctttgctgacacttatgtagccagtgcttttttattttgattattctaatagaggtgtagtagtatcttattgtggtttaatttgaattcctgtaataattaagaatattcagcatcttttcacgtttattttctattcatatatcttggtgaaatgtcttatcaaatattttgcccaatttttattgctctctttcttcactattgaattttcaaagtttattatatattttgaatgttacttattgattaaatatatgttttgctagtattttctcatagtgtttggcttgtctttacattttcttaacagggtctttcaaaaggcaggatttcttaattttgattaattatatttgaccttttctttcaaggacagtgtttttattcttatatctaagaactctttgctgaacttacggtcatcaagtttacttctagaaattttatatgtcaaaaccacaatgatataccatctcacgccagtcagaatggcgattattaaaaagtcaagaaacaatagatgccggcaaggctgtggaggaataggaaggcttttaaactgttggtgggaatgtaaattagtttaacaattttggaaaacagtgtggtgattcctcaaggatctagaaccagaattatcatttgacccaccaatcccattcctgggtatatacccaaaggaatataaatcattctactataaagacacacgcacatgtatatttactgcagcactattcacaatagcaaagacttggaaccaacccgaatgcccatcagtgatagactggataaagaaaatgtggcacatatacaccatggaatactattcagccacaaaaaggaatgagatcatgtcctttgtagggacatggataaacctggaagccatcattctcagcaaactaacacaggaacagaaaaccaaacactgcatgttctcactcataagtacgagtcgaacaatgagaacacatggacacagggaggggaacaacacacaccagggcctgttgggggacggggagcaaggggaggaaacatacaggacaagtcaataggtacagcaaaccaccatggcacacgtgtacctatgtaacaaacctgcatgttctgcacatgtatcctggaacttaaagcaattttaaaaacaaactttatatgttttaatatttaagtctataatctattttgagttaatttttctatacagtgcaagatatgggtcaaagtgcaatttttatgcatacgaatatcccagcatcgattactacaaagactttcctttctcaattgaattgcctttgcaaagctttgtagaaaatcaattgacaatatttagcaagtctatttctggactcttttcagtttcattcattcaggtgtctatccttctgctaatgccacactgacttgactactgcagctttacagtgagccttgagccaggtagcgtgagccctccaattatgttctccctttttcagtgtggtttgggttattcttttgaatttttactaaattttagaagcactgtgtcaactcttattttaaaaatcacgtgtcatgttgattcaaattgcattaattctataaattaatttggggagaaatgacaatatcacttgagtcttccagatcatgactagagaacatcttcatgtctttttaggtggtctttaatcaatgtttctttcatacttttttttaaattttttgacatacaggtcattcacagagtttgttacatttatacatcataattattttaggtttttggtgctattaaaatggcagtcttgaaatttcaatttcaaattgttcattgctagcacattaacatgcaactgatatttatttatttatttatttatttatttattagagatgggggggtctcactccatcacctaggctggagtgcagtggcacaatcatagctcactgcagcctcaaacatggaggctcaagcaatcctcccacctcatagctgggatcacaggcacaaactaacatgcccagctaattttcttttttcgtagacacagggtcttgctatgttgggcaggttcatctgaaactcctggcttcaagggatcctcctccctccacctcccaaagtgctgggattacacatattagccaccgcacccggcctgattttttttttcttttttttttttttgagacggagtctcactccatcaccaggccggagtgcagtggcgcgatctcggctcactgcaacctccgcttcccaggttcaagcaattctcctgcctcagcctcctgagtagctgagattacaggcgcgtgccaccatgcccagctaatttttctatttttagtagagacggggtttcaccatcttggtcaggctggtctcaatctagtgacctcgtgatccacccacctcggcctcccaaagtgctgggattacaggcatgagccaccatgcccgggccccggcctggtttttaaacattgttttgctaatatcatgtttcagttctagtagcctcctatggattcatttgtattttcttacacaattacactatctgtaaatagaaacagtttttttttgttttgttttgttttttttttttttacaatctatgtgctttcatttcttttttcttgttccttattgagctacctacaacgaccaataaaaatagtaacaggggacatccttttcttgttcctgattttagaaagaaagcattcaatcttttactaataaatgacttcatttgtaggtattttgtgggtttttttttttagttgaggactttttattgtattgaatgaataaacattgaattatttcagggttttatttgcatctcaaaagatgatcatatgcttttccttctttagtctgttaatatggtttattagcattgattaatttttgaatattaaaccaccctttcattttcagaataaaccacacatggtgatgacgtgatgccatttttacatgctgctggtttcgctttgcaaacatttttagaataattcacatcctttctcatccagtgccattgtcttctgcctgaaatatttgcaatgccacattagtcatttcctccaatcttatccccacttgaatccacttgagtcccggcaccatccatccaaagtagaatatcaatcatccctctttcttagctttctaaagacccctttcatctctaagtgtataaattcctcagcatattaaaaatggatctctagcaaaagcctgcagcttcatctcttctttttcctgaaatattgtggtctacaaaagctacatttcttgtctttctgtgactctactgtattgctcacactatttcttttcctggattttttttataccatatttattatgaagacatattttcatcattttttatgtctccactcaggcaccctctcattctccaagaaaaggctattttcctcttttgtgtataccataatgggcagttcagatacctattatatatgggtatatattcacatgcaaatatgtgaaagtgaagttacctatctaaaggttgccttccttataagtctaagctcctggagagcaattcaggtggtattacatttatttctttatttatttttattattattattttttgagatgaagtctcatgctgttgcccaggttggagtgcagtggcatgatcttggctcactgcaacctccacctcccaggttcaagcgattttactgcctcagcctcccgagtagataggattacaggcatgcaccaccatgcctggctaatttttgtatttttagtagagacggggtttcgctatgttggccaggctagtcttgaactcctaacctcaggtgatccacctgcttctgcctcccaacatggtattatatttatatcccttgcttctagcccagtgcctggctccataataagtacccgataatgtttgttgaactattctgggttaaatagcactgacatgggtggattcttgaggaaagatgtcaccatgatttgtgtctcattagccagcgtccctacaactttgtggagcactggctggagcgaagagtgactagaagtgagataatcctcttctgcagttctgcgttcactgtctgtaatgccctttggactcacagactacatcaaacttacaatgaatgcagagagttctttactacaaatatatctatctaagcacagacacagcaagttttcaattccaaaaggctcatagaactgttggttccatccctttcccaatgtgtaaacaggttttccattgtgagttacacagaggaattatagcagtgtccggtaagaccgggtgatccaggaatggaagacgggatgaacagacagatgaaggaacctgagaaacggaggcttgggatagacccagggtatcttctttccacctttgttggagatccttggttaggagaccgtaggacaaaaactgtcgggctgttctctgtcgtcagcgctggggcttgagagcaacatcatgggatatttactgttccttcgcagataccattcacaaatggccagagtcttaatggtgttgtttggagtagagaattaataggggcaaagctctaatagcctcgaggaagctacggttttctgctgagaagtgtgtaagggttgctgcaggacaactctgcagcggaagcagacaacccagttgttagttcctgaggagagaggcctgtcctcccacctctccttaaggagccatttctctctgcttctctactcgctgatgacatccaagctcttctttgtgccaagttttccctctttcaatgaagcctcgccctcagcaaataaacacagtccaatgcccgttaacaaaaaggcaacaaagcaaaactaaaacaacaagggcaaaagaaatctaaacccaaaacacaagaaagtatcgtcactctgacctcatctggctttcatccaatctctccattcacagccaaattctgtagagaagagtgcagggcctacacatcctgcctcctcacttttcatttactctcgaatcttacgcgatgaatcttgcgttcatgtgggtcacactgaagccgcttgtgtgaatgtcaccaatgaacttgtcactgcttcaccttcccctcctttaagcaacttttcaggcgagtgtctgagatgccaccatataaaaatcggaatgtctttagctttgtttttttaaaaaatgggtaaaaatgaaagactctataaggaaattttattatctcaggcaaactagccacacttggcaacaagagctcccaatatctggagtccccaagattaattcatcatcagggcccacatcatcaaggcgctactgctgcctttttcaatgtggccatgttcagatgttatgctgatttgggggctcgatccactcgagctttcgtggtgtgtgtgtgtgtgtgtgtgtgtgtgtgtgtgtgtttgagagaaggcataggaagttggaaggaagagaaagagggaaggagggaggaagagtaatagagagaaatagaaacagagagtgctgtgtgcatgtgtgtgacatgtgacagtgtgagagtacctgtgtttggaaagagcaaaaccagacacatcactgtccaccaaatgcaaggaaattgtttcttccccagctttgagaacctgaaaaaattttctaggaatccttcggcagcctcttgtcccagcataaatgattcacagcctaaaaagaaaagactccccttagcttatgagttcctaagtagaaaaagtcctatttgggcttaggagccattcccccctctaaatgattcaatccaatagggaaggggaccacaggacaggcttacgctcatcaggactgtcctgattcacgaagaaaggggtggccaggttctgccagtgtggatggaggagcaatgcttgttgagtggacgaccagtaatgcctgccaaactccttccactgggttctcctttcctagttctgcagtacaagcttcatggtctcagcttctgcccatccatcagtgtccttgttaatggaggtgttcaggaccctctcccatcacttcttcctccccactctccactcacaactttgggcctgtccaccgcctgaatgcgcttgacctggacatccatttatctaggagagctatctcacttgtgttcaaattggtattctctccaatagataagacagaaaatctgaactaatcacacacacttatacacacacaaatgcactcacactcagacacacacattcatacacagacatgcacagaaatacagacacacacatacacacacacaccaacacatgcacagacacacagacaccctcagacacacagagacacacacaaacacacacaaactcatggacacacacacaatgacacagatgcacagactcattccaaatctttcctcttgccttgcacttttatgattagtgaattaaatcataacccacaccattacccaagccaggaaccagtgaatattcctggctgttactcctctcttgagccccacagttgctgcaaggagttgtgtcctgctgatggctccccttccacatgtctcaccaccttctcctctcctgcacactctgagattgtttagtgcaggcctgtacaattgcacacaggtgctgcctgtcaccccaacagcaggcttgttctctccatctgcacccagagagaggctttgcagctgggggtgcgaatgtggcagaatttccatcctttccaacacacattcattttatggcccagaatgtgttctcttctctcttggtgaatgtcccaaatgcctgtgagcagaatgtgtatttgcttcaattgggtgtggtcactaatgtcccgggcagggtagagttgtccagctcttctgtctttccacagattgtctaggcactgattctatccattactgtgttgaaatctctagctagaattgcagacttatttccccttttcagttctatcagcttttgattcctgtattttgaaactccaatatgaagcccacactcatttaggattaatatggaagccagcctttaaataagaattttatcttaaaattaatatcactctgtcatcttaagaagatgtgaggcctgtgagagcaggtactgtgtattttgtgtctgtattctttctgtttcacactgcaaccataatcgatgatgaataaataatgttccctcttgaagatctggtccctgtctccagggcagtgctatgtaaaaaaaaaagagcaaattcctgccttctaaacactcctccacaccaacaaacacactgtgctaggaaagcagcagtgatgaaggtgctgggcctccggtggaaaggtaacacacatttcccatcctcgggagcttgcagcaccggcaggcgggccgttacacagataacacagtatgcttctatgccagggtggacccaggagtccgtcctccctgtcacttacgagactggagtcctggaaaagttactgaacttctctgtgccttggtttatccatcatgaaagtcgggttaaaaagaataccccacccctagggtggaagtgggacttgcttgaattgaaacagttggtttttaagtattttgcatagctgttattattaaattaacatcaaaaaagttgcctggttattttaatatggtcttcacataggcagtacagccggccagatttagcatttgcatttataactgagtctctcttctgcctccgtgagacttcccaggagttgctttgatgctgcagggagtcacacatctccagatgcatcactggtgactcagcaagcacctgacctggtccgttacacatggggcttatgtgcttaactcctatgcgatgatgattcttctctagttcttgggggtcgttccctttctcctactgtactggctgtttaaagtcagcactgtatgagttgcatacataagccaaatgtcattgacttcttctttttttttttttttttgacagtcttactctgttgcccaggctggagtgcagtggtgtcatctcggttcattgtaacctctgcctcctgggttcaagcaattctcgtgcttcagtctccagagtagctgggattacaggcatgagccaacgtgcccagctaatttttttttttttgtatttttagtagagacaggattttgccacgttggccaggctggtctcaaactcctggtctcaagtgatcaacccaccttggcctctcaaagtgctggcattacaggcatgagcccttgagcccagcatagatgtcattgaaattcaagggggaaatcatttggaatgatcacagcgactggtccagagatgactaacagcttaaaatgaccccacctgaaacagcggcgatcagtggaatgtccaagtatatatatatatatttttttaatgaagctcttttggaccagaaaccctaagaatgtttagtctggagttccataattataaaaaaaatcttctgaagttaatcaccgtttttatctgaaaccatactctaactcagtaactctttctcagggtttactttctcttgagccacaagcatccatttgtcccctaccaaagggactagactttcatgatggataaaaggacactagtgccaggtagcttctgcttctaaattttggtttaaaaaatgaaacatctccttttagatattctaaaaagtcatctcccctaaaatcatgaagcctggtttataaactttatagaagaaactaggtctttgaggctaacacatattagtgtattaaaaaatacggtaaaccagccgggcacagtggctcacgcctgaaatcccagcactttgggaggccaaggcaggtggatcacttgaggtcaggagtttgagacaaggctgaccaacatggtgaaaccccgtctctactaaaaatacaaaaattagccaggcttggtggcatgctcctgtaatcccagctactcgggaggctgaggcacgagaaaggcttaaaccgggaggcagaggttgcagtgagcagagctcccatcactacactccaggttggtcaacagagcaggactctgtctcaggaaaaaaaaaaaaaaaaaaggtaaacaaacattgccttaaacaaaaattgtatcttataagattttacaagttgcacattatcaacacattctagttaaatgcttaaaaattacttcacaattaaccctatggatttttaaaagaaggaaagcttagacacaaactcaggagccagattgttttccaacccttgggcctgccacttactaagtgtaccagcctccctcggagtcactctattcctcgtggaatctgaatagtaagtgtacacttgacagaacatacggagtggtaatgtgaaacaaaaatatagaatatttaaaggacttacctaacagtaagaaaaaaaataagttcacttaaaagtgtttttattttcttatttgcaaaacaccccttattgtggtaaggtctaacaatatactatacatgtaaaagttttacagaaaattactgtagctttcgataatttaatatataactgaaatacttgagatggcataattcgattttatgtcagtaatatcgagtgagactaatcaagatagcaagattatgttgcaaaattaaaatgaggaaattgagaggatttctcaggcttctgtgagtcactgcctgggctgtattaatagtttcattgtgctaggtgcagtggctcatgcctgtaatcccagcactttgggaggccaaggcgggcgaatcacctgaggtcaggagttcaagaccagcctggccaacgtggtgaaaccccgtttctactaaaaatacaaaaattagctgggcatggtggcaggcgcctgtaatcccagctactcgggaggctgaggcagaagaatcgcttgaacccgggaggcggaggttgcagtgagccgagattgcaccattgcactccagcctgggtgactataacgaaacttcgtctcaaaaacaaaacaaaacaaagcgaaaaaacaaaaaaagtttcattgtttcacctccacacagctctgtctgcattttgagcaatggccaccagagggcaggaagaaccaatctataaagcacacaagggtttcaccaactttgaagtcctccgttagaaggcaagttgtccactaatatgtaggaacgattaatggccaccagagggcaggaagaaccaatctataaagcgcacaagggtttcaccaactttgaagtcctccgttagaaggcaagttgtccactaatatgtaggaacgattaatggccaccagagggcaggaagaaccaatctataaagcgcacaagggtttcaccaactttgaagtcctccgttagaaggcaagttgtccactaatatgtaggaacgattaatggccaccagagggcaggaagaaccaatctataaagcgcacaagggtttcaccaactttgaagtcctccgttagaaggcaagttgtccactaatatgtaggaacgattaatggccaccagagggcaggaagaaccaatctataaagcgcacaagggtttcaccaactttgaagtcctccgttagaaggcaagttgtccactaatatgtaggaacgattaatggccaccagagggcaggaagaaccaatctataaagcgcacaagggtttcaccaactttgaagtcctaacttagaaggcaagttgtccactaacatgtaggaactatttttaattataccattattttccctcaattttatttataaattaatgaattcacaaaatatttccaaagctcaagtgaagtacatcctaatcaacttgatttacaatttgtgatttttctctgaatcaatctataaataatcaataagaagataattatttagaaaatgaggctccgaaaaatatgttggctttacattttttgcctgtgcaagtaaatataaaaatgtcttttctcacatttcttccatttataaaccgtttttaaaaatcataaattaagacatgtgtgttttaaaagtctcacaacatgcagcattttaaaaattgtcttatgctttactgctccctcccgtaggtaatcactgttacatttctcatttactgcaaaattctctgtgcatatggagcacatagatggatagatagatggggtgtgtgtgtgtatatgaatgtgtatgtgtctttggggtgagtgtgtctatgtgggtgtatgtatgtgtgtctatttgtgtttatttgtgtctctgtgtatgtgtatgcatattacatatgtgtatgcacgtgtgtgtatacagtatatgtgtgtgtgtctgtgtacttgtgtctgtgtatttgtgtgtctgtgagtacatctttgtgtgtatgtctatgtgcccatgtctgtgtatttgtatgtatgtatgtgtgtatttacatatgtgtatgtttgtatatgtatgcatatgtgtatatgtgtgtgtatgtatatacagtatattaagtgtttgaatgtatgtatcatatttatcaaattccacgttgtattaattgttctcacactgctataaatgactacctgacactgggtcatttatgaagaaaagaggtttaattgactcacagttctgcatgggtggggaggcctcaggaaacttacaaccttggcagaaggcaaaggggaagccagcacatcttaacatggccgatcaggagagagagagagggaagcgggtactgtcacacacttttaaaccatcagatctcatgagaactcactatcacgagaacagcaagggggaatctgcccccatgatgcaatcaccttccacctggtccctcccccaacactgggaattacaagtcaacatgagatttgggtggggacataaagccaaaccatatcacacgtcttgctttttcactgaatgtgggaccttggacactttccctatcagcatgtgtggctgcaccacatggatttcagtagtggcagaatattcccttctatagattccacaattcatccaatcagtctttattcttccaatttaaggcaaaacaaattccaatgtaaaagcttaaggccaggcgcagtggcttacacctgtaatcccaacacttcgggaggccaaggtgggcggatcacgaggtcaggagatcgagaccatcctggctaacatggtgaaactccatctctactaaaaatacaaaaaattagctgggcgtggtggcaggcgcctgtagtcccggctactggggaggctgaggcaggagaaaggcgtgaacccggcaagcagagcttgcagtgagccaagattgtgccactgcactccagcctgggcgacagagcaagagtccgtctcaaacaaaacaaaacaaaacaaaaaaacaacttaaattaatattaaaaatagttgttgtttccttccagtggacttaattccaaccaggctggtgaagaagccagttggatagccagtccctgctgaaggtggatggcccctgctcttgtctcccggttatcaggctctcgctgcttttgggccagaggaacagggcgtcctccttgaggctgcgagtcgtccctctgagtgcctctcaccaagggatgaagcagcagccatttggccagagagcagtcactcacccatccttgggtccaggagaggcattgcaggctttaccctcagatctttctttccaaagctccttctcttcaccctgtatccagggcacttggcctgaagagcctttgtcttctggaagcttctgctgccttccctgcccagatccctcagacaaggagctgtaaggcccaactccaggaggaaataaaggaagagggaagaaggagaagcagagagaggagagatgcataaattaatacctccagaagcagccttgctacagacacatcatttgttcctatttttttctctgtgtcacacagtgctataatgcagaggaactgctgcttcgaagggtacgtgcctgcacagtctgagattggcaagttgctatcccctgtgtgtccccatcgagggggacaagaccctttccttccacattctcatgtgtacacgacggggctttaacatttactcatatatataccatcttcttgtcatctagagtttcaattctttcattataaagaatgtggtaattgttcatttgtttacatctttatcatttatattattctcctaaattcttgcccaagacatttgaagcaccctaaaacaagaaggcatatctgggtagttcaaactaagattttatgaaaagatgcaaatcatttacagaaaggacaaatatattctagacatctgagattgaattgttgtaaatttgactatgagctataaaagctgacatataatatcaacaatattattatctaatattatctaatattagatatcatcccataaatgaatgctttcatattattctaaacaaaaaatttagaataaaaacctacaggaaattatcttatagttctaaaatatgggctacctttccaacttaaaaaaaaaaagcacagtggtagtaaagagaagtagagaggaaatggggagttttccatactgaagaatatctgcaatgaagacctgggtacatttttttaaattacaaaactaaaaaaataaaggcatctaatatataattcagtgtgggaaaataaaaacaaattgctagtttaacttaccaatactgtgagcaatttaaaattgttagattccaccaaataattgttaaatgagataagccaggtaaatgtcctagcacaatacctgaagtacggtattctcaataaatttcagttattgtcatttcagtagttacaattattttcaaaagttgtttaatctttttttctttcaatccatgttaattctaactgactcagcttaaaaggaaactacttcaagattgaatttgaactagaaatgggatccccttgtagtgatgtttgagagagcagggattactctccttaaggcttctatttaactaaaattttattggaactggataacatgtggaggtcggtcataatcaatcactgatagacataaatctgcaaagaattcacttgagggggagatgagtgtcttccaccccattcaaggttgccattttccacaaagttcaggcagtggagtgaaatgccacaataatactctattaaatcaacacattggtaatgtgatggcaacacctgtagccatttcagatacaggcagaagctcgcagttattaaagccacatggagagggtacagcaggaaatgaagaaagagggaagaaggagaagcagagagaggagagatgcataatttaatacctccagaagcaaccttgctacagaccatcgtctgtttctattttttttctctgtgtcacacagtgctataatgcagaggaaccactgctttgaagggtatatgcctgcacagtctgagattgacaagtcgctgtcccccgtgtgtccccatcgatgagaaccacatttatggttcttgtggttgcttggacagtctttattttcatcatgagacaaagataaggcagacatttctggtgaaagtctaacagttaagttgtggtaaaagataggatagttggcgttgggcaacttcagtgaaaaagagctccttataatatcataatcttgtcctcagaaactcgtggactattatttgtggctgccttttcatcctttactttagcaacttaccggttgctttctgtgtatgtggggccagtttatgtgagatttgaagaagggattttcctttattgggaatgtctaatgagcacttacaagcagaatttcctcccgatttttttcctctgcactctgaatactggaaagtgttttgagggccttctgacagtacaccacagtgatttttttttctgtcgtaatccatttatgactaaaaaacatgatgctttttgtttttgagatagagtctcgctctgtcacccagggcagagtgcagtggcacagtcttggctcactgcaacctctgcctcccaggttcaagcgattctcctgcctcagcctcctgagtagctgagattacaggcatgcgccaccacgcctggctaatttttgtatttttagtagagacaaggtttcaccatgttggttaggctggtctcgaactcctgaccttgtgatccacccgcctcagccttccaaagtgctgggattacaggcatgagccaacgcatctggccacatgatgctttttttttggttgctcacatgacaagctattatttttgtgtcactttaaacagaacttaaggtatagacttcatgcattccttcttgagccctcttccattacagcagttaaattttgtccagattctgtaaactagtattgctgcctgagtggccgtggtatttcctttgagctgaacttggccattttagcttcttattagacaaaacagtatacttggagtcctggtgaataaccagacaaatggaatttcttgtccacaaagctctagcacagtggttcggcgcagaggcccatgcttccctacttgatcttgtcgtcactggctcagccaaatgctatttctcaaagttcataaatctcacatcctctttgtggagtctttcccctttttgtacatgtataatccccggcctctaagtagtctattcacttctaaagctgttgacttggcaagataacaactgcatcattcacacaagcaaatctgctcttggaggacaaaaagaggtttattttggcttagatgactccgattggccatctccattgaaaccttggcagaagataggtcccttggctactggggagaaaagtcaagtaaacctttagtgccaggaatggtgtttgtaaagattcggcatgaagtggtacatttcgtccttgggcttcttactggcttcaacccaaacagaatcacttagtgctgttccccgggttaatgatgttattagaacaattgactcaaagcaagaactgaaaggctgagtgctttgttgtgaggtgtgcaaaaattcaagtctatcaaaacaggcttagcagagctgccaccagcaggacagcgtttagcttttgtttgctgcttctttgattcttcatgggcagctggcatttctgttgctggtttctactctctcatccctagtggaccctacgttttctcccctgagtgtgcttatctgtccagctgcaaaaaaaaaaaacaaaaggtgtgctgttgtttctgcacttctccctgtcctcatctctcaacatcatatgtgtgcagagaaatcacacttgttgctctgttgtctcaaaaggtctagccctgagtttgctgaggtgatgatgaaggttgtgtgaagctgtgtcaaacactgagaaacatacacacaggctgtagcagatgtgtgttattccctcaatgcatgcaccagtgatggggatttagaatgagccactgtgcaaagatgccccagagagactattccctatacattattattcagtgtaagatacccaataaagcaactagataaagaaatgcctatatctaaacctaaaatattcactcactcccagcgttaacttccctcatccttaagaacaggctatccatggagctaccaaaatgcacttttaaaaagtgtgttcatgctgcacttcatattcatgctcccttttcccttgacaatgtgttatatgttgagaatctttaaataaaactgctcaaccaccaaaaaattatttctccccatttctattcatcagtacttcttatcttgaaggctgatttcaataatcatttatccctcacaacttcatacaatttcttccttttagagtcccactgaatatcatttatatttatcccacgctatttttttattctagtttatattattacttgtgaactttcctaatctcgtctcccaaacacacaaaccctttagctacttccatgggaggctatcttatctattactctccacacccccagccacgggatatgcaggagacactaatggatctagtatatcacacaggaagcagatcaccaggacgacaattacaatcagcaaatcccagtatccactaaagacagtgacaagggtaaaaagacaatagctgagagcgaggtaataagtgttcatgaagaatttcttaagcctcagcatcttagcagctatagcagaatgccataacaaagacaaaagtattttgagtgtgaagttataccatgacatacaaatgcatctgtcaatgaggccgttagaaatcttccagaccaaaggtcccaaacacccaccataaccttctgattcaatagggcacatatggggaaactgtactgttaaaaagcacttctaccaagaaaaggcaaaaaatgtcccctcaccactccttctcaacactgtactggacatcctaactaatataataagacaaaaaaggaactaaaaggtatacaggctgggtgcagtggctcacgcctgtaatcccagcactttgggaggccaaggagggtggatcatgaggtcaggagtttgagaccaccctgaccaacaagatgaaaccccatctctactaaaaacataaaaattagccaggcatagtgatgcatgcctgtaatcccagctactcatgaggctgaggcaggagaatcgctagaacccaggaggcagaggttgctgtgagccgagatcccgccactgcactccagcctgggtgacagagtgagactctgtctaaaaaaaaaaaaaaaaaaaaaaaaaaagatatacagtttgggaagaaaaaaattaaactgtctttgttcacaggtgacattatttgctatcttaatttaatttccaaagaattgatgaaaagcttctgaaactactaagcaattatagcaaggttgcagaagacaagattaatatacaaaaatcaactattttcctatataccagaattcaacaagtggtatttgaaattaaaagcacagtaccatttacattagcacccccgaaaatgaaatacttatgtataaatctaacaaaatacatatgagtcctatataggaaaactacaaaactctgatgaaagatgtaaaaataaataaataaatcgagtgatattccatgttcatgaatacaaggactcaatattgtcaagacatcagctctccccaaactgatctaaacattcagtgtaatctcatcaaaatcttactaaattattttgtggataaactgaatccatagttcatatgaagaagcaaaagacacagaatagataactcaatattgaaggaaaagaacaaagttagaggactcacactacctgacctcaagacttacaataaatctactgcagtaatcaagacagtgtggtatttatgaaacaggcaaatggatcaatggaacaaaatagcacagaaatagatcaccacaaatataataagctgatgtttgacaaaggagcaaaggcaatacactggagaactttcagtcttttcaacaaatgatgttggacatccacatgcaaaaaaataaatccagacacagatctcacactcttcattaaaattaactcaaagtggatcgaaggcctaaatgtaaaacacaacactatgaaacttctagaaaataagagaaaatctagatgatcttgggtttagtgattttttttatttttattttttatattgattactgtgttccaggatattctaatttactaatttttattttaatttttttctgtctagtctctgattttttaattttaatttttatttcaattgttttggggcgacaagtagtgtttggttgcatggaaaagttatttagtggtgatttctgatattctggtgcacccatcaccagagtagtgtacattgtgcccaatgtgtagtcttttatctctcactcccctcccagccttccccctgagtccccgaagtccattatataattcttatgtctttgcaatgacttttaaaatacaacatcaaagggatgagccatgaaagaaataattgataagctcacttcgttaaaataaaaatttttttattttgctaaagacaatgtcaaggaaatgaaaagacaagttacagacagactgggagaaaatatttacaaagacacatctaataaaggactcttatccaaaatacacaaagaactcttaaaatccaacaataagaaaatgaatgacccaaataaaaaatgggcaaaagacctgaaaacacaccttatcaaagatatacagatagcaaagaagcagagtaaaagatgctcaacgtcatagacttatggaatttctgttaaaacaatgaaatagcatgatacacgattgcagtgcagtagagcttcccccaggaatactgttcccagacttgtgcagggctggttccctcactctttgcctttctgtttgcagcataaatgccacttcattgaggtgttgaggattccctcactctgtcccttccgcctctcaccacaagcacctgctttattttactatagcacctgctctttttttttctcatgcatttgcttttatgctctgtccattcattcctacagatggtgagctcctgagggcaaggcccatgcaggtcattttcagcactgcaccctggcctaacttgccccgtgcacaggtgagtgctccaggcacagtttctgaatgaataaatgagagtatcgaagatcccccttcccacctgtgaggagctcacattgaggagatggatgctcacaggagatgcaagttgggtgggaggcagggggacacccagagtgaccctgggagtttctctggctgcagccgccccattgagcagaatgggcagcgcctcccctgatggccagcactgaagacccaggcaaggaacctagaaacaaagccctcatctgggtgtgggtgtcctcaaggcagtaggactcccagggctgaggggggcaatgaagggggagctgtaagctccaggagagataagaggggcgtcggaaggctcccttgacccctctttccctccactggccctgggggagcccagtccactcataaggggggtgtccagtccaccccatccacttccaaacgggggcccgaggctgcaagcaaggacgctcccctctacatgcagggctcggcctcccctgcaccacccaggacccccgctgtcctgcaagccccagccgctctgggccaggacccagggagtggaaggcattttccaagggcacagtggctccctgacggggaaccaaggccaggcacgcttctcccagactgggggcctcggggcacctgagaatggccatccttggtacaagagagcggggacccactcccgcgcaccctgtgccccaggggacgcaggactctgcaccctgaccctagagcttgccctaggatggcccggccatggcgaggccctggaacggtgaagactctctgcccatcaacctagcacctctgccctaccctcagtcgcatatgcacccggtgcgagggagaaggcaaccaggaggtcacacctaaggtgggggcgtgagcggcaatgccagccgattgtaaaaccttccctgctcctgcgtggctctgcaagccaatcgaaaattccgtcgtctatgccgccagccaatcaggatgtccagagcgcggtgcttccagccatttgggactccagctggctctgcgcctccagccaatcggggtgcccgtccttaatacaaccagccagtcagtgcccggcgcgcgacaccagcagccagtcaggaagccctgcgttcatgcttccagccattgtcggagtgtcagccgtcacaaggcacttccagccagtcgcaacggcgggtcgccagcgccgcagtagctcgcgcggtgcctgtcggtagtcgcgtgcggggcggcggggcggcggggcggccggcggcggccatgggagatatcccagccgtgggcctcagctcctggaaggtgacgcggtcgcgggcagggaggcgcgcctgacctaggggagcgcgggacttgggggcgcccgatgggacccaggccggggctggggagaagtgcggcggcctcccctccgcctggccgacgcccgggaaaggcgctgctgaggtggccgcccaccgcccacaagcagcccggcccggcctttcctaaaacggagtcggtgctgcccgccgaggcgctctctgggagaagcgggaacctcggcagccaagcctcagactctggggctgcggccgcggcgttgggcggggctgctctgtggagaggcggagcccttgaagttactcagaactggagcggggatgccgaggggaggccttggcggcgctggactcggccggaacagggaacctcgaagcctcctctccagcaaagagagaaagaaaagttggggccgggcgtggggtgcgggcttgtaatcccagcactttgggaggccgaggcagtaggatcgcctgagctcaggagttcaagaccagccaggtcaacatggcgaaaccctgtttctacaaaaaatgaacaaatcagctgggcttgggggtgcgcgcctgtggtcccagctactcaggaggctgaggtgggaggatcactggagaccaggaagtcgatgctgcagtgagctttgatggcgccactgcactccagccttggggacagagccagaccttgctggaaaaaaaaaaaaaaaaaagaaaaaaggaaaattggaattgctgattaggctttaaaagaaactttgggatctcatgttgttccctgtttagaagcaacctgccctgatgcctgagacatataatcgctctgtgcatttatggggtgcagcgtaatgttttgagccgtgtatacaattgcaatgtggttaaatcaagctaattaacatatctatcacctctctcagttattattgtttgtggtaagatgtttgaaatgtcttgttattttgaaatacacatgtgtagtaaattattgttgactgttggcatcctagtgcgcagtaagtcttaaaagctgtgtctcctgtgtgtttgaaactttgtaccctttgatcagcaactccccattccctccttcctcacctcccccagcccccagcgtcttataaccaccattctattctacgacctttctctgctttgaacttcacaattcctgccagtgatttgagacagcactgactaaaaagcgtttaaaatttgatctttaaaaaaaaaaagctaaacttagttgttgataaaagctataagaagtcatataggaagttagttactgaaggagtcagaatgttcaaggcctgctcatgaaaatattatttaaattatttctcttacctgcttaccaactcttagaggctaggagtgtcgttttgttcatattggttctcagcatctagtgaaggacgtgcatctgtcagcccttcattcagtaagcactcgatggattaaactgttgagtctcttgcttccctttatttctgcaacaatttggtgcaggagtccagactttcgtgcacacaggataaggaaaaattagtgaaaactgtgcttaacaggtcaaaatattctatttatttttcttggactgcaggtgcatcaaattggattaatcataatcactcatcactggtctatgcaaaggcttatttttactcgtctatttttaatagtgaataaacatcacagacctatccgttatctgttgccccagaaatgctgcatcaatggccaaacaccagacctcagtggtgtacagcagcaagtgtattcctcccacacgggaggtcaggagagcagctctgtggaccttggctgggctcagttgggatggttggggctactccacttggctccgcacatctcctgtcctcgtgcggttagttagggagtgttctcaagatgatggctgaagcacaagagagcaaggggagcggtgagatgtctggagacctcagcctgggctcttcattattaggggccacttgatccatctgtgtgcctgatcggtgctgtcttaattactacagttccttgataagcgcccatacctagtagggcaggtcacctctccctgctgttgtagatttacagtgtacaatttgatgagttttgacagatgcatgtacctgggtcctggctttttattttggcaccttactctccactgtaagttttagaactagcttagaaggttccatgagaaactttattggggttttgattggaactacattaaatctgtagaccagcttggagataattgacacctttgtaatgttaaatcttaacttttctacaagcatggtattcttctctgttaataaattgtcctgaatatggttcatttctaacatcttttcatatggttgtatagtttttcctgaagagaatatatgtcttttgttggaattattattgggttcttgatagtgtgttatactactggaaattatatttctctgaagttacattttctacttgtttcacctgctatattcattacacttccagccactttactaaactgtactgttatttctgttaatttgtgttacatttgtttggattttctacacaaatgatcatatcatcagcaaataatggtagtttactttcctttttttccactctttaagcttaaaattgcttcttcttagttgttcaggtgcttctggaaagcacctccagcacagtggccattcttgttttgtacctgattttaaaggatgtaagatggatattttttaatattgatactctttatcagattaattcttttccccgacttactgggagtttagattttgaatctaaactggtattgaatcttaacaaatattgattgagttgacttttgtttttgtactttaatctgttaatattgatgaattacagattttctaatatcaaaccatccttagatatctgagatacactcaacatgggtgtggtatattatcttttcataaatattgttgcatccaatttgcttttattttacttatgaattttgcaacggtattcatgaataagatgaatgtgtgacttttaatatttttgtctgattttgattcagggttatgctagttttgtagaatgagttgagataagtccgtctttttctgttgtttgaaagtctgtgttaaactgagatgatttttttcttgaaaattttatgaaactggtggttttctcttttttttgaattccttgcattctttaataattatgtaactattcaagctttattcttgggttaaatttttctaggaattttcccattttatctcatttttccaagttattgacatatagttattggtaatattttcttttaagtccattttatctgcatgttttactgtccattcgtgtcagttttttaaaaagttggcctcttcatcaacctagccagaagtctgtttattttactgaagtttttcaaagaactgacttctggttttgttgatcttctctgttacatctttgttttctattttattgatgttattcttaatcatatttttatctttccatccaatttcttgggttctttttctaacttaagatggatacttggttcattagctttcaaccactctgaatctgttgcctataaaatgaagataattatgctgctctaactcctagggttaccgtgaagctccagtgagaaagtggtttgtgaactataaagcccttgtcagtcttcagtttaatgagactgcaaacccgcccacccccatagtcttccctagttctagtcccttcccttgcctgagcttcatttagagtgactgttctcttttctgaactaccttattgcttgtagcattatacattcatttaggttttgttatatacttctttttgtatggataccttcgtgtgagtctacacctcagcctttattattggacgctgtggtatctgagtatacaggataaatcttaagcctctttgcatctcagttattattcattctgtacttttttattgctttgatcattcaggaagcataccatctagctcagttttctgcagacactaaaaataacctatagtttttttttcccaaaatatgtaaaggagttggaacttagattattcataaattccttcataactgatattgcctgtttttagactgattatactagtaccaaattagtgacttaattttttatgtattatgttgtccacatgcttgggtgaaaggggagatttgtgttggattcctctgactgtgagaagacactttgttttgttggttttgcaggcttctccagggaaagtgaccgaggcagtgaaagaggccattgacgcagggtaccggcacttcgactgtgcttacttttaccacaatgagagggaggttggagcagggatccgttgcaagatcaaggaaggcgctgtaagacgggaggatctgttcattgccactaaggtagggcttctctatgcaaggctggcagagcttgggtaatgctacatctctggagggctttctactttctttatgggagttgatgactttgtttcatactcaaatcggaataaacaagaatattcacagcttcatgagcatgctgaattatattgtgtgcaggtttgtttcatattatttacttggtcattcaggtaggagtacacagatatcccccaattaacaatacattatcaaaattcagttagtgatgggcactttgactacagtggtgaataggacaaagtcctagccctcatgaagtctgtttacacagcgattcctaaattcagaatcactggggtgattgttaaatgcagattccaaattctaccccacatctgttgaaggagaaactctgggtgtggaggaagcagcttgagcacaggcataaggcaggaagcagcacggcaggtgcaggggtttgtaggaagcttggtgtattagtctgttctcatgctgctgtacgaacatacctgagactgggtagtttataaagaaaaagaggtttaattgactcacagtttcacatagctggggaggcctcacaatcatggcaaaaggcgaaggaggaacaaaggcacgtcttacatggtagcagacaagagaaagtgtacaggggaactgccgtttataaaaccatcagttgtcacgagacttattcactatcaccagaacagcataggaaaaacttgcccccatgattcagttacctcccactgggtccctcccatgacacgtagggattatgggagctacaattcaagatgagatttggctgtggacacaaccaaaccaaatcacttggtctctctggaccacacaatgtcaggttgcaggagtaatgagaagtgaggctgagtggtggataggctaagccatggaagttcagctgtgccctgtcaggagctgtgcttttacctagagacagaggagccctgtttcatttttaaatagggcagcttgtatcatatgtgagtgcaacttgtgttgtatataggatattttagtaggtgaaagaagcttgcatttgaggcagaggcaggaggccaggtaggagacattaacagcagtgcaggtggaagatgatgaaggcctgcactggcacagtgggtgagggagggagaagaggaaatggatgtggagggtattgggagtcaggacctgtggaagatgcagagtggactacgatagtggagaattcaagaattcctttgcttttgatttggaagcagaatgtaagaccatgagatcaggagtcatgggttcatggtctagctgccattcaggagctgtgagtattagggattagatggctcaggctcacagcttcattatttgtaaaatgagactttggatttgagaatttcctgagtaacttcccagctaaagtttcatacctcaagattcaatgttgtttctatagttgaattgccttctgttttactttatggaagttaatgttcttcaggcaccattgctatctgcactagagcagagggtggtaagagagcagccttggtgtgtgcttggccaagcggggagaatgtcttctgaatagtccaggtagggatgtgagcaactggagatttctaaggctcaccctgcaatttggagcaagttgcttctgtgtggatcgtagtcagcagtggaaatatgttcattattttggaaatttggaaaagtcatagaaatgtaattagaaataaataaatcacacatataagcaccacatggagacaactgtgattaacaatggaatacatttacttccagcattcatttttttatttttgtgaagatactgtgctcgtttgttttcatttatttgattcccctttcttttactttcttttactttactttcttttactttactttcatgtttttcccttgctgtgatggagccttcaggttagcttatgtcacagtcaataaaagtaaaatgaggggaaaaacacaagtttttctacataatgagagtgtggaaggagatagctaaaagaagtaaggcagtgtgagctaactcacctataggctaacccacatggttacagtgccttaggaacagagaactcttaatacggagtctgtgtaagtgagaaacacaagatagagattcttctgatttttcgtcatatcttttctgcctgcaggaatttcattttcgtttttgtttttggtcccaatgaatccaaataaccatcaaatatctcttggattcctgagcttcccttgaggaggagtcaggcagaaggatcccagctttggagcctctccctgcaggtgtcctggaactcttctgaggataatgtccctgtcctcccatcagaacttgccgtgttgtatttgtggtcatctcatcttggctattttgggttcaagacagtagctttgtggggctacagaatgggtgccatgctggctctgggtgggcacgtgtgacgctggtcccctctcctttgtagctgtggtgcacctgccataagaagtccttggtggaaacagcatgcagaaagagtctcaaggccttgaagctgaactatttggacctctacctcatacactggcccatgggtttcaaggtaccgttcagtaggtagttcgttctgcagtttgcaggaccttcctccccgtgctcacaccctgtcttgcggtggggagagcatggaccagcattcagggcaggggttcccaggctgcatctgccacatgctagctgcggcatttgggcagtcctcttgatatctctgggcctcagttaaggagaggcttggcttgacctctgaggcccccacaggtctgtctttcaagccagtcgctttttttccaagccaagagagcagtagatttttttcccttaggtttttaggtgaaagcagtgatcagatgaggaaatactgctgctcagagaaagttcccagtgaattcctaggccttgtctcttcttgcaggttctgttctctttggggagtaaatgctgttttgcaatatgggagatatttgcttgttcacctgcagcagggtccagtgggttgtgctggtagttgacttttccacttggttttattctcttaattgcttcacagtgtgtctggagcatgcatctgagccatggctctgtcactaagctaccccagtctggccgtgcaacttccctactctaggcaacctgcttctgcctcacacgggtcctggccaggatgtccctgcatatttgccctgggctgtgatgacagcctgcctgggcaagggcctgatcacacagttgacacctgtgaaatacagaagcccttgcagggatgttcttcctacaatggaatgggtgactgctgctcagcagtcttctacataccaacctgtgagaaggtccctttatgtgtgccacactgttggttactgttttagagtaaaataacaaaaaacacttcattcctagcacagctttacttaactaaggctttgtatctagtttccataaacgatgtgggcagctgtccgttagtgacactgactaagaggggaagatacccagagggcaaaaccagagtgatgtctgtgccttgaaattcattgcatgcagaaaatcataattaaaacaatggctacagctgtattacactcattgccagccagcattgttgtaattatgtacccagaactatgttaggtactttacacatattaactcatttaattctcatgacagttctacaaagttgacactattaacatccctcttggagagatgatgaaactaagatacagaaagtttaaggtttaagttagattattggagcccagaagcatatgctcaggtcagacatttgttacactttccttgccctcatcctttagcagattcctgtctttggatttctgggtcgtagaaaaggaaaaggtctcagatcatccaacaaattacagaagagaataatgcagcatcgtcagcatgtcttctggccagtaggaactgctaggccttgtgtgatgctggacaattagatcagggtccgagtatgagtcccgggctgcaattttgtggaggcttggataaatggcaacatgggatgtggctttaaagtgagactgttagttacttcagctcatcatggaaaatgcctctttcatgtgtatcaggctggaacatgtgacattcttccactgttgtttaggagtgtgattaggtgtcattaaataaacatgcctatgccattcacccttaacatgctacgtgggagtacatgagggaggtagctggattgcacgtcagtgcttctctgaaagatgactttaggttcttgccctttcaagatgtatctctctgccctctacctcctgtgtacctttgtattctcacttccttacctgtcatcatgatggggattctaagaaagaagacaagaccctaacagtggagttaggagagggttgattgggctctataagacatgaagaaaatgcactcctcacccattctttacccgaaattagtaaactattttctggaggcaatgggagaggacaaccttgcatcagtaaggatacagggtcttcctttcccatcttgtgagagatgaacagtgaacatcaggctggcagaggctttgccagccatccagtccaccagccattcatcttttcttagaaaggtgaagactgggcctggtcacatggccaggctggggttgcttagtgacagggctgtggcttggatgcaggtctcctgacacatggttttttttgttttgttttgttttgttttcacacatctcaactctccttcttcgcagcctcctcatccagaatggatcatgagctgcagtgaactttccttctgcctctcacatcctcgagtgcaggacttgcctctggacgagagcaacatggttattcccagtgacacggacttcctggacacgtgggaggtgagctgagccacaccaccaggcagcctcatcctgtgtgggtctccacccaggatgcagtgagccctgagctgcttgtgttcaaagacatcaaggttgtctacctgagatgtggggtttgtggagcaaaaaaggaatcaatacccgaagaactcagagacctcagtgactttcttgttacctttggtttggtatggtgcagttctcttgacacatttgaggggtagctcattatagacctcactttttttctcaaatatttatttatttttttattaaaaaccatatttatttcagaaaatacaggagagttcttctgcattaaactaacattaaaaattttattttcctggcacccagcagtaaccactgttaatgttttatagttcctttttctctcaagcatttcagaatgataaagttggcagcatggaagctcaggctggggaggtgagaccagtgtcggggaaggttaccaagtgtcagcccatttccagggttcagaccaaaaacagccctttactgcaggggcttgcagtaaagacttgagcaggaaattaagggggtggtggatttgagaggttcctggaagttgacccacaggctggggtgggtctcaggcttgggctccagcatggctgaccgagcacgtgtggtcttacagtcttgctaaccatcatgtgggatgggacatcacatttgaggcccaagaagaaagtaagcttaagcttaagcttgctgaggttaggacagagcttgctgggtgaagctctccagggaggaggccagagggaaccctcggacagggaggagtcccaggctaggctccccccatcaatagaagacaaagactgacctaaggtatctgagatgtcaggaccagggcccatgggcctcaactctttctgtcacaatgttttaggtcctaaaagatttgggttaaactctagggtgctcatgtagcaccagcgaggttccggtgattgttgcagagttgaggcagtaactaactgctgcgtgttggcccattggtcactcaggacttgctgctgactacggaccctggcacgaagctatgctcttcctgaagctcaggggcagcctggcttgctggtcagtgaccagctcagagctttaggttgctctgccctaaagtgtcttaaaatagtaagtggagaaggtgggataggagaatggtgatgtatccgtgtgcttaagaaggtcagtgtctcagtggaaagaaaggtgaacaaataaaatccgcagcagacatgcttgccagacatcaggaggaataggaacaagaagagctcacatgtgtcgagtactggacgccagccttagctgacacttcctgtgattccacataacccctaaacatccccgtggcacaggccatgtagacctgtcctgaagctgagaaaattggggccaagtgaggccatgcaacttgcccagcatcctctagccagaaaagatgggactgaaatcagaccttgagtgcagaaatgcttttgaagcttcaagtaaaatattgtaaaaatattgggtccaaccagttttagaataccatacagaactgctgagggacgtagattgtcagtgcagtagacagaagcttcacacccagcagagtcgttctcttataggccatggaggacctggtgatcaccgggctggtgaagaacatcggggtgtcaaacttcaaccatgaacagcttgagaggcttttgaataagcctgggttgaggttcaagccactaaccaaccaggtaagccgatggaagcatcagagagtttaacctgtgtggctggtcccccagctgccacctccacagggctcttctggaaatggaagaatgggtgaagcacaaaacaggcctgttctcctctggcagcactcagaatggtgattaaaggcagcagctaggcaagtggctttcttgaaggtgcatctgggtagatggtactgttggcaggcagggcatgagctggtgcttggccctccatgtgcagtgcaggcaggtcaccaggtgtactcagaagcagtcagggtcctggcaggtgcctcacccttatccaggaacatgggcctcccctctacctcttcccagcctgcagactgcagcaagaaagagtggatgactagatggcttcacgcgaggctcacaggctgctgaaggtgatgcaggcacttcgtttttttaatgcagagaaaagacttgtggggaaataactattgtattttctagactagctttgtatgttcaaagatcatttatacagtacttaagctttttattgaagagtagaagtgcacatgtgaaaatggaactgtataaattctcataaactgagcatagctctgggactagcatccagctcagtaaacagcacgtccagtgcccctgtaacccctgccgagcacagcatcattcccattcccagcagctgggattcacgtctgaactttacacaggtaaaataaaataataatgcaacataaacccctctgtgctcgcctctttcacacagcactgtgtttctgtacatgtgattgtagatagtgctctcttatttcttgtggtattctgttttgtgaattaaccacaattgagttatccattctgctgttaatgggcacttagacagtttccagtttgggactattaagaatagagcatcatgttctatttttttgaataaatatgctttttaaaaaagttctgtatggagtagatgcagaaaagtgtgtgaatcataaaaggcatacatagcttgatgaatttttgcaagtgaacaaactcaagtattcagcacccagaacaagaaaaaagccctcagccattcagtagctcccctgggtcctgttgtagccaccaccatgaagagcaacctggcttctgacccagcttctcatgtagttcagctttgccttgtatacaaccctatatatataagttttgatatatgtttatatggatagtagcttccgttttgtgtcagtatttttagttgttcagcactttaaatacctgggaatgattatggcatagtctgagtagacaaagtggggtggagggtctgctttctgttaggttgatggacaccaggaacacaggatgcggaaggctccagaagggctggcctctcttttggaggctttccaaacaggctgatcttgatgagcttggcatgttcctgagagcaaacgcactattcatagttctctgtaatttacactaaataactatttattttaaatctccttataacctggaattatatgtgagagtttggagaatgtgcaagagacagagatcctgctctctagcttcttaaaattttcattcaagtcacctgtagaatgtatttgtcacatgtagttcctcaatttcattcattcattcagtggatatatttttagcacttcctacatgtctagattgttcttagtgttggtgagacatctatgaacaaaacaaattcaaacaaaaatctctatcttcatgaggcttagatcttggtgacacagaaagacagtgagcaaatatgtaaaatctatgagatgtcagatagtgatagatgctgtagaggaaaataaaggccgggggagatgagagctatggtgtgttaacaatctttatctgagtgctcagggaaggccctgcagagcaggtggtattggaacattcagatgatgtaggtgtccccaaggccgtggactcagagaccatgacacctgctggcctcttggagattgctctgtccagactcctcacaacagaaacacttaggcctggagctgggccccatggctactcggtgacagccaagactttgacgcaggtcttctcttgtagagcttttcttgaacactagtggtctgaattttatgtaagctatgattctgttatagattgagtgccacccatatcttactcagaagaatctgatcagtttttgccaatccagagatgtgtccgtgactgcttaccgtcctcttggtggctcgtggtaaggatacctcagtggtgtgttagtcagagtccgactgggaagtagatgccaccttctcatttccttgggatgactgagggagggcttaatggaggttttgacagggtgtggagggatggtactatagggggctgtccacacctctcaagcctgggattgaaggcatggtttattattggaagccagggagtggctgtgagtgggctgccctgggagggtcaggacctcttcagggacgtaaatcagcctggagtgacccctttgctgagttccccaccagggtgtcagcccccttctgacctcctgacaaggatgctccccaggcctctccatggttggatgaggcaaagcctgctgtcatctttacccaggccctcctgcagctgtactgtgctcccaagatcagctaagagacctccagccattcagccacctaagccagaagcttggaaatcatcccttcccacatcccgagtccaatccagcaccaaaatctattgattattctgccaggagaagttggactttgtttcatgatttcatttctgccatcactgtcactgccttagttaagtagcattcccgaggtcattagaggagcccctcagctccctccctggcccactccattccaatccattgctcccagtgggagctgaaaggagctgtctctttcctttcctatgatcctatcactttcctgggaaaaattcttcaggtcttggtgtggcctgtgagatgcagccagcctgacctctgcctgcctctggcctcattccttcccatccctgtgaacatcctgggcttcagccacatgaagctgctgtggggtccttggatagaacatgttttctcacctctgtgcctttgcaaatactgttctctttacccacaaatcttttttttttaaatctggcaaactccagtttctaatttaaggttcagtccagcatcatcttctccaggaagccctcctgaccccttatttatgtttcttacacagcccttgtcacactgtcttgtgattttcttctcagtcccttccactagtcaaagcaaccagagtgcaggtatcttatttattcttctcttcccagcttctagctcagcacctgggaaacattgggaaccccgaaaaggctgaaattacttgagttttatcacctgtgtgttttccttgtgaagtggggcatgtgtgtttgaacttggaaccagctggagagtctctagaaggctgggtccattccacagctgagctttggggtagcggatcctctgatggagtgagtcagggagctctcagactgactggggtgggcaactgggcactctgtttggttccttcaggagacctcgaggacgatactagcacaatgcctgaaacagggtgatggctcagtacacactcgttaaaaaactgaatcctcagagttctcagggcccacccgtgcctgagcagaggatgcacagggactctatgaccatcttcaaaaccacttttaaaggttccacgtgttcacaatattcactttttagtagtattttgggcgaacttttctgaaagtatcatcatcaacaaatatcgattcgctgtgctgtgccagggtgtacagtagaagctgagaagtcagagagccctgagagtcgggggagtcaaagcttgagagcccactggctgcatgcgctgacatggccacctggtttttgaggagaaacaccaaatacacatgaaaagtgatgtcgtgtagccttgttcaccaaagtgttagcagtggttatctccatactggaaatgtggggcgatgtgcttttctgcattttaaaatttcctgtagtcggcatgtgtcatgatcagaaaataaatctttcattttggacaaagatttcttctttctaaagaaaggggcatccatgttggatctcctggctcactcccctgtactgtgtctctctagtgagggggttgacctgatagacaaccctgtgatcaagaggattgcaaaggagcacggcaagtctcctgctcaggtagggagggagggctgttctgagccaggtggggttctctgaccgctctacatccttggggagtcctggggcttggcaggtcccaggaagggactggctcacccaggtgagtccatgactcattagaacctcccagcgtcaagcagaatttggtctgcagccgcatttctagtcactcaagccatgtactcttgcctccgagcctgtctagactcagaggaggagtttccaggccttctccctctgccccaccaactgcatgcatggttagtatgagatggtacagaaaagttatttattctagtcttctttgttctaatgtccagtggggggctgggcgcatgttaaggaattctcattaagcagattctctgatctcctccttgggctgatggctgtcattaccaacatattgacagagctgctcagtgaatgccagtaacaatagctgctgtcattgattcttggactcttactgcatgataaaactcacatgttagaaaataacttagactacatgggatttccctttgtgtgatagtagactttttgtttccttgcagattttgatccgatttcaaatccagaggaatgtgatagtgatccccggatctatcaccccaagtcacattaaagagaatatccaggtaggtgtattccttcttttatttggcgggtttcagatcatgtgttagatgggaagggatgactgctgtagcatacagcctcagggttgcggagcttgatgcaacaggggcttctccctctgcactgtgggtgttggtggttgaccttccctcagcgatcaaaggacccaggctccttccatcttagggccctttctcccctagggtgttggtgtcttctccatccagcccaagattaggaaggagggaagagcatcttgttgggatgatttgtgtgggccaggctggagcatgtgcaccagtcacatggctgcgctcgcccacaggggaggctggatgtctcctaagcgtgcactcaggagaaaggggaggcagttggtggacaggtcaccacctctgtcgcatggaggcatgcccacgtggcctgagggcactgctttgagttgtgtgggaagattctggtcctgactcctgtctagtgacttctgagaggcaggagtgaagactggaacaggtggagcgtgtgcagaacacagagaggcagcggtccttttcagggcaatcttttcacctaagccaagaaccacagaagtgtgtgaagtgtgtgaaatctatttttggagctatgtgaaggaactctgtgtggcttcaaccctgacgacatagtctgtaacccagtcagggccatggacttgggattcccacagtctcactcacgatttaactgctgcatgacctctctcagcctttgtttcttcagtagagcacccttctgataggatcactgagggtgaaatgtaatgatacagtgaagggatagcatagtgcctggcgtatggaagtacctgatgctcttagctgccagtcaccctcagtcacggatgtcacctgtgatgatctcacaggcaacgacaggcattggtggcagcccacacccattgatcatgtcagcataggtgtgtgtgatcctggggccagctgcacagctgcattttcatagacagcatgtgcccaggagtatgctccctcttggtgtctgagctgcccatgagctccacaaggcactgctgcatcctgagggctcggtttggttgtgccaagcaagcatcgccattggggtttattgacccatctgtaacagtgcctgtgccctcaggcttgctgtgcatgccaagctggctgcaggtgggcatagccctgccattggcaggagaggcaggccacccacgatgggaggaccaggggatgggcaggttcctcatggtgtctacagcactctccctgccgggcccttgtccagctcacctgctgcccgcatgcccttctcctctcctttctcaggcgtcctgctctttgaatggcccagagcagctctgggtgaccagccaaccttaagcctgaaaggtatggatttggctaaactgtaaactcagttctctccaatggctgctgacgggcctcttggaacgagactgcaggtctcttgtagtggttagaattgagcactgctgactgaccggcatctgctccacatggtgtgtccggaattggtgggttcttggtctcactgacttcaggaatgaagccgcggacccttgcggtgagtgttacagttcttaaaggtggtgtgtccggagtttgttccttctgatgttcggatgtgttcggagtttcttccttctggtgggttcatggtctcactggcttaggagtgaaggtgaggacctttgcggtgagtgttacagctcttaaggtggcgcgtctggagttgttcgttcctcccggtgggttcgtggtcttattggcttcaggagtgatgctgcagacctttgcggtgagtgttacagctcataaaggcagtgtggacccaaagagtgagcagcagcaagatctattgcaaagaccgaaacaacaaagcttccgcagtgtggaaggggacgggagtgggttgccagtgctggcttgggcagcctgcttttattctcttatctggccccacccacatcctgctgattggtccattttacagagagccgagtggtctgttttgacagggtgctgattggtgcatttacaatccctgagctagacacaaaggttctccacatccccactagattagctagatacagagtgtcaacacaaaggttctccaagtccccaccagagtagctagatacagagtgtcgattggtgcattcacaaaccgtgagctagacacagggtgctgattggtgtgtttacaaaccgtgagctagatacagagtgccgattggtgtatttacaatcccctagctagacataaaggttttccaagtccccaccagtcaggagcctagctggcttcacccagtggatcccgcacggggccgcaggtgaaggcgcctgccagtcccgggcggtgtgccggcactcctcagcccttgggtggtctatgggacctggtgccatggagcagggggcggtgctcgttggggaggctcctgctgcagaggagcccacggagggtcaggggaggctcaggcatggcgggctgcaggtcccgagccctgccctgcggggaggcagctaaggcctggcgagaaatggagcgcagcgccggtgggccagcactgctgggggacctagcacgccctcctcagccgctggcccgagtgctaagcccctcattgcccagggccagcagggcttgccagccgctccgagtgccgggcccaccaagcccacacccacccggaattcgtgctggcctgcaagcaccacgcgcagccccgattcccaccggcgtctctccctccacacctccccgcaagctgagggagccgactccggcctcggccagcccaggaaggggctcccacagtgcaacggtgggctgaagggctcctcaagtgccgccaaagtgggagcccaggcagaggaggcccggagagctagtgagggttgtgagggctgccagcatgctgtcacccctcaatgggggctgccagcatgctgtcacccctcaatgggggcctggcctaaggtgccctctgtgccctgcagggcagctaggattgcccctgggaggacataggctggggaagattatctgaccctcccatgggaggagccaccgagtgagcagctcagcaggtggcagggggccacatcgccccagttctgcccttctgccgtcgtggctctcaatgcccgggatccccatggcctagcaaaagtgaatgtgacacggggaccttgggcccagctgagatgcccccattcctctgttaggtctgctacacactgaggggaaatgccatcctcaggcagtgagacaggaccaggctgacgtgagacctgagggccaaagccgaagtgatctgatggctgaggacagacagcagcggcgggttaggaggggccggaggaagtgcttatgctgtcaggaggaggtgggagccaggtccacaagactcaccagggaggagaaaggcatccagtgcagggggctgccccggcccgccccctgtggccccagtgccgctcagaactgctgctgcaaggctgcctaccctttataaggagtcttctagaactgcttgctgttccccttaaacccaagaatccgcctaccccggccccagcactccccactacctccagatgacacgctgaggctactttctcctgccctcaggaggggaaggctcttgtggggaagagcctggggtgctccaggtccttgcattggaatcactcagtgcacccctcctcccgccgcaagacagccactctgccaggccggggtggatgctgatgctgtggccatgggtcctgttcctcagtgtgtggggacaacaaaaggggagggaagggctgagaagaatactattttcaaggaagaaaaatggatcactcagaaaatgtactctgtgatatgggtactgttagagttcatagtcccagggccaagtgggtccctagttggcaggtgtatggaacaaattgttttgttggggttttgaggggtagcagagtcagtgggaaaaattctgtgccatccttttttttttttttgagatggagtctcactctgtcatccaagctggagtgcagtggtgcgatctcggctcactgcaacctccacctcctgggttcaagcggttctcctgcctcagcctcctgaatagctgggactagaggcatatgccaccatgtccggctaatttttaaatttttagtagagatggggtttcaccatattggccaggctggtctcaaactcctgacctcgtggtctgcccatcttggcctcccaaagtgctgggattacaggcgtgaaccaccgcgcccagccgctataacttttaacaattcccatatgtcctttattccactaagatgagtgcagtatatatttccatctgtccaaggcttcctaaatgtagccaaggccaagccaacaccagtcacatgatcaaaatcaaagggcatttggggaatccaggctgtgattcagggaagttccaagtgtctgatgaagtgtttgttttacatctttgtgtcccttgcaggtctagcactgtgctatgtaggtaacatgtgctccattaaatgtgaattaaactaagttttctacaaacattgtgttttggttccaggtgtttgattttgaattaacacagcacgatatggataacatcctcagcctaaacaggaatctccgactggccatgttccccatgtaaatatggctccttctttttaaaacagagggaagaatatacagattgaatgattggtgtctgaataggtatttatcatacacattttagattaattaaactttctcattataattctttcctgtttgaagatgagccactgaatgaagctaatttcatgcactggggagtttaaaagtatataccatttaaaatgtttctcttaaaaaataatcattctttgttcctatttttgatttgtttttctgtttttcagaactaaaaatcacaaagactatcctttccacatagaatactgaggacgcttccccttccttgtttctgctcagcccagatgcacagacactattggcaatgttgaccctcctctgtcatcacagcgccagggcagctgtgcctgggacaggagccacacagtcagagggggatgtaagagccaccttctctgacaaatctggagaattgagtgtgttctaagtgaaggcaatggggtttctccaagacagcctgtgtggcctctactctgaacaaatacactgatgagtcatcagtgaaatttgccttcacattttaagaaaactttatcttatggagttatttaagccatctacagagctgaggaaacagtgtaatgtgtctctgccccattgcgcagctccacccattgtgccccaggccagcccgcgtcacctacacttccttctgtgccctgccagtgacccccaggttattctaaagcagagtccttcccttcccccagtgagaaggaaaatgggataagtctgggacactgtttcagttcaataaagaggcttttttcttccttaaaaa

SEQ ID NO: 1131 - DNA, 14979 bp, Homo sapiens
gctcttacgcggtctgtgggagaccggagcgggagacagcggtgacaggagcagcggccgggagcccttagggaggcaggtgagcgggggctggatgcggggagatagcgggcctggagggcggctccagggcgaggcggggactgtggcaccaagagtcctgcgtccccagattgtgctgtgcgcctgaagccctggcggtgcagccgtgcacggagtcccgtggagcgtttgtttgggctggattatcccgctgcagccgaggttgggggcccgggttcggggctccgcacctcttctctggggttcaccctctcggataccgcctgggcagactccatcgatgcagaacccgaggtgcgggtggtggttggtgggggggtagggaggtgaaaacaataacagccgttttgtactaagcgttgcgtgcattgaccattcatttattttatttatttatttatttttgagacggagtttcgctcttgttgcccaggctggagtgcaatggcgcgatctcagctcactgcaacctccgcctcccgggttcaagcgattctcctgcctcagcctgccaactagctgggattacaggcgtgtgccaccacgcctgctaatttttgtatttttagtagagatggggtttctccctgttggtcaggctagtctcgaactcccgagctcaggtgattcgcccacctcggcctcccaaagtgctgggattacaggcgtgagccaccacgcccggcctgacccattcatttcttacaacaacccattgaggtcggttctagtccccatttactaaacgaagaaactgaggtcacacaactagaaagctacagaactaggatttgtacccacatctatcagactccagagcccacatacttaaccatcctgctaccaacagcagccaggcccagagtctggctcacccaaagctctccacaagcccaacctgctgggaaacagatttgatatctatccttaaagtatggaggtgtcatggtgggcactgaggactgggctgctggagaccttcccccagatctgccgctgacccactgcgtgatcctgggcctgtgtctacccctctctgagcccagtttcacccttgtttcagtgatacaatcagcaaactttaagaagactcttagccaagatattctaggattctgggaatggcagcttctcctacgtctaaatggctaaccccagaggcgatcaggctcttcaaagccccagggcaaggctggggtctcattcttctctttaatccctgtgtctagcacttcagcaggcccatagtagatattcaagaaatgtgggttggctgaataaacacttcatctcttttcagaactgcatgacagctgctctcctgggcctttgtggggctttggatttctcagttctggccaccttctatctagctggctctcctgactgcctcctccctggccagtggcagagcctgccagggctggcagcaggtcctaagcctctgtgcgaagacccacagcctctggaatcctcagcatagtacaacttgcaggggtggggggtggcacatgaagctcatagcccctcctggtagcagtgctcagggcccaacttcagttactcccagtttggggatgttgccttccatgggaggagatactttcatattaaatctgaaacacttcttatccttcactgtcccctcttccatgaaaccacccttgactcagagacacagtccctctgacagcacctggtccacccctctactctggcagcccggtggtgattattttgtttttcctccaccacataacctgctggaaggcagggactccacttcagaaatcttggaaaaccctgtggcccacaagggtttgagctcatattcccatctggtgaggtgcagaaggcacagagctgtgccaggacatctcgttccaacccagccccactcctaatagtaataaaagtagctacatgtttactgtgcagctacttggtgccagacacctaccttatccctatcaataatctccacagccttgcaagttagagatatcatgcctattttgtagattatgaaatgaacactgaaaggtcaattactttgcccaaaattacacagcagagcatagaccaaacctgggactgtctgaccctgaaacatggatctttctgcaccgccctatactctgcgtcccagcaaagctaacctgtctgatgtggttgggcagaggtgctggacctcctggcggctcgctcctgtcttcagtgtggtaatgtcacaggcatttaaattgtggtttgcaagctcgcttgatttgggagaagtgccctcccagtctgtgaaattctcccaaactctaagggcctttttgcaaagcaaaacccaccctgcatttggctctgccaatatgtgattcagggggtgttttcccactcacagaatggagtgggaaactccacttattaagtacctcttacaatggaatgactctatggtgtaggtatcagggcactgaaatagaagccaggagctgcagggtcagtttatagctctgtatgtcactcactgtgatctccaaaagtcccgttgcctctttataccccattttccacattaaagtgtaagggattaaacaggattggcaattttcaagcttttaatattttcagcactgacagccgtttctcaaatcaaatctgtctctgaatcttaaaattcaaaaacagatcaaagtggactgctgtagtgagactgttccctttactctaaccctgccccggtctcaggctcctaggcagtcctgccccagggtttctgctaagcaggagccagttgttccctcagcctcctaaaagcgatggggagttgaggccagtggaatgcagctttggattcagaagccagaaaacaacagagattgtttgtgggaagtgagtcagagagattagacctctcttcaacatctgactagactctagaatggcattaagcaagtcactgaaccgctcagagcctctgtttccttatcactaaaagttaggacaattcttgcaatgaaatgagatactactaccaagtacttcagtgctgtgcccagcacagaacgaatacactcagtatgtttttcttttgtttcttctgtctctccagcacccaaagcagaaacagtatgggcagagagacgcctactgaatcaggtgtttatcagtattatgaaatacagtatataaaacccagcatttggagtccagaacaaattcaaattctggctcagtcactaagtagctatgtggtcttgggcaactggcttacattttggtaattctctcaatatgcaaaaatattctctcggccaggtgcggtggctcacgcctgtaatcccagcactttgggaggcagaggcgggcggatcacttgaagtcaggagtttgagaccagcctggccaacatggcgaaaccctgtctctactaaaaatacaaaaattagccaagcatggtcatgcatgcctgtagtcccatctatttgggaggctgaggcaggagaatcacttgaacccaggaggtggaggttgcagtgagccgagatcgaaccactgcactccagcttgggtgacagagccagactctgtctcaaaaaaaaaaaaaaaaaaaaaagaaaaggaaaaaaaactcctggcagacatgagagcaaaatcgagtacgaaatgggcagctgggacctcatatctactgaataattgtctgtttggaggttgagacatgactggggaggcctggcctgcccctgtgttaggtgatggggctggcccacccaggggtgtggcagcagggctggcccctgtgtgacttgtgataaccccaccctaccaaggaggaagactggataaaatgggcccctgagatggctgaaggcagctaaaggggcctaagagactatggggagaagggcagccagttcctaggcagccctgccccactgtttctgataagcaggaggcagttgttccctcagcctcctgaaagcaatgaggagttgaggccacgggaatgcagctttggattccagaagccaaggacctgttacaaaggtggttttctgggaagcaaattagagggattagacctggcttcgacatctgacttgactccaacctaccaaaggatctcccagttcacctgggagttaacacaccagggttctagtccttttgctcgctgtgtggctttgggtaagtccttgcccctctctggaccttgaggtcccattcatacaaaaagcagttggactcaggcctgccagcccccatttttgtggctcttccccgcccctccccatcctttggctatgggatagtctcccaggcacctccaaaaggaagtgtctaaaacagagctctccacctcctctccaagcccagctccccactgccctcttcctgccctgtccctgtctccgctgccctttagatcaggcaggcaggcaggcctagagcatccgccctgagacactgcctgttggctgccttaagacgccccttccttctctgcccgcagcctccccagcctctgcattcctctgcttcctgtctgctctgctcagcctgcaggattgatcttcccaaagccaggtgtcaaccaggccactaaccctacccactgctcagaaatcttcccacagcctcagcctggccccctcttatccatcccctccatacacacttgcctcagctcctcaaaacagtccacagccatcctccttccccacctttgcccctttcttcccttcctaaggaaatattggcccccttctctccaccaggctgaacccactcatcctgcaaaaccaagttcaacgccctgtcattttcttttttttttttttttttgagatggagtctcacactgtcgcccaggctagagtgcaatgggtgcactctcggctcactgcaacctctgcctcctaggttcaatcgattcttctgcctcagcctccagaggaactctgactacaggtgcacaccaccacacccagctaatttttgtatttttatttttatttctatttatttatttattgtgagatggagtttctctcttgttgcccatgctggagtgcaatggcacgatctcggctcattgcaacctccgcctcccaagttcaaaggattctcctatctcagcttctgaagtagctgggattacaggcatgtgccaccacacccggctaatttttttttatttttagtagagatggggtttcaccatgttggtcaggctggtctcaaactcctgacctcaagtgatccacccacctcggcctcccaaagtgctgggattacaggcgtgagccaccgtgcctggcctaatttttgtatttttagtagagacggagtttcaccacattggccagcctggtctcaaactccagacctcaagtgatccacccgcctcagcctcccaaagtgctggggttacaggtgtgagccactacgcctggcgcctgtcttcttctaatatgcctcttctgacctcctcactcccattggagccatggctcacttctggtcaggctccatgcactcaatcagccctgcctgccaggactgtagtgcccacttgatgagaaatcacctgtgaaaatgccaggcatggtctggcacacagtaggtgctcaagaaacaaatgttaatgccccagcttccttctgtcttgtgtccactaatttggcatttggagcatatttttgtacttcacgtaattaaatatttactgtgtgccaaggtcagtgtgtgacagagcactgtaggggaggcaaaaatgaaccaactctggaccttgccctgcagaagctctgtctactggcatgaggtaagacaggtccacagataacttacataagagagactgcaatctggacaagacagcctcagtgggagagggaaggagaaccctgtagatttgggtgcggggaggctgtggggagagcacagcctttcaggtaaagggacaaggttaggaaagcaagaaggtgtagcttgtgctcgtggagcccaggaaactccttgggctagaaaagatttggtggcactctatacagtgtatgtgtctgtctgtctatctaacatgaatggtactattttctcctattggtgtgcattgtacctaacaaaaaatccatgtcccaagtacttttctcttttctttctttctttttttttttggaatgaagtcttgctctgtcgcccaggctggagtgaagtggcgctatctcggcttactgcaacctcctcctcctggattcaagcagttctcctgcctcagcctccccagtagctgggattacaggcacgcaccaccacgcccagctaattttttttgtatttttagtagaggtggggtttaactgtgttggccaggctggtctcgaactcctgacctcaagtgatctgcccatctcagcctcccaaagtgctgagattataggtgtgagccgccatgcccggccaacagtacttttctctagaggtagaattgcaggggatttttctctttttgcttatctgcacttttctaaaagttctgccatgaacacgggcattttttgtggaataaacaaagtttaaatgttggctagatcagtgcttctttatgcataaggaaggattagttcttttttttctatttccaatttattgattctttgataaaatgcaatgcaataaaattattatttttttttagagacgtctccctctctcacccaggctggagtgcagtggtgcaatcatagcttactgcaaccttgaactcctgggctcaagcgatcctcttgctttagcctcctgagtagctgggactacaggtgtggaccaccacacctggctgatttttaaactttttgtagatacagggtctcgccatgttgcccaggctggtctcgaactcttgggctcaagccatcctgccacctcagcctcccaaagtgccgggattacaggcgtgagccaccatgcccagctagaaaattacttttttggctaggcaccgtggctcacgcctgtaatcccggcactttgggaggctgaggcaggcagattgcttgagcccaggagttcgagaccatcctgggaagcatggcaagacctccatctctacaaaaaattcgaaaattagctggatgttgtggtgcacacctgcagtcccagctacttgggaggctgagttgggagaaacagttgagcccgggaggtcaaggctgcagtgagtcgagattgcaccactgcactccagcctgggcgacagagaccctgtgtgaaaaaaaaaaaaagaagagaattttttttaaacagtcattgcttgctcagatgtttactttaaaagataataatgaacaagaagcagtcacataaaatacaagcccaaattttatatcattagattctgattgtcatgaaagtttctaaagacttactttcatttctcaacttaccttgttgaccagcagggattggtgaaccatgctgtgagtagcattgggctagagagaggggaggcaggaatctagaagagctgttttccagatgtgaccatctcctgaggacagggaccatgtctcatgtgccacccatcaccccccacagacagagcctgcagccaatgccccaggagccctcggttccaaccaactgatgcccctgtgcccactggcccacgccatgcagccccagtccgttctgcacagcggctacttccacccactacttcgggcctggcagacagccaccaccaccctcaatgcctccaacctcatctaccccatctttgtcacgtgagtctccaagaatgggccaggcctctgctctgctggttggggttggggttggggagggagtgttgactggagcgggcatcagtatggctgggggtggcaaagtgagctgtcagcttgaaattcaaggcactggaagcaggctacttggattaaggacaggaatcttaggaacaaaacaaactttgaaagaactcattcatcccatttggaaaattagaagaataacccttgcctgccatcctgagctcttgcagtaagacagaagctgagaaggtgctctgtacattgtaaagtgctatgtacctgtaagagatggcagtcattgaggctgggcacggtggctcacgcctgtaatcccagcactttgggaggctgaggcaggcggatcacgaggtcaggagatcgagaccatcctggctaatatggtgaaaccctgtctctactaaaaacacaaagaaattagccaggcgtggtggcgggtgcctgtagtcccagctacttgggaggctgaggcaggagaatggcgtgaacccgggaggcggagcttgcagtgagccgagattgcaccacttcactccagcctgggcgacggagccagactccatctcaaaaaaaaaaaaaaaaaaaagagatggcaatcgtgattgttaataataatgcagacatttactgagtacttactatctaccaggtactatgctaagcacctacacacattatctcattcaattctgagagcatttgtatgaagaaggagtagctatcctctagaacatcagctccatgagggcagggatgtttgtctattttgttcactgttgtatcatcagggcctagaacagtacttggcacataataagtactcaataaatatttgttgaatgaatgaattaaccacgcatgatatagatgaaggcctaaggctcaaagagatgatagaacttggccacggtcacccaggcagtaagtggctgggatagaaagcaaggacctgccaaattcagagtccaagttcttaaccacttaattccttcctgtaattaccgttcttttagtacagttgctagtgttgtcactgttattcttgttgttcctattattatttcaggccctgggcttggccaggcagggaagccagacactggatcccatcctcctcccaccatctccacttccatatttctttcctgcttcccaaccatccctctcagtcgcccccgcaccactggcccttcccacagctaccaatccatatcccacccccgctcttgcagggatgttcctgatgacatacagcctatcaccagcctcccaggagtggccaggtaggagacgtggagttggggggccagcgggtggtggagggagagattccacaggtggaagtgctgggaggcagaagcagacctaggaagtagaagatgcggacagacagacattagctcagtagaggaaagggtttccccggggccagagctgttccacagtggaaggggcagccccataaagtaaagagctacccatcacccgagacgtcgtggcagaggctgttgcagaagggagctgaactgcagatgggagttcaaaaagagggcctcgaaggagccttccacagccgaattccggagctctgctactcagggcctcagtcttccctcctatttagtggatgcatccctgccccttctgtcctgggggcttgagccctcctggtgccatatgcagcttggtttctaacagaggcacacagtgtggtggggtccggaggaccgttgcctgggacctgccttccttcaacccctctacccacacccacacaggtatggtgtgaagcggctggaagagatgctgaggcccttggtggaagagggcctacgctgtgtcttgatctttggcgtccccagcagagttcccaaggtgaagaatcaaaggaagggctaagaagggaggttgcgctcacgcccgtaatcccagcactttgggaggccaaagtgggtggatcacttgagcccaggattttgagaccagcctggacaacatggcaaaacccatctctacaaaaaatacaaaagttagctgggtgtgggggtatgtgcctgtagtcccagctactcgggaggtggagaggtgggaggattgcttgagcccagaaagtcgaggctgcagtgagccaaaatcgcgccagtgcactctagcctgggtgacagagcaagaccctgtctccaatacaaacagaaaaaggaagggaggttgggcaaaggtggactgagggtccacactgactgcaccctcactcccacattgtgctggccctggggccacaggtgaatggacgtggtctttgcccttaagtcagcacccatgtagggtcagtcctctgtgcttccttatccaggggctgtgatgatgaaggaaggagaaggccagggctatgctctgtgatggctgtcatcctgccttccaaagctacatgtaatagacacactgctttgtccctcccctgcccctaggacgagcggggttccgcagctgactccgaggagtccccagctattgaggcaatccatctgttgaggaagaccttccccaacctcctggtggcctgtgatgtctgcctgtgtccctacacctcccatggtcactgcggtgagttccctccctcccaccagccctgctgccacccacactcctactgcccacttctcaacagggtggggacaggccagggcccaaggtgctccccaaaacccagtcatctgtcctgaagggctcctgagtgaaaacggagcattccgggctgaggagagccgccagcggctggctgaggtggcattggcgtatgccaaggcaggtgagtgaaccaccagcagggatgggcacctctgggtcaggaggtggcagagtggctaggagggccccagagttctgaaggccaccctctgccccccaggatgtcaggtggtagccccgtcggacatgatggatggacgcgtggaagccatcaaagaggccctgatggcacatggacttggcaacagggtaagggcagggaatgcagcacagggctggcaggagatagtctgcaccagccctgcccccgtgtctgctaagaatcacagaactgccgggcgtgttggctcacacctgtagtcccagcactttgggaggctgaggcaggtagatcacttgaggtcaggggttcaagaccagcctggccaacatggtgaaaccccatctctactaaaaacacaaaaattagctgggcgtggtggcaggcgcctgtaatcccagctactggggaggctgaggcaggagaatcgcttgaacccacgaggcagtgagctgagatcatgccactgcacttcagcctggatgacagagctagactccatctcaaaaaaaaaaagaatcacagaactgaagacagtgctggatgaggctttggggaaccatttaaacctctgggcctctgcagggaaatcaagcccagcactccaacaggaccagaacacaggcagtctccttcccagcctaggttctttctctccctgccacatcaccctgggatacctggcaagggccgaataagccaagacctccattgtctccccataggtatcggtgatgagctacagtgccaaatttgcttcctgtttctatggccctttccggtgagcaggggtgggcaggggtctgctgtgaatccctggccctttggcccaaagctggagcccaccctgatgactctgctttgcagggatgcagctaagtcaagcccagcttttggggaccgccgctgctaccagctgccccctggagcacgaggcctggctctccgagctgtggtgagtgactaggacttgagccccaccctcagccccctcctaggcaccacccacattataccctcatcccttaggaccgggatgtacgggaaggagctgacatgctcatggtgaagccgggaatgccctacctggacatcgtgcgggaggtaaaggacaaggtgagcacaggtacgaggcaaagggggctcagggggctgggacagagttttccacagactctggaatctcagagttggaagcagtttgcccttaagcatgcatcctctcctccccttccctgcccaggaaccatcgtggccttctatgtcggggcttgcacgagcctcaaacagccctgctttaacagttcaagagtgggccaggctgccagccgcagtaacccaggacacggggctcaagatggtcacagattgagcaggggggaagggacgcttccagagccacatccaccctccatttcagcctgtctccctgtctgcttccctgcagcaccctgacctccctctcgccgtgtaccacgtctctggagagtttgccatgctgtggcatggagcccaggccggggcatttgatctcaaggctgccgtactggaggccatgactgccttccgcagagcaggtaggcaggcaagggtggggtgttttgacctgcgccacagggactgataagcactctgcctagattggggaacgacgtcctgagagcttgggatcttattccgggaattactagtgatctaaacagacacacactgaggaagagatatggaactgcagcatagaacacggcccggtgaagcaagcagagcccttcatttttggttgtgagaacgtgggcaagccacttctctgaacctcagtgtcctcacccataactggataactggggataagatacctggtgcgtggttgtcctgaggattaaatgaagtaatatcactccataaaggggactcattttgttagaattgcacaccagcatgggaaggaacttgcctcttacctatttccttcactgtgcattttattctttggtaaactgaggccccaaaagaggaaatgacttgcccaagaaatagagtttcccaaagctgggctccgtctcatgtggtgtgcccacaggctgtgcttcttcatggtagccttcttccccgcctggccttcccatcgcagaaggtgtgctcagagctgatcagcgtccccccagcaactttctgcatctctcccaacacaggtgctgacatcatcatcacctactacacaccgcagctgctgcagtggctgaaggaggaatgatggagacagtgccaggcccaagaactagaactttaaaacgttcccggggcctcagacaagtgaaaaccaaagtaaatgctgcttttagaactgtgccctcatgccctcttcctgctcacatgctagcggggcccagcagccctgggtggttttgccagcatgctaactcttgtaactcgcagctgcatcctatgagctctcccaagcttccccgcccctcccctgggtcagccgtgaggcccacctttgccaccctcagctctttcctctggtgtggcttcagcttgaaagcaacctggagtcgggggcacagcctttggggcctggctgggagagggtcttggagcattaggggaagaagagagcagtgggatcttggggcctgagaagccttggaacgcttctggcagcagagctgggtgtgggaatgaggcctagatcgatatccctgggttagagttgaaatttgccgcaattccactggaaggcatttcccacgaggccagaggttgccaggctgcctgaggtctcctattctactctgaaccataaacccagagaagaattactcattaaccagcataaatactgcctgaggatcaaaactcagaggcaaagagggagttcctgactgctagaggtgccaccaccacaaacactttttattcaggagatactttttgagaatctctgctctgttcctaggttcagtgctgggtcctgggaatacagcaggacagacctcagcttatctcttcatagaaattatacaaagagaattggggagacagctaagaagaaaacaaagaaataaagcagttacaaattgtgataagtgctttgaaggaaagaaggggtctgagacaacaacagggaaggggcctctcttgaaacagtagttgggaaggaggcagacatgcaccagtgatgtggtgacaggtgctctgaaggaggtcaccaggacctgacctctttgaaggatcagaaaatacttccctgaaggactgacatttgagcctagacctgaagggtgagccatcaagctaagacaattggggaagagcattccagggagagggaggagttgtgcaaaggccctggggctccttctagctggaggaatgcaaggctagcttgtctggagcactgagaggatggcctgaactgagtggagagagacagaccaggaccaaaccatgcagaggtcaagggccacattcaccttttcagagtgactcaatcaaatttgtagtttgtaaaagtattttaacagctctgcggcaaagtgcaaatgaaaagtcttgatggcatggactggagcggggacagtggggatggagaaaggggaatggattgtggatgtgtttagaaggtagattcgatgtgaaggatgaatctggcttgaccttctgggtggctgatgggccatttactgagatggggcagcctggaagaggaacagaagcagggtcggggtggagggagaatactaaacttagcttgagacattttgcaataaggaagctatatctagagtgcttatgtgactcacctaaggccactcaacaagtttgtggcagaactggattagaactgcacagaaaacagccaagctgggatttgaacccatgtagtccaactccaaggcctctgcccctaaccactgtgccataccacctcccaataatcaacagcaaaattataggtctaacaatgttttatagacacccctccatttatgtgatgggtttgcatcctgataaacccatcataagttgaaaatatgatcataagttgaaaatatgatcataagtcaaaaatgtatttaatatacctaacctaccaaacatcatagcttagcctagcctgccttaaacatgctcagaacacttacattagcctacagtgggcaaaactatccaacacaaaatctatattgtaataaagttgtaaagaattttgaataaaaattcaatatttgaagtaca

SEQ ID NO: 1132 - DNA, 7248 bp, Homo sapiens
ttcgaagaatcctccggctgggaaaactatcgtccagaccctgaatcctccggctgtactgccaagtcatttcctagggccgcactcaaggtgtcagactcacgtgggctcatcactgcgtcctctcatattttcaatatgaatgacttttatcaggaaatctgaaaattagtgaaaggttcatttttctcagcatccggaaggctcgaagggcaggcaggaggggcgcgaacaggggctttgccctcctggagagacagcatgaacacagatgttcccagcgcaggcgaaggagaatgctggcttcagcggttgtgggggaggtaggcaggaatgttgcttttctggacattcgttctaaattagcgcctgtgtacccagggctgggtataaactgaggagtaagacattgtccctgctcctatggagcgtggagtgcatcagaggagacaaatgcagaaaaattacattttagtggagtaaatgaagactggctactcggatcggcgcttagcctggtgggacgccaggcacgggaagcggaacctaagtgtcgaaggttcgggtttccgggggtggtgggcccacacaagcggcgcaccgttaagatggcggctgggctgcggaaacgcggccggtccggttccgcggcccaggcagagggactctgcaagcaatggctgcagcgcgcctggcaagagcggcgcctgctgctgcgggagccgcgctacacgctgctggtggccgcctgcctctgcctggcggaggtgggcatcaccttctgggtcattcacagggtggcatgtgagtgcgccgagggggaggggaggggagggagggagacctgaacccgcgacccaaactggatctcagacctggaactccaaaccagactctgtatccactcactcgtcaattgcgaacccatccatatcccttacctgagcgccaagcctgctctacagaaaaccggatcttaatctgcccgcatggcagaggtggataccctagagattggccttctgcactgaacttacagcctgcaaaccagcttagaagtcagatttgagccaaaattgttgtactgctgctgctgctgcttttctctgtggctttggacacctcaggtctcctcctggatctcagctttttccatgtgttcagttctgtgatctttgaacgtcccttctcaatgatggcatcttgtgaccacttgagtccattaggcattattggctactcctttccaggctgaaactatactctaggcttaaggcacttggctttcttgctaaagactcttaattcaacaaatatttatttagtgcttattatatgcctagcattatgctggttaccagagagaggtacagtggtgaataagagatgcatttctgccgggcgcggtggctcacgcctgtaatcccagcactttgggaggccgaggcgggcggatcacgaggtcaggagatcgaggccatcctggctaacacggtgaaaccccgtctctactgaaaaaaaaaaaaaaaaaagaatttagccgggcatggtggcgggcgcctgtagtcccagctactcgggaggctgaggcaggagaatggcgtgaacccgggaggcagagctttcagtgagccgagatcacgccactgcactccagcctgggcgacagagcaagactccgtctcaaaaaaaaaaaaagaaaaaggatgcatttctaactcgggcctggacagtaagttagcaggcaattataatgcatcataatcatggtagtagtaacacaggataccataaagggcataggaagtcacttaaaccaggttggaggagtcagcaaaggcttcatagagccacccttggaaggtaggaattagctatttaaggaaagaagaaaaaggtgaggggaaggagtgctgtggacagaggatcctctattaaaaatctccagctaggctgggcgcagcggcacacgcctgtaatcccagcactttggtaggcctaggcgggtggatctcctgaggtcaggaatttgagaccagcctggccaacatgatgaaatcctgtctctactaaaaatacaaaaattagctgggcgtggtggcatatgcctgtaatcccagctactcgggaggttgagacaggagaattgcttgaacccgggaggtggaggttgcagtgagccgagattgcgccactgtactccagcctgggtgacagagcaagctccgtgtcaaaaaaaaaaaaaattcagttagactgggcacggtggctcatgcctgtaatcccagcactttgggaggctgaggtgggcggatcacttgggggcaggagttaaagaccagcctggctgggcacggtggcttatgcctgtaattctagcactttgggagcccgaggcgggcagatcacctgaggtcaggagttcaacaccagcctggccaatatgttgacaccctgtctctactaaaatagaaaaattagctgggcatgatggcaagtgcctgtaatcccagctacttgggaggctgagatgggaaaatggctcgaaccggggagatggtggttgcagtgagctgagatcgcaccactgcactccagcctgggtggctgagcgagaccctgtctcaaaagaaaaacaaacaaacaaaccagcctggccaacacggtgaaaccccatctctactaaaaatacaaaacttaaaaaattagccaagcatggtggcacacacctgtagtcccagctactcgggagactgaggcaggagaatcacttgaacccgggaggcggaggttgcagtgagctgagatcgtaccactgcactccagtctgggtgacagagtgagactctgtcaaaaaaaaaaaaaaaagaagacagcctggttcctttgaggaactgaaatgatttttttagagctagagtgtagaaatcaagtgaagggagtagtaagagatgggaatgcagaaactgaggccagatcatgaaggaatttgaaagctttgttaagaagatagcatgataattaagaacttgggaccctgcaagcttcaatcccaactccaccatcctagctcaattatcttaagccagtcacttaacctaattaattcttaggctccccttcaaaaaatgggaataatacagagttttctttatcttaagggtcttggggaatcattgagaggttttaagcagaggcctgttatgatttgtattttaggaggagctctttggtgtacgaggtggaaaatatattgtagcagggtgaaagtagaagtcaggagcctaattagcaggctattgtatactcattggggctagagattactttaggctcaaatttgagtatgtagtagcagagaaggatgagatagagatatttacggtgaggaacaggcagaacttgttgacgaagggttgcaaatgagagaggagggagtatcaaagatgttactcaggttcgtgacctggtagctaagaggtcggtggtgccatttgcggaacccaggaaaaggagtagattggaatgggaagaaagatcacaaattcacttatagaaatgttgagtttgagatgcctgggctcacccagagaatgtcagataaagagttagattaagaggtagtaaagccctgggaattggctgaaagtctgtgttttgatggtctggaggcatggggagggtggcagacaagttctagactcagaagtaaccagatcatcttgtcttcttccagacacagagattgactggaaggcctacatggccgaggtagaaggcgtcatcaatggtacctatgactatacccaactgcagggtgacaccggaccacttgtgtgagtggggacaggaagttcagggaggatgtgaggggctggttaggtactagtctgtgtgacctgacccaggctcacattttctctcatcttccaggtacccagctggtttcgtgtacatctttatggggttgtactatgccaccagccgaggcactgacatccgcatggcccagaacatctttgctgtgctctacctggctaccttgctgcttgtcttcttgatctatcaccagacctgcaaggtgagtccatgctaccagggctagagggccccagcctgggagggctgggtggtggggatggctcaggcttgctgagctgaccttgtaccttactgtgttttccctttaggtacctcccttcgtctttttcttcatgtgctgcgcctcttaccgtgtccactccatctttgtgctgcggctcttcaatgacccagtggccatggtgctgctcttcctcagtatcaacctcctgctggcccagcgctggggctggggttgctgctttttcaggtcaacacctcttcctttctggtcccctctcgttttctgcatttccatctcttcccaatttcctgcagcagagggagtaaaggagtagccaagacagcatgggtcactcagggctccacaaagcgagtccaggatctatagaaagtttctgccctgccatcccccaacatacacacatgccctctttccatcctgtcttcctcccagacagcattccttgttggaattagtccttcacattctaaatactcagtatatgctcattcgcatctagtaggcatagagactatgtatctgcctcctgcctactccaggctcttccctccaacagttgtgagtgtaggtcccatcttggagtttgttggcgtggcggcgggggggaggttgctgtggtgatggtggggggtatgtctttgggtgttgtgtgcatggccctggagctgatctccacccttcctctcccctgctcaccccagcctggcagtctctgtgaagatgaatgtgctgctcttcgcccctgggttactgtttcttctcctcacacagtttggcttccgtggggccctccccaagctgggaatctgtgctggccttcaggtacccccatctcacccttcctctttctaatcaaggagaagccacttgtcttgattgaggggctctatccctgagactccctcaaagccaagagacagggttttggagttgattctgagctagggagccactatcgctaggctgtagtttccatagctgtaaaatagggtattaaatttgatggtctctgagagcctttttgctttttttaattttaagttttgagatgggctcttgctgggttgcccaggctggtctcaaactcctgggctcaagcaatcctcctgccttggcctcccaaagcgctaggattttgggcatgagccaccctgcctggcttctgagagccttccttgctctgcccagttatgacttggtgaatccacaccttaaagcattgttatgacctgcctcctgagcttctttggccccaggcactggcctgggccggggggtggggaacgtggttttcctgctatttctagtgggaattggggaacctctgaggcctacatccccgtcccacacccctcaatgagtagcatgaaggctggtcattgggaatgagccttggcagctctgctgacatcacaccaatcctcaggtggtgctggggctgcccttcctgctggagaaccccagcggctacctgtcccgctcctttgaccttggccgccagtttctgttccactggacagtgaactggcgcttcctcccagaggcgctcttcctgcatcgagccttccacctggccctgttgactgcccacctcaccctgctcctgctgtttgccctctgcaggtggcacaggtgagaaaaggcagtagtgccatgggcagagttgggggaaggagtgaagggcctaagccttaggggctgcttgggggaagtgtcagttaagctcatggggtgagtctagagtttgactcacaaaaggggcttgataactgtctgaatggcttttctccaggacaggggaaagtatcttgtcgctgctgagggatccctccaaaaggaaggttccaccccagccccttacacccaaccatatcctttaaattgtgggaaggtaagtcttgccctctctaggtgctgacagagtcctggtcaggtatcccttgacagctggtgacctgggcgaggaaaggggaccccaatcatagaagtcctattctgcaccactgtgctgagcacttcacatattgaaggatatttgattcttaattctaaatacgagctactcttatgagtacttctccctggtactatcataagagatttacatatgttctaatattgaaagctcacaagagaccccgagacagggaggtacacttacatttactattctcattttacagatggaaaaattaagacttcatgaggttaagtaacttaccaaggtcacacagccagtaagttaggggttcaaacccacaagaccttatggccctaggtattactctctccatattccatatttggttgaggagcaggtccagagaggttaataaacttgcccaaaggcatgcatcaaggaatggcagagccagagggctatgtgacctaaaaactattgcccctctgttttgggatagtcccccccacacacactcctgcccttggccttgaccaccgcatacagatcgtttctaccctcttcacctccaacttcattggcatctgcttcagccgctccctccactaccagttctacgtctggtatttccacacactgccctacctcctgtgggccatgcctgcacgctggctcacacacctgctcaggtaccagctgggacaacctgggggagtgggaagggatagggagttcctgttgggggtttatgtctagggcatgaggagctgcaggtctgcaggccttgcaactggatgaaacgtggaacctgtttctcatctccaggttgttggtgctggggctcatcgagctctcctggaacacatacccttccacatcctgcagctctgctgccctgcacatatgccatgccgtcatcctgctgcagctctggctgggcccgcagcctttccccaagagcacccaacacagcaagaaagcccactgaagtccacccctttccctcaggacctgagtctaccctcaggacctggggttggttggactctgcccttccaaataaaccttgctaagtccaactctgtgcaacctacatggaggtgggggcagccgatgcctggtccaggctgtgagggacacgtatggagcagataaagaattcactcaagcagtcctaagaggcactttattgcataggatt

SEQ ID NO: 1133 - DNA, 63986 bp, Homo sapiens
gcgccgccccttcggcccggccctgtgtgcggcggctgctgccgggccgggcggcgggagcgcgcggcgtcggaggccgcccctctgcggaacgccgagagccccgggagagtgaagggccggggaggacaaggcgccccgggcccaaagcgcgccggctcccgctcgggcggccgcggacatgtgcaggatgtccttcaaggtgagcgaccgggactccggggtcagggctggggccgggctcgggcggccgggcccgcggggtcgggtggggtgggatggggtgggatggggtgggcgctgcccgctgcccgccgcctcctccttcctctctcctccagctgcgggcgaggcccgggaggaagcggcggggctgggtgcgccctgtgggtttgcggtttgcctgcctgccctgcctgagaggcttcgcactcatggctgtggatcggctgagtctgtgcccggcgacggggcggcggggactgtcgccgggtaacaggtcgggggcgggtaagaagcctggggtcagcgctgtcctgcagcagaaggagtccccgaccctgaccctctgggtcctcatgcaggagtaccagctgcacccacggatgcctcctccccggaggggtggccagcacccagggaggcttcagggtccaaaggtgtcttgtctcaaaagagttgattaaagtcattccatctaatccccacattttaggatgaaagaggttgatttgcctcgattgaaagggtttaataaaaatagcagttaaaatgtattaaacagttcaaatgtgcctgactctgaaccaaggacatggtgtgtatggtctcaaccctgggggagacctgtgggaggtgctcttcgtggctcttttttttttttttttcaaatgagaaaactaagatatagagaaattaactcacccacggttttgcagccaataagttatggtgttaagactgaaacccaagtgtgtctgactcctaagccactgtaatcccgttgccgacaatagctcatgtaagcagaggagtgacatggcgagatgtgcatgttgcaaagatctctggctaggtttggagaagagggttggagctggaagatgttgtcatctttttaagaaatggtactggaccagtgcataggtggtgagaatggaacgaagcagacgaatgtgaatgactttaaagttttttttcctgagacggagttttgctcttgttgcccaggctggagtgcaatggtgtgatctcagctcactgcaacttccgcctcccgggttcaagctatttctccttccttaccctccagagtagctgggattacaggcgtgcgccaccatgcccagctaattttttcgtatttttagtagagacggggttctgccatgttggcgaggctggtctcgaactcctgacctcaggtgatccaccctccttggcctcccaaagtgctggggttaaaggcgtgagccactacgcccggccgactttaaaagttttaaatcggcataattcagtagggaaggcaagagagataaagataaaacgtttggtttgggataaattttgaggatagatgggaatccaagcagagatgttgattagacagatatactctcctcgatcccaggaggcaagtctgggcagcagctagagatgagatttaggagtcagcagtgttaagtaggcacccatgggaatgaacatgattgcccagtggaaccatataaaggtggaaaataagaggactgaggacaaaatcttgaagaagatttgagaaagagcagccagagacgaatgagaaaactcagaagcatgtgctgtcacttacaccaagcatctctaatctttcaacaaagatgaagaggaccttgatgtttattaatgccacagggaaatcaaataaacaaagaattgaaaagtccattggatttagtgacggaataggcactggtgaccttgccaagagcactttcagtggtgttaggatcaggagccagattgcaatagcttgaaagagagtgggtagaatccacaagtgtggagaactctttcaagaaattctgcaagaaacagatttttgttagtttgtttgtttgtttggacaaagtcttgctcttgtcacccaggctagagtgcagtggcgcaatcttggctcactgcaacctctgcctctcgggttcaagcgattctcctggctcagcctcctgagtagctgggattacaggtgcctgacaccaagcccagctaattttttgtaattttagtagagacggggtttcgccatgttggccagcctggtctcgaactcctgacctcacgtgatcgcccgcctcagcctcccaaagtgctgggattagaggcatgagccacggcacccaacccagagattctttttaaaaggcagtggctgcagcaaggatctggaattgaccaagtgtttgtttgctttaaaatggtagagacttgagcatctttaaatgatgataggcacttcaacaataaaaagacaaataaagcctaattttaaagtggacatatgaatagacatttctcccaagaagtttacaaatggcccgtaagcacctgaaaagatgcttaacattattagccatggtcttggaaatgcaaatacaaaactgtaatgagataccacttcatacccgctaggatggctttaatcagcaagacaatgacgaatgttggcaaggatgtggagaaattgaatctgcatgcattgctggtaggagtatgaagtgatgcagtcatttttatttatttattttatttatttttttgagacagagtctcactctgtcagccaggctggagtgcaatggcatgatctcagctcactgcaacttctgcctcccgggctcaagcaattctcctgcctcagccccccgagtagctgggattacaggcatgtgccaccacgcccggctaatttttgcatttttagtagagacggggtttcaccatgttggccaggctggtcttgaactcctgacctcaggtaatctgcctgcctcgggctcccagagtgctgggattataggcgtgggccaccgcgcctggccgatgcagtcatttttaaaaccatgcttgtctttcttcaaaaagttttttttgtttgtttgttttttgtttttttttttgtcttttttgagatggagtctcactctgtcatcaggctggagtacagtggcacgatctcagctcaccgcaacctctgcctcccgggttcaagcaattctcctgcctcagcctcctgagtcactgagactacaggcatgcgccaccatgcccagctaatttttgtatttttagtagagaccgggtttcaccatgttggccaggatggtctcgatctcttgacctcgtgattcacctgcttcagacttccaaagtgctgggattacaggcataagccaccgcacccagcctcaaaaagttaaatatagagttaccacatgacccagcaatttcactactaggaatatacccaagagaaatggaaacgtgttcacacaaaaacttgaacataaagatccatagcaatagtattcataatagtcagaaagtggaaacaatccaaatgtccataaactgatgataaaaacaaaatgtgggccaggcacagtggctcatccctgtaatcccagcactttgggaagctgtggcggatcacctgaagtcgggagtttaagaccagcctggccaacgtggtgaaaccccgtctctactaaaaatacaaaaattagctggacgtcatggcaggtgcctgtaatcccagctactggggaggctgaggcaggaaaatcacttgaaccctagagacagaggttgcagtgagccaagatcataccactgcattccagcctgggtgacagagtgagactctgtctcaaaacaaacaaaaaaaaagtgttttatattataaataccatagatagggaggcttaaacaacagacatttatttctcacagttctggagctaggaagtcttgagatcaaggtggctggtgagggcacttttcctgacttacagatggccacctgtgcatgccccgtttcctcacatgaccaagagagaaagccctggtgtctctaattcttttaaggacattaattccatcatgggggctatacctacacaacctcttttaaacttaattgactcccgaagactgctcctcctaaaatcattacactgggcattaggacttgaacacatgaatttttggggggatgcaaacattcagtcctcagcccctgtcctcctggcatgtctgtcttgcgtgcaacatatattcattccatcccaacagtccccaaagttttagctagttccagcatcaactctaaaatccacagtctcatctaactatctaaatcagatattgggtaagactcaaggtatgattcatcccaagtgaaattcttctctagctgtgagcctgtgaaatcacacaagttttttgtttttgtttttgcttttgttttgagacagggtctcactctgtcgcctgcccaggctggcacaatcacgattcactacagccttgacctcctgggctcaagcgatcctcctgcctcagtctcccgagtagctgggactacaggcttgcaccaccatgcctggctaatattttttattttttgtagagataggggtctccctgtgttgcccaggctgatctcagactcctggactcaagcaatcctcctgctttggcctcccaaagtgttgggattacaggtgtgagccaccatgcctagtcctcaaacaagttttgtggttctaaaatacgacagtgggacaggcataggatatacatgtttccaccccaaaagggagaaattggaagaaaggaatgacaggtcacaagcaagtccaatacctagcaaggcaaatattattagaacttaaagtttgagaataatcctctttggttcagtgctttgccttctgaactcactgagtggtgggtcctgctttctggaccaactcgggcaggggattgggctcgcaagacattggtggttagggcttcagcatatgaatttggggaggaacacaagcatttagtccataacatggtaatctgtacaatggactatcattcagccataaaaaggaatgaagcactaatgcatgctacaacatagatgaaacttaaaaacatattcagtgaaggaaaccagacacagaatgccatatattgtatgattccatttatatgcaatgtccaaaatcggcaaatccatagagacagaaagtcgattagtggttgccaggggctggggaagaggaggggatggcgagtgattgttgatgggtagataatctggaatagatagtggtgatggttgtgcaaccttatgattgcaccaaaacccactggattgtatgctttgaaaggatgaattttatgtatgtagattatatctcaatttttttaagtatttttaaatcataatagggaatgaggagaaggcttggggatgattttgctgagtgactgaatttctcagggagttgagggcggtgagcctgagctgggctccattcgctgtggaattagctagaatggcagaaggaaacctctcccgttgggctaaagggaaaggaggtgaggttgagtgtggatgttttgtaaagtgaagcccaggatgaagtcaggatttggggtaggtagaaaggaggctggcaagccaggtgccaacgttttccatgaataaggaagaacgatcaggtggtgaacgataaggaggtgacaactgccaggtgaggtgaggtagaggttgggaaggtgggacgacctgagtcttgaaggagcagagatttgcacccctgatggaggggcagtggcctggaagccaggtgggcctattcactgcagtgctgatgtgggagaaggccttgcttccaccgggagcaggcactggggaggttgaggcagggagagagggagtgctctgcgctaggcaaaggatgaagaggagttgatttactgtgaaatggacttccagaaggcacagagggaaggtctgtccagagcagagtcccaggccagtctgagatttgcattagcaacattcttctatccacctcccatcctatcaaacatattaaaatgcacccacggccacaataataaaagagaccttttattgtaaaatttttgaaaggattttgtgacactgctttttaaatgatttagctgtaagttactcatttaatttaccttttgtccatttttctgcagttgtcatagttggtcagtaactcatgcagcgagcaaatcagacctacaaatgattttcatgtggcatcagtattttatgaataccaaatttagcagttaataaagttgacaggatgttatgttttgtagctatttaattgaatatttattaactttgatttgggaaacacagattaactttttcattttcataggctcctgaaagactcataggccctaggctctgggtctccaaagcctacgtgtaaaaaggccctggtttgttaggcgagtctgtggaagaataaatagagcattataagtcacaatttaggctcttcttgatgattcagaatcaatgtatgtagggctgcttgcatctgagctacatgactcctttgcgtctacttttgatggtttttccgtcaagctgttatcagtgacttctcactggtaccactttgcctccagcaaacttcctttaacaactggcaactcctaatctcttctgcttgagaacacagacacatgtttgttagaattatcttttttttttttttttttgagacggagtctcgctctgtcgcccaggctggagtgcagtggcgggatctcggctcactgcaagctccgcctcccgggttcacgccattctcctgcctcagcctcccgagtagctgggactacaggcgcccaccactacgcccggctaattttttgtatttttagtagagacggggtttcaccgttttagccgggatggtctcgatctcctgaccttgtgatccgcccgcctcggcctcccaaagtgctgggattacaggcgtgagccaccgcgcccggccagaattatcttttaaagtaaaacgaaactcagagaattattttttaaagtaaaaggaggccaggcacggtggctcacgcctgtaatcccagcactttgggaggctgaggcgggtagatcacctgaggtcaggagttcaagaccattctggccaatatggctaatacagtgaaaccccatctctactaaaaagtacgaaaattagccaggcgttgtggcaagtgcctgtaattccagctactcaggaggctaaggcaggagaatcgcttgaacccgggaggcagagcttgcagtgagtcgagatcacgccactgcactccagcctgggtgacagagtgagactccgtctcaaaaaataaaaaaaattaaaaaaaagaatttcatatttccttcagggtctgctgtcatatgatactataccccagccaggttggagtgggtatcttattctacaaagagtctgttttgtgaatcttatgaactatattttaatattaatgctggttaatcgttgcgcctaagttccaaagggagtgaagtgtaatgagatatatcagacctcccttcctgtcatggcctgaacttttcaggttttctttgggatcccctgggccaagaggggggttcactcagtcagtgggggggcttaaaattttatttttgatttacaggcttgatgtttgttaagcattctgaaaattgtaaatacttagcacaaagtgggacaatggatgtctcaaaaacatctttctgcatatagctttgcaatccatcactacatctttattttatgtcacctctaatatcatagaaattcattattgagtagagctaatattctcttgattgaattaataagtgtacgattgaagtccacattactctaaacttttttaaactaatagtttaaatttctaccccctcttagcttttaattagaattccagttctgtacaaataaattttcctctgtgtttcctctccccttccttcctgtacaatttctggaagtgtacagatgagcagtgtattagccaaaattctgacagtaaatggaagggggcaagtagggagagaagaaaatatgacaaatgtggaagcttgcactcaattttctacaaggtgtaaaatgtaagatctcagactctggacccaaacagactatcagacttttttttttttttttttttttttgagacagagtcttgctctgtcacccaggttggagtgcagtggcgccatcttggttcactgcaacctccacctcccaggttcaagcaattccttgccgcagcctcccgagtagctgggattacacgtgtggaccgtcacacccagctaatttttgtatttttagtagaaacagggtttcacgttgttggccagactggtctcgaactcctgagctcaagtgatctgcctacctcagcctcctaaagtgcttgggattacaggcgtgagccaccgtgtccagtccagacttggatttatttatttatttatttatttatttatttatttatttatttattttttgtggaggctggggaaacagagtctcgctctgtcaccaggctggagtgcagtggcatgatcttggctcactgcaacctccgcctcccggattcaagcaattctcctgcctcagcctctcaagtagctgggactacaggtgcgtgccaccgtgcccagctaatttttgtatttttagtagagatggagtttcaccatgttggctgggatggttttgatctctcgacctcatgatctgcccgcctgggcctcccaaagtgctgagattacaggcgtgagacaccgcacccagcccaaacttggacttaaatcccggctctgttatttggatgagccaagatccttactgcgtgaccttgactaactcattcctatgctcaatttcctcatcttaaaaataagaataataggccaggcatggtggctcatgcctgtaatctcagcactttgggaggctgaggcaagtggattacttgaggccaggagtatgagatcagtctggccaatgtggcaaaacgctagctctaccaaaaatacaaaaattagccaggcatggtcagtgtcaggcatggttgcagtgagcccagattgcgccactgcactccagcctgggcaacggatcgagactccatataaaagaggggaggggaggggagaagagggaagggaaggagaggggagaggaggggccttcctttaaaaagtaaaaaataaaagaaaaaatgggactaggccaggtgcggtggctcacgcctgtaatcctagcactttgggaggccaagatgggcggatcacgaggtcaggagttcgagatcagcctggccaatatggtgaaaacccatctctactaataatacaaaaattagccgggcgtagtggcaggtgcctgtaatcccagctactcaggaggctgaggcagaagaatcgcttgaacccaggagacggaggttacagtgagccgagatcatggcactgcactccagcctgggtgacagagtgagattatccatcttaaataaaaagaaaaaatgggaataattatctcagtcatacattacttaacaacaaggacacattctgagaaatgcacattaggttattctttcattgcgcaaacatcatagagtgcacttactacagacatagagagtgtagccgactgcacatctaggctctatggtgtagcctattgctcctgggtgacaaaactctatagcatgctcctgaatggaatactgtaggcaattgttacacagtggtgagcatttgcatatctaaacatatgtaaatgtagaaaagtacagtaaaaaaatggtatcataatcttacagggccactatcatttatgcagcctatcattatatattacatgactgtactacctcatggggctgctcctggaattaaatgagttaaagcagtaaattgtttagcacactgcctgatacagagcaagatctcaacttagttgtccttgctgttacttataaggttggaaccagcaagcctgagagaagctccttggttttattgtagagatcagaaaaatcaagaaagaggtgaaatagtaatagcatgcttggtaaagtgctttacagtttctgtgatgtattttcacgtgcactgtctcctttaaaggctagaggactggccccatctctcgccacaccatttatgattgtgtgcatatcatactgagaggagatttggaagttatccagggaatgtgatgtgtatagaccccaaacagaaggaacgttggggactttccatcttagctggagaggagcttgggatggaggataggaaggaggtcaccgggggtcactgctgccttactccttgctatccacagaagaattccacaggaggcagaacagtgtgatggggagttaaagggcagcctcaagcaagagactgcctgttgctgaagcctgacttgccatttctcactttcctcatctgtaaaatggggtcgtcccagtgcccacttcactgagcaaggatgaggatgaaataagctagtgtatgcagaagatacgccacgtggtccagagtaagcactttgcactgagtgagcattagctcaagattcctgacctccagtaaatgtgccggccatagggtgacaggagcacctgcccatttctttgctagacattgccacctagatgccccataggcacttgaaacccaccatgtccaaccctgaactcatcatttttttccaaagcctgtccttcgtacggtgtttccaatcttcaagaattggcaccaagatcagccaggcactggaaccagaaatcaggagtcaatccactttcctattccctcctctcctgcacatacaatcacagaccaaggctgtggagtttagctccttaaaatgtctctggtctgtctaatcttcccatacccactgttgctgcctcttagtaaattaagcccttgaaggaaaatgaaatatttatagcttttcacaaagcttggtttctagaaccttatagaaaaccaggatggccagcccagctggagaggaatccccaagaccatcctaaagggaggagaggccccgactagagatcttgttatgacaatagacacttgctgtttgcagatggtcttttgaaggtatttggggttaaagtgaaatgacagagtccctgaaaatgaattacagtctatcattcttgtgtgtttacctttcaggaaaagctagcagagctgttccctggtgcatattacattgtctgcctgattcaccctaccagacttcattttggccttgtgcaatctctttgttaaaaggctttgtttcatgattcattatacaggtcaaacctcccttgccatttctttgcctagttactgacagctggaacaaattagacccagcctggtgcctaagctgcaacactggtgtgaaaaccatggttgcagtttgccttgaaaactccaggatagcaaaatttacacggtcaggaaaggcaaattgttcatctgaaattggaggtgatttttttcccttctaaatgagccaggaaactattcaaagtatgtttgctgttagcttatcactctccaccctgccattctctcattcaggtatgtacaagggcgtacgcctgtgtatgtgctgaaggacttctgaaatgaaatcctcacacccacaaatactgctgccactgtcctttcattttagagggcttgttgagtagctgaaattgttggtattttcttttgagcttagaaaaagcactgtatttaatacgatatcaatatatttaaaaggcatattacgcaaaaggccttttgagtcgcgtagatgttttaaacccactcacaaaaaatgctttcattaaacaatgtgaatacttttataaaatttcctaagaccatcaaaattctttattagtaccaatactctggatttaattttgcctattgattctgacttcgtaaagaaaagtaaatagaggaaaggaaactggcacttaatcagcatttatggtgtgttgggtacaatattaggcaaaaatcagcatcatttaataccgtcaacttcaaggcaggtactgtgatctccatctaagcaagaggaaactgagattcccaagggccaacttacttgtgcagggctggggtgagctgtctggtcccaaagccagttcttccctctcgtcgactgttctctacaaactcatatcaattattttagagaagaagattgtactacagtcagctctgccacccatttagaagacctgttttccacttccatgctttccataggtatggctccaaaattaactttgtagctttaaaataacccagtaggcccagtgcagtggctcacgcctgtaatcccagcactttgggaggctgaggtgggtagattgcttgagcccaggagttcgagaccagcctaggccacacagcgagaacctctctacaaaaaataaaataattagccgggcatggtggcatgcgcctggggtctcagctactcaggatgctgaggtgggaggatggcttgagcctgagaggtcgaggctgcagtgagtcataactatgctactgcactccagcctgggcagcagagtgagtccctgtctcaaacaaacaaaacgatccaacagtggaatgaaggatccatatgaagacatgtaatggcattatttgccctaagttccttgttctcaagtcaaacctctggcaagttccagctgaagcaaagaaaattagatggaggggccgggcacggtggctcacacctgtaatcccagcactttgggaggccaaggcgggaggatcacgaggtcaagagtacaagaccatcctggccaacgtggtgaaactctgtctctactaaaaatacaaaaattagctgggcatggtggcgcacgcctgtagtcccagctactcagaaggctgaggcaggagaatcacttgaacccaggaaggggaggttgcagtgagccaagatcacaccactgcactccagcctggcgacagagtgagactccatctcaaaaacaaaacaaacaaacaaaaaaagaaaattaggtggaggaaaagtgaaacattcacacaggtagttggaatcagatagaaagcattgagggcttaggaaacgggcaggtaaactcttttgagaggtcagaattgggagaaattttgccccacttagaggtgaggaaagatttggagtgtttctgggaggaaatagcattcgagcagagccttggccttgaaggatggaggaaaattcatttcaagcaaaaaggaaactgggtgaacaaaaacacaacagaggcaggaaagtgagaacattagtgggaaataggttattaatagtgctggattatcaacaacactgctcttcatagccatgtggtggctcaggtgtctggaatccaacagagttcattctgttattacagttgtctattgctggaggatcaatctttcaaatgatgcaacacatctggatgttcttctttctgaatgttattatctatgtgcatagcagcagtcatgttaactgacatcaattttaagatcctgtttcattttgttcttgcagaaggaaactccacttgccaatgctgcattctgggcagccaggagaggaaacctggcgctgctgaagctgctgttgaacagcggccgggtggacgtggactgcagagacagcgtacggtggttcggtagatgcatgcccagcatgcaccattgccctctgtgggcacaggagcacctcaggaatacattcccctttacaatgcttatttactttttcatgtgtttgcttgctttatcctttttaaaacatccaaggtactgtggtgaacttaaaaacatgctgggggaagtcagaaagaaaaggaaacaatgaaatgcataaaacagaaggcaaccacaatagggaaagaggcacttcactgggaatcagaattggcagattacaagaagaaaagcctgtttagtgaaagaattcaagccaaccacttccatgaaaagatggagataatttagagcacaagtgggctgccatggatgtgggcgttatgtttcttctacaaggatgagaaaacaaaaattgaagcctcccccaggattttatcctttcattacctcttgaaaacataaatacactaattggcaatttaaaaagggaaacaaaaatagatactactgcccactggcagataccacttagagagcttttccatccccagctagaggcaatcgtttttctgtcctcagcaagacttctcatctctgggaccaagaggacctccaatgaggaaagggagcgagcaatgatgttttgattttaggatttgaataaaaatgtttcaaaggagctttgttttcctgaaaacagggtgtgccatttccagcttttattgtacaaatttgaaatctaccacaagcccaaaagtgaaatagcagtttgccccagttggccccgtgggggcatcacagtaggatatctttggtttacgggatatctttggttacacctccagacccactccacacccttctcgctcttagtcccacagtctgaattgtatgtactgctccagcagactcgctttcctctggcctccagttgtgtttggcccataggagcatctgcaggagtcagagggtaggaggagagggacatcagggagcccaccgccctccctgtttctgtctggcagcagcgccccactgttctctgcatcctgggagccgctcccttcccccctggcaccttcaggcctcagctggtcatggacccccactgttcctagatcccagtactgtgctgttctttgtagatgccctacacccaggcctcagcttaatagtctctttattacactttcttccaattatcccaatctgaatgtaccatctgttccttgccagaactcgggctgctgtcaagtcttgggcatctgtgaactggccatcttggtcttatttgggttttacggggctggttcctacatcacagtgggaaaactgtagggcagaaacaccagttgtcaccgtggccaacacggagaaacccgcctctactaaaaatacaaaaattagctgggcgtggtggcaggcgcctgtaatcccagctactcaggaggctgaggcaagagaatcacttgaacctgggaggcgggggttgcagtgagctgagatcgtgccatcccactccagcctgggaggcgagacttcgactcaaaaaaaaaaaataccatagagcaccactaagaagccattagctttttgttacttcgttacttcgttactttaccgatactttttacataaagccaacaagactttcacaaaactagcatggccattgacagaagtcaacaaaagccagatgacagcctaacattgaattatcgtaatgttattttaatatctaacacttactgaacgaatatctaccattactatgttaaccatattgcctgacttatctcattcagtaatttaatcaggtggatacttttattattcccccatatttcagatgaagagaatgagacttaagggttacatgatgtgcccaagatcatactgtcagtgactactcagcaatactgccttcctacaaaatcccgtagatgaaaataacacgaagcctccaaaattcacttaattaccctatacctaatgagcctcccctgtgtgcagagtcacctgtctctctcatcatccacttctgagcagcaggttgctgaatatgcagaggtggtagctaagattacaatttcaagtgcttgaaaacaactgtaagtcaaactgcaaatgcccacttcaattagaagggtccatatcacatggtacacctcaggtccttgaatcttaaagctgggacagactttggtgatcatcccatccaaccgctcattttaaaaatgaaataaatgagtccaagtaattgtaagcaacttgcccaggttacactgttggtcagtgacagctacctgggtttagcccccacagctcctgactctcaactctgtagtctctcatttcacctggtgccatacatctttacctgaatcattttgaagatgaagacttttaaatatggaaaatcagatggtaccatttaatttttcttttgcattaatagcaatgttttggctcaggaatcatttaataggaatcataaaatgagagcaatatatcatcgctgccttaaaatgcagtaactatggttcatttggactgtgcttctgaaggtaatggaagtaagtgaatttttacatcgaaaattccaacctcagcaatttgtcactttgctttttcccatctaggctgcatgatgagattattcatgaccacttttatcactgcagggaattttgcccttggatgtgttctgagtggagctgacatctctgcagcatcttctctaggacccttctctctgacatagcagtggcctaactcttcatctgtctctcctccatccagcatggcaccacactcctgatggttgctgcctacgctggccacatagactgtgtgagggaactggttctgcaaggagcagacatcaatctccagagagaggtaggtcaggctttgcacttgaagaaaaatgaccaggctcagagatctgaagttttcatgatagtgaactggtatgggggacaagagccatcattgcttttctcccacattaaagcccattgcagagtttattgtgcctacaatgaggtccagcaacgtactagcagttataatgcatttgagcgtagcctgtcgggcatatctgaggtaaccaaacctcttaccacctgcctataaacactcacacttttttttttatcaagcttaaatcagttctttattactcccttgggatgagatactgtaggatttatagcattttcatatagatcattatatttttagaagagttgagtcaccagcctatttgtaatgaggctcacttgctaggatgtctcaatcatcctccccaaaccatgttttcaaaggactgctctctaactggccatgaattaaataagctctcctggaaaaagccgtatgggtcaacactggacaaaaatgtgagcctgttcccacacttcattcaaggacaatcttgggagtttggtcttgcttgaggatccattcttggtctaatctagagaagcagaagggagtctgggacttttttttaagatggagtctcgccctgtggcccaggctggagtgcaatggcgcaacctcggctcatgcaacctccacctcccaggttcaagtgattctcatgcctcagcctcccgagtagctgggactgcaggtgtgtgccaccacgcccagctaattttctgtatttttagtagacatggggtttcaccatggtggccaagatggtctcgatctcctgacctcgtgatctgcccacatcagcctcccaaagtgccgggattgcctaggctgggacattttaacatactttggggctcaattctgagaaagctccatccatatatttccaagctgacccaggacctggtaaactaatctttatggagacacacgctcaggtcacccctagagtgtatctgacctctcagttcacactgactcagacctgagatgggcttcctgggcaagtccagactgaaccacttggttttccttggtccagccttattttatcccaggtcatgccttgcaacattttagaaagacaattcaccaaccaaactttcatcaagccagtatatcgtatatctcattcttccagcctggaccgtcacctctgagtggagcaaattaagacacatcaggtctcaggactgtgtcaagagttccaggtgtaacataggcctgggcaacatagcaagaccccatctctacaaaaaaatttaaaaatttagccagacatggtggtctacacctatagtaccagttacttgagaggctcaggctagaggctcgtttaagcccagaagttacaggctgcagtgagccatgattgtactaccagcctaggcaatgcagagagaccctgactcaaaaatagagttccaagacacatccagatgtccttcccaccacccgtctgggtgttggaggccttggctgtggaccatgaaagagtgacatgcagaatctgggactgggtctctgtagccctggatcaacaggcctggtctcttgagaggagcagtataaagagactacagcaaatgcagtcttctcacaaacagattctttggtgcaatttccataacactagatcgttgtttgaggtcattttcacttcagcacttaattttcctgtgggatgaaaatatctggacccacttagaattacagtttaaaattactttaatctttttatttttcctctctgctttatggtctttgtttattacaactttaaagacagtttttctctaataaaaacaatatggtccagatctggtttactttaaaaactttatcctgaaggacaaattgcacatgcacaaaaatctctctgaaacaactgagaaaagcagctagaagaggagagaagtatttgatttctagccagtctatggtttctatggttttatatttatccatttggttccaattgctcaactaatcttggagatgaaaactctcgtagcactgagaacaaaagcctttgaagatttaccaaagtgtactcagcttaaaggtaacctgcgtggctcaaatgatggtgctatgtaagttcctggcagtccctgaatttcctgagactgtgtcagtctggggcaagagggctgccaagccaaaggcagacctcagcctcctgtaccagttttggaagctaagagtgccttgcagtgctttgaaacttactcctatggcagacttctgccttgatccattgttagttaatccactttgcaatatcagaatatttgtctcctgaaaaactacctgccactccttgcttaggtcagctctctagatacacagagcttgctagagagacaaactggaaactaatgttcctgaaacactattgctgtaaagaacccacaattggctgatgacacctctcaggcataggagctgcacatacagttggcatgaagccctgaagtaaggcacacatatttaaaacttttattcacattccagactaaggtatagctcctatttatggattgctgcattgaggtacagaatgattaatagtagtatgtatgttctaaaatcagctcaaactgctctaataatgatttatgtaattaatgtaccaagaaagcctattgaaaagcaaattatttatcttactaaagaaacaacttctagaaaagacctttggtagtctctaaaatttaatatctattgagaaggtgagagttttcctattctagccaagtttcttcctccagaactattaattccctaaggtttccggaacccagcatcatcaactgtaataaagcagtgggaggatgcttcccacttatttctgtgggaaccaaggagaaaatcacacctgcattgcaggcagaaaggccctgtgaatggtcacaatgcctgtgccttcctgggacagagtctggctgagggcacagcctgatgtgggttatatctgactaggaaggtgttacatgttctccctcagtggtggtgttatcagcaccctagattcttataatctcccaggatagaagtcaaaagagattgtcagatagcaaagaggaagtttgtttagcttgtgcataagagaaccaggttcccttatggaaaggaaaagggttgcctgctccccaagagaagtatgtgagtttgttttatagggtctttttacagggaagggtttagtcagggcatgtacagcacttgcacagtagctcaatatgctttttaatcattgcatgtaagattagcattttaaatctccaccttcaggtgtgatttttagcattaagataaggaagaggtgactgtaagttgaagtttaagtctaactgtgcatgcagggccccaggaagtccctacccacctaaagtgagaacttctggatagtttcttgggtcttttgttgctgattggctgtcacaggatccttagggtgtcactttgccagctggaaacctccatggctagcagcgccttctgcccaagtgttgctcaggcccgttgggctcattctgcccacttggcccagcaggttgcacttggttcaccctaccagcccaggtcccatgcctgccaagggcaagccaggtgtgtgagcaagcatggggtccagccactgcacacaaccaggcatgccagctgtggcgaggcaggcagctccagccactggcacaggtgccagctctgtgtgaggctgtggctggaccagatgtaccgcaagtggcttccgctgcaggcaccagggaatgtagtggtgcctgggagcttggagatgccaggaaccgcagagccccaaagaggatatcatagccctggctcagggagcccctaggtctgggctccccaaagggctgtagctcctctctcctcattgcctgcaatgtggcaagcagaaggcgtgtttcagccctgtttgtgttataaacagggtcattcgccaggtcctaaattcttgtcccgcatccaagaagaatgaggtatgcaaacaactggagggtgaacaaagtggagaggagcttcattgagtgacagaacacctcccaggagacccaaagtgggtggctcttttctgcaggcaggtcatcctaacaagtgttcagctctcagtggagaggagacccatagtgggtagcgcctttccgcaggcaagtcatcctgatgatctgaggagacccaaaatggatagctcctcccgcagctggtagtcccgatatctgggtccagctctcagcagagaggagacccacagtgtgtagttccttcctgtagctggtagtcctgacctctgtgtcctgctctcagtggacaggagacccacaatgggtagatccttccagcagctggtagtcgggacatctttttgaatctggctgagtcagaggtttttatgggctcagaaaggagggagtgtgtgctgattggtccatgggaagccatgggtgggaacgtgtctgcctctcaccatcaacatgccatccacggcacccaggctgttcctgccaaggggcgcctacaggcccacacctagctgccctcagcccctcagcctccctcctgtgcttgtcagcacccaaagtccggagggggccaaggttggggggcaaggctggcatgtcaacaccacctcaagcatacacacctcaagcatgctctcccctagccaggtcatgacagacagcacccaggctcggctacagctttgctccgcactggagcaggtgccgggagtggggagaggccagggagcaggagcaggcacttccaagcctgtgggggtaatgggggcttcccaggcccagagagcacagggatgcccagaaccggagctgcagctgggcatggctgctcccgcacagccaactcaataggggatggggctcccacctgcttccagctcccactggacctgaggagcatgcagccccagctgcacctcccgtgtggcagcctgcatcttcgcagctgctgctccagacaggccaccactgccatcagtgagaagttaggcaagctacagcttgagtaaggggcttttttttttctagaccacatttaaaaacaggcaaacaagtgggtggatcctgcctgtctcagtgggtcttattgtccccactcccatcccacacatgcatgcacacacgtacatattcacagagacacccaggcccttaagaacaagttttaagcatgatcactagcttataggccaggctgtcctcagcttttcacacatgagtgagacctaccatcttaacagctttgggtaaactatggaaaaagggatttcttttcactgtgtctggtaaggtgtggtattagctttgtcccaagctccaagctcagaagtgaagagtactctataggaaaaatgtatgttgcccacaagaatggttcattattttgctcatattacacagtgatttgggtaccaatctttgagtagacttgtaaaagtagataggaagggaggatgctaaaaactgtgtctcagaatgtcatgatcagtttaaattttagaatcaggatgtttcttgttattatgtcccattttgagaaatgttttgagctcattttgactctgggcttgcaattggagaagtttgtgggtgaattacttattttccttcttgtacaagtagtcttccactctggggcgctaaaatttgtaatttgaattcttccctgtattaaggaatgctagtgtttaccaaacactataccaaatatcttgagtttccaagggctgctgtgacaaattaacacaaactaggtggcttcgaacatcaggaatttattctctcagatctggaggccagaagtccaaaatcaaggtgtgggctgtgccgcactgccactggaggctcctgggggaattcccttccttgcctcttccagcccctggtggctgtcagcactctctcctcaatgccacagctctccagtctctgcctatgtggtcacattggcctctctctgggtcaaatatccctctgcctcacttcaaaaaaaaatttattgttttttattgtggtaaaatacacataatgtagactttaccctcttagccatttttaagtgtacagttcagtcttattaaatgcattcataatgtggtacaaccaacatcatcacccatctataactcttttcattttgtaaaactacacaactctgtatccattaaataataacttcccatactccccttcccccagcccctggcaaccagcatcatactttctggttctataactctgactactttagatatcacagcaggctgggtgcagtggctcatgcctgtaatcccagcactttgggaggccaaggtgggcagctcacttgaggccaggactttgagaccagcctggtcaacatagtgaaaccctgtttctactaaaaatacaaaaaatagccagatgtgggggtgcacgcctgtaatcccagctacttgggaggctgaggcatgagaatcacttgaacctgggaggcagaggttgcagtgagccgagatggcaccactgcactccatccagcctcggtgacagagcaagactctgtctcaaaaaaaaaaaaaaaaaaaatcacagtaaaatcatacatagttgttggccttttatgactagcttatttcacttagcataatgttatcaaggctcatccatgttgtagcatatgtcagaatttcctttctttttagctaaataatagtccattgtatggatacatcacattttgcttgtctcctcatccatagatggacacttcagtgcttccacattttagctgttgtgagtagtgcctctgcctcactcttagaaggacacttgtcattagatttagggcccacccagataacccaggataagctcttctcaaaatccttaacttaatcacgtcttttgccatagaaggtaatattcacaagttttaggatggggacagatcttttgaggagccaccattcatcccatttcactaagaataaagttttcctttccttttgtcacttctctgaccaaaaaataagaatctgttcaaatttagccccttcctaggctagaagttttctatgcaaggatattgttttgttttctttgcagatgttcaaatcaaatgtaagataaccaaatgtcttttaaaactagcctctccctctctcccagtcaggtacaactgccctattctttgccgcccagcaaggccataatgatgtcgtgagatttctctttggatttggagcatccactgaatttaggaccaaagtgagataaccttcttgattttgtattatgttgaagaatttcagcagccatgggtattgcttttctcctcatctatggtacgaatttatgtttccctttttacaagattctcaaacctaagtaagtggatttcctcaaggttacttgtagtggttcaggggtagctctaagggttctattcaaaacgttacatttttactctgggctcacaattggaaaattttatggggaattacttctatcctttcctgaactgatacctttctactgtagaacactaaattttgtaaccaggagggatacagtagcagtggctttctaactttccctgtttccatgttctttttcccactgaagattaattctgatactatgataggaattgttggaagtattaatctgatcctactagatctgagacatttctaaagagggtggtttggcagacagcttactttcatgagctatcctcactgaaatacataatacatagctacagtttacatagttgggaaactatatagtggttcttcctttaaagaagtaattggctaggcgcggtggttcatgcctgtaatcccaacactttgggaggccgaggcagggggatcacgaggttaggagttcgagaccggcctgatcaacatggtgaaaccctgtctctactaaaaatacaaaaaaaaattagccaggcgtgatggcacatgcctgtaatcccagctactcaggaggctgaggtaggagaatcacttgaacccgggaggcagaggttgcagtgagccaagatcacgctactgcactccagcctgggcgacagagtgagactctgtctcaaaaaaaaaaaaaaaaaaaaagaagtaattgattttcatttttgacatatagataagaaagctgagaatgtagaaagattaatttcatgttgacagtatgattttacatgataatattttgtagtagcagaatttgaactgccgtaagatttttgtaattgtcagctcatttctagcctaattataatttttaaattcctgaaaatgtgcgcaagttggaaacttttaggttttcttagttaatcctttttgtggactatttagatatcaagggagtttccagtgggattttttttctgttaaaatggtaactactggagctggccaaggtggctcacacctgtaatcctagcactttgggaagctgaggcaggaggatagtttgagctcaggagttcaagaccagcctgggcaacaaagcgagacctcatctctattaaaaaaaaaaggattcgctgggcatggtggcacatgcctgtagtcccagctatttgggaggctgaggcgggcagatcacttgagcccgagaggtcaaggcggcaatgagccgtgatcatgccactgcactccagcctgggtcacaaaggaagactctgtctcaaaaaaataaatcaaataataaaattctaaccattaagtagatgtgaatttcatataaggttttgtcttttctgaaacctgctattgtactacgtatatgccttcaaacttactgagtataacatacagtaatactatatatttttttacattattagtttattttctattataaaagtgataactaaaaatagaaagtaaagtcctatgaacctaaatctcaactctttgaacgaaggtcaaaatgatcgtgagtgaccatatggctgcttcagtcttcttggttaacgagtgaatactggcttaaagcctttgtacatgagccagtttgtactatctcagaaatccatggaacatggaactcaggatgagcaattccacaggtttccattaggtcagctgcaggtatccaagagctttccatgggaagaagagagggctgagaggctttcagttttaaatgattctgtcatcaaaactttgcttcaacaattgttctcactgctactaaatctatatgccccaaaactgtgttttataaaataaaagaggctgggcatggtggcccacacctagcactttgggaggctgaggcaggcagatcgcttgagcccaggagttcaagaccagcctgggcaatatggcgaaaccccgtctttatcaaaaatacaaaaattagccaggcatggttgcatgtgcctgtagtctcagctacttggaaggctgagatgagaggatcgcttgagcctgggaggtcaaggctgcagtgagtcatgattgcgccactgcactccagcctgggtgagagtgaaaccctgtctaaaaaaaatttttttaattaaatcaaagaggccaggtgggatggctcacacctgtaattccagcactttgggaggccaaggtgaaaggattgcttgagaccaggagttggagaccagcctgggcaatgtagcaagaccctatctctataaaacattttttaaaaaattagtcaggtattgtgatgccagctactcaggaggctagggtgggaggattgcttgagcccaggagttctagaccggcttgggccacatagcaagaccccatctataaaaaagtaaaaaatattttaaaagctggcacagtaacatacacctgtagtcccagctactcaagaggctagggcaggaagatcgcttgagcccaaagttcaaggctgcagtgagccatgattgcacaactgcagccagcctgggcgacagagcaggaccctgacatacatacatacatacatacaaaaataacagcagttcctccataagaatcttcatattttatcttttctgttactttattaggcaggaaaatttattactttattagctaggaaaattgacaggataaagcttagaaatggtgcttattcctgctgttacgcaattctgtgatgcctcctcaccactgccgtctaccaccagcttcagccttcagcctccctcctctccattccccacacttcaaagcccatctcaagcaccctcccccaccacagagcctgcctctggggaagcactacccagccacacgcagccccataggatgttacctgcctacgaattcgagacctcttatagcagtgtttctccacatgaggcccacctgccacctgcctacacaatcaacccacatgactggtcaaaaggcatatttctggatctcaccccagacctactgaaggcagggctgagggtggggatctatgagtaggcattttgaataaacaccttatgcccaaatttagaaactacagtatcttatatttatgattcatgttttagaaccaggttatgtgtttttgaattacttacaattagctcagatgtccagttcagagagccaaacaactcaacaacgctagatgggaaaaaagaatgccttagctgtagcacctgaggaaaacaattaaggattttagttgaccacaaactcaatgagtcagcagtgtgatgtggttggtagaaaagctctaatttaggctgcagagataaaagtagagtagatggaacacaggaatatcccattccacatcagagcatgtgtgctttacagtgccctgcttagttgggtttttttttttttttttactttttttatttgtttgttttgacacagtgtctcgctctgtcacccatgctggggtgcagtggtgtgatcttggctcactgcagcctccacttcctgggctcaattgatcttccgaccccagcctcccaagttgctgggactacaggcgcacaccaccacaccctggctaatttttgttgctcaggcttctgcttagtttttagggccacacttttaaagagccctggacaaattggcacatgttaaaaggaaaatactaagtaggatagtgagagacacacagaatgtgccatagctatccgctcttttaatggcagcagatcttgtcccatgagggcaatggccccagagggttaccccatacaaacaccttaatctcagtggcttaccactgggttacatcacagggagaagacggcgtttccccaggaagtctctggctagaagccctgggaggcttttctgatgattccaagaactgacaagactttctcttctgtgtttctcatattgagaagcaaatagatgatgctgcatttggcataggaattttctaaattaattcacaataaataacttggtcaaaaaactgtaatacatctctagcaagccgcccacatatacaacataatcacgtccttaggatgaactctgccataattataaagaaaaagtaaaagggataaaagagggaaagtaggctggacatggtagctcacacctgtaatcccagcactttgagatgtcgcggtgggcagatcacttgaggtcaggagttcaagaccagcatgaccaacatagtgaaaccccatctcttctaaaaatacaaaaattaactgggcatggtggtgcacgcctgtagtcccagatacttgggaggctgaggcaagagaatcgcttgaacccaggaggcggagattgcagtgagccaagatcgcaccactgcactccagcctgggtgacagagcaagactccatctcaaaaaaaaaaaaaaaaaaaaaaaaaaaaacagggaaagtgagtttgttattatctttgggaaaactctcttcctaaattctatgtatgtgaggaacatctgctggtgaattatgtgcctgcgccacctctaatgtgtttatactttgcatgtccataggacgggggcaccgccctgttggctgccagtcagtacgggcacatgcaggtggtggagaccttgctgaagcacggagcaaacatccatgaccaactttatgtgagtgcatttcagggggacattaggacatttctcatcacatacaaaattgcagtctaaattcagatgccagaaatgccaacttcaaaaatactttaatggacagtaggacttgggtctgagtcaagagaaaaatatatagcggaccagatgggctttttttatatagaaaccacatatctggccgggcgcggtggttcacgcctctaatcccagcactttgggaggccgaggtgggtggatcacaaggtcaggagttcgagaccagcctggccaacatggtgaaaccccggctctactaaaaatacaaaacttagccggggatggtagcgggtgcctgtaatcccagctactcaggaggctgaggcaggagaatcgcttgaacccaggaggtgaaggttgcggtgagctgagatcacaccattgcactccagcctgggtgacatagtgagactctgtcccccaccgacaaaaaatgaaaccatttatcttatttacccatctttgttctcccttttaaatctgttgtgcagatgaaacatttcgtgtacctatgcaattaaggccttcaaaaatcatgtgatacttattcgtaccatgacaaactacaaagcccagcatatggacttgctgaaaaccaaaatatacaaaatttttctaaatgcgctcattggatataaaaatatactgttgtagtatttgtgaggaagggcacaaagaggagaaatctaaggtatttggtagaaaagtgaggttggatggatgaagacctctgtgaaatatacacatgccattgacctgtgaaaggcatccactgctagtgcgggtctgtttgcagctaactgtcaattagtacatcatcacccaagggcctttcaattgattgtcgctataatgccataggatttatggcaaacattactccagttttgtaagcgaaaatagaatatagggagatgaatagacttgacagtctcatggtgaagagtggaaaaattcctacttccaattatctaggaaccgtattttaggctgtcctacaggtaggcatttaacccttatgcctggggcactatactttcatagacatgtaatgagctctgtaggtgtgaacttttccatttgaacaccctttccagagtttacatggttaaccctgacaaatcacaggcctctttgaaattcatagcagctagcctcaccctctgcacttcaaaatctgtaacacactttgagcctgcaacattaccagtagaatgattgaattacttgataatgatctaaagaggcgattctcaactctggctgcccattagaattatctgggaaagtttaaaaaaatactattttgaggcccactccagaccaacaaaactggagtctctgaaggcacagcttgggcaacaggtagttctcacatgtagcctaatctaagaagcacaggtctaaaggttagatatgtctttggctatatataggtagagtatatctgagagtgtgtaatatatatatatatacacacacacacacacacactgaataggaaaagccaaagtgtttggtgaaaagaaaagccccttcccatagtaatttcctctctgttttaaggtgactcaagaaatttcatgcattataacttccattttatattaagacctttacctttacccaaacaatctaaatattttcttaaaaacgattgaaatatggatgggcggggcagaaccaaaacttggaatgcacagtgaaaaattcaatgcatgggtagttcatcttggaaaattcctgagagttaaaaaaaaattaaaaaaagaaaaagaaaaagaaaattgctgagagttttcagcagctaaggacatggtagactttccgaaaatgttatccccatataaaacatctgcttgaaaatctgtacaggctgattaatttcttaatgattgcctggagggcagtttggcagctctgctgacgcccactgaaaatccaggaccctccacgtgacacacgtggctggacttgcagggaaacatgtcttatatttttgcttgaggttagtgttcccaatgggaggtgtggtaattagctgggtttgctaggtgttttcctctagggtgtgctctggttttccaccgtggtctgaaaacaatgaagctcaccctgcgctgcgaatgttgtcaggctgaagggagcatccggggatcatgctctcagctgatccacacgtctgccgaaagcaccgagtgacatgtgtccaagaaaacagaaatgcccagaaggcatagatactcagttaagacgaaaactaaagagcactggaaaaggggcacttgctctgggctttatgcaggagtgcttttttgtgtttataggtgttgttggtgtctgctgggctggcagagagccactttgtggagatggtttctagggcagttgtattgaaaacatctttcagggttcttttgtgttttgtcttgttttgtcttgttttgttttagagacagggtcatctggatatggtggctcatgcctgtaatcctagtgctttgggaggcagaggcaggaggatcgcttgagcccaagagttcgagaccagcctgggcaacatagcaagaccctgtctctactataaatttttttaaaaaattaactggatgtggtgatgcacgcctgtagtcccaacaactcaggaggctgaggtgggaggatcgcttgagctgaggaagttgacgctgcattgagctgtggtcgtaccactacactcaaggtctgagtgacagagggagaccctgtctcaaaaaaaaaaaaaaagaagagagagagagacaaggtcttgctatgtttccagggctggtcttgaactcctgggctcaagcaatccccctgcctcagcctcttgagtagttgggaccacaggtgtatgccatcgtacccagctgcatattgtatcttaattcttgcagaaccctcatgttgggggaacaaggataaggggacaagaaagagaaaagggtaggaaagatctaattaaaaggacaccttttactctcaatttttttttcttttttttctttttttttttttttgagacagggtctcactttgttccctaagcctggagtgcaatggcccaaacatggctcactgtaacctcaacttcccaggctcaagtgatcctcctgcctcagtgcccccaagtagctgggactataagcacatgccacctcgcccagctaattaaaaaaaaaaagaatttttagaaatttaaaaatatattaaaaataaattttttaaaaatgaggtttgggggatttgtatatctaacatttggctcttcattgacaaaaaggtggaaacctacaaagagatggagatggaaaattatattaaatgtgtatattttaaatctaatttattttattttatttattttgagacagagtctcactctgttgcccaggctggaatgcagtgatgcaatcttggctcactgtaacctccacctcctgggttcaagagattcttctgcctcagcctcccgagtacctgggattacaggtatgcagcaccacacctggctaatttttgtatttttatttgttttttgttttttgattttttgttttttgaggaggagttttgctcttttgcccaggctggaatgaagtggcgcgatctcagctcactgcaacctctgcctccaggtgcaagcgattctcctgcctcagcctccggagtagctgggattataggtgcccgccaccacgcctggctaattattttgtatttttagtagagatggggtatcgccctgttggccaggctggtctcgaactccggatgtcaggtgatccacctgcctcggcctcccaaagtgctaggattacaggcgtgagccgccgtgcccagcctaatttttgtgtttttagcagagacgggatttcaccatattggccaggctggtctctatctcctggattcacctacctaggcctcccaaagtgctgtgattacaggcatgagccactgcacccgccctaatttcttttaaaataagtgtgaaagataatgtttttaatgcttttaatttgttctctctcaggatggagccactgccctcttcctagctgcccaaggtggttacttggatgttattcgattactgctggcttcaggagcaaaagtcaaccagccaaggcaggtaatgtccactgttgacatttgcccgagcacatggcgcatggggcagggagggctgggtgtccgctggcagcacatacctgagataaccagtaagctcaaggcatcctttaaacccttctgcttctgtgatgaaaagttaatctttgattagggtatctcctgttctatgctctgagctggcctgaaagcctatgaaaccaagctgacatcacagttcagtactttcaaaacttaagtatttgatgtctgaggtcaagtacacaagtacacactctgccacctcctgtgcaaacaaattatggctgcactgatctaatgagtgcaggctggcctgggacataggtaaacagatgtgggccaagtagcctggcccctgctgataatgctgccttactacctgcccaccacttcttccaccaagccaaagaggagcccatgccgttggaatcattaggaggttctgcaccttcatctctcacaattgttatgctgttgagacttcatttaccaacagcaagctaacagctagcaattcaattaactgaaagtaaaagaacagaaatgtagtctgggagtggtggctcatgcctataatcccagcaccctgggaggccgaggcaggaggatcacttgaggccaggagtttgaggccagcctggccaacatgatgaaaccccgtctctactaaaaatacaaaaattagccaggcgcggtggcgcatgcctgtaatcccagctacttgggaggctgaggcaggagaatcacttgaacctgggaagcagaagttgcaatgagccgagatcgcgcctctgcactccagtcttggcaatagaacaagactctgtctcaaaaaaagagtaatgatttttaaaaagaagaaaaaagaacagaaatgcaagattatacaggcagcactttataaacagtgaagaaccttccaaatgtacagtattataattagcttctcttgtgtaggtactatttttgtccagattaactttttttttttttttttttgagacagcgtcttgctctgtcatccaggctggagtgtggtggcatgatctcgacccattgtaaccttcgcctcctgggttcttgtgcctcagcctcccaaatagctaggattacaggtgcatgccaccatgcccagctaatttttgtatttttagtagagatacattttggtagagagccatgttgcccaggctggtctcgaactcctggcctcaagtgatccacacaccttgggctcccaaagtgctggggttacaagtgtgagccaccatgcctggcaccagattaatttatttttaacaaaacatttcgaattaaggaaacattactataaaggtagtttcctaggaaaaagtcaagctgatttcatacccaggcacatctccactgtactatgacctgatacaggaatgcctctctgtgttcacataatgaatagctatgagaactttaaggttggtctgagctcttggacacaggtttctctggtctttagaagcccaagcacataaggagcctgagaaaaataaagagcctttgggcagagtggtttgaagtcaggaaagcaaagtggttttgaggtcaggaatcccaagttctcaatccatctctgccaataatttgagctgtgtggttttgaacaagtgaatcaacctctctgggcctgactttcatcattgaaaattaggaggctgagcagcatgagcctgatgatctcttcaaatgcccacattttaaataattgttttattcaacattcaatcaatatttcttgagtacttaccatgtgccagacattgtaatcaatgtaatgtatcaatgtaaggttatatttttagaattgtaaagttattcttaggtggccccaggaatactcctgggaaaggaagcagtttcaaaaaaacttttactttcgtcctgctagagttgactttcgaggactggagtttaatattttcgtattggtccttcttattttgttattgttgattgattctgaatcagatgattcattttactaaaattagtaaaaggaattggttatttttagattgcctaagtttgatttgggggccattattgaagataccactgtgaatttagaatgtgaggttatcaagattatcaagtctctctattagtacatccttccaaaataatttctggcactttgaattttattctttatatgcctaaagtactgcttgtaaaaaaccaagtcgatataagagattatatttcaaatgttgcatgagccatgcccacttaaacctaaaatgagtcatgccgtgatgttgaagccaagaagttaaagagtaaaccaacattgcagcagtagccacaacacgccatagctgttttttcttcctcaagagttaggataacctggtcaaagtggatgacctagtctttgagtgcagggatccaccctctggtcaaggagcaagtgctacaacttctaaagactgcatctaatgaaattgttttgaattattttgagttcagccctaaaagaattgttattcaggaaaagggtgtcttataaaataagaattgctttggggaaaaaaggcaatggaatttttcctttttacagagtacactcaccccattgtgccctcaaatcataataatttttattacctactgtgagcttataattagaggttgttatctatccaggtcagactagctcaagttccgtcttctctgaaagtgtaaactctgcatatttattatgttccaagaaaacagtgccatgcctgcacatggcctgcacatggcctacctatattctataggtagagcatttggaaaccaatgttttattctgaaatctcagctgacacattgagtcattattggaaaatccttgaatttacaaaatgaggacaggaatacctgcctggtttaatttcctaatacttttggctaaatctgatttgtaattgttgcactgacattctatgaagccctaccattttattacggtatcctgtaacaggatgttgacaaagttacattgaaattactcagctgacatttgatatgagcttcagggaatctgaacggtagtgggatgacttttctttgtaactctatcactgagaactaaatgaagacctttttagtactttgggatgaggaatcataatcccaaatctagtcatagccagacagtaggaagactatgttcttgatttgaaacttcaaaaaatattttccttccatattgtcctaagccaaaaggtcaagagtcacagagatcattgaaatatagatttcactctaacaattcattttcatttctttccacgtgtcctcaccaagttgagttgctatgagtcagacctttttaatcactagctgagtggctatttctatttttctattaaccaaatgcctcgacatatattttcccaactccactcacccaccttattaaaacaatactttaatagaatgcaaaggtctgatcctgttaacccagagctgaggttagtcagttaactcatctctatctagtctttttcatgtgctaaacagtatttctttgaaggctggaggaaaagtcatctaataaagtgccatctcctaacagaagccttgacttgtacacagagtagctggacccagaaattaaacgttctcccaggtcggaagcttagaggggtgaatccatcaatggcagtgggagaaggagccaaaagattagcgtagaatcctgggggtttggaaatgggaacagacagccataggaagtccttgctgcttggcaagggcagggactctgtcttgtttcgtttgcacatggtacacactcagaaaaagtgtatcgactgccagaagatccccatggctggtgcagagcaggtctggaagcctgcagcatttagtgatcagtgcctgagagttagaagaaggctccagatatagggcccagactcataagcataagccccaggaagactgtaagaggcagctagggagcagacccagattttttgggtggagagcagcttggaaattatggggatatagatatcttaaaatgaaacagaggccccattttgcttattaactgtgtgaccttagcaggttgcctactgtccctgagtctcagtattttaggactactgtgataattaaataaaataatccctgcaaaactcttaatgcagtagctgatacacacccagtgcaatgttaggtattgctgttattatcattcctattccaaccaggcctcattggaacagaaaacccatcagaaatcaaggctgcactttctctagtgagtcgtgtgttctctgtcatctcaaagtctcttcatatctctgtttctccccactcctttctttttttaccagttttgtctgcttacttatcttgtatgtggtccccaggtttatggatcagactgccaacctctgggaatagccatgtcattgtcacagctcatctttgtgcaccaggccacagtgactggctggcctgcctatcctcagtcccatcacccttgactggggaggatagagtcagaccatgggcaatgcagcatctggtaaaatctcttacagacccatttgctgggccaggcacacggtgcaagggacaatcataagaaataggctccagggcagggtagggtgggtaagaaaattatctcaatattgaactccctctgccacgggcaggattcctcacagctcttggactcccaacttcaaatagaattggtccccaagactttctgactggcctaaccctgtaggtagaagtaacccaagtgtgacggctggaaatcgtagaagcaaagagctagtgccgcttcagatactcattcccacagaagaggatggttttagttcttttttccaaatactctcaggagcctacataagaccatacaaggttagtctctaatacaggttgtgtcatatactccatctcatgctgtgatctggctgtaaaagtgatctcgaatgaaatgagggaataacagagttggaggaaactataaaactcactctatttagccatccatcggtactcgaatcctttctatgataatcagctactgttgaacacctctaggcatggagaactcactcctctctgatcagtttctttggtcttagccaacactcattaaacttttatacattgaccccaagtctccatgcagctttcacccatctgtcttctttctatcacttggtctgaaaaattggtctaaatccttttctacttgatatacacacacatagtaaaagacagctatcataaccccatgaatctcattcttcttcaggctaaatgttctattaccttttttttttttttttttttttttttttttttttgagatggagtctcactctgtcgcccaggctggagtgcagaggcatgatcttggctcactgcaacatctgcctcccgggctcaagtgattctcctgcctcagaatcctgagttgctgggactacaggcatgcaccaccacacccggctaacttttgtatttttagttgagacagagttttgccatattggccaggctagtctcaaactccaggcctcaagtgatttgccccacctcggcctcccaaagtgctgggattacaggtgtgaaccaccatgcctggccattacctttttaaaaaaagtgctgtagaggttataacttcacaatgatttctttgatttaatatcaaagtattaaaaatatcaaagtatatggaagtattcaaaagcctatttgaatatttttaaatgttttttcacattttggtacattccaaaactctacaaaaaggagctaaattgacttacttttcatcattttcaaaattatttttatatgtttaatttaaaaaaatatataaaatcgccagacgcggtggctaacacctgtaatcccagcactttgggaggccgaggcgggcagattacaagatcaggagatcgagaccaacctgcctaacacggtgaaaccccatctctactaaaaataaaaaaaaattagccgggcgtggtggtgggcacctgtagtcccagctactcgggaggctgaggcaggagaatggcgtgaacccgggaggcggagcttgcagtgagccaagattgtgccactgcactccagcctgggcgacagagcaagactccgtctcaaaaaaaaaaaacatatgaaatcattgttcttttttttatagagatgggggcctcactgtgttgctgaggctgatcttgaactcctgggctcaagccatcctcccgccttggccccccaaagtgctgggattacaggtgtgagccactgcaccccatcattttcatgatgaaaatgaaggctctaaccattataccagaaggaaaaaataagagaaaacagaaattaaggtgtacaaaagaggaaaacctctcctaattcataaactaaataatcaactgataggtaatctgatttgacaataatgctctaactcacatgcaactccctgggctccaaaatcagatttggagatgtaatgactagtaatgaaatacacaggcggcccccaaatctcattttcccactcattcctacctgctcacagtcagttatctcacagggtcgatggaagaatcaaattaaaaagcatatggaagtattttgtgaacaaaagtacaaattaaggggcgtattgtttctcatgataaatactactcagatgcaattaacatttcctaagcatctgtgagccagtgctcatgctcaccacctttgtatatgttttctcacttatctctgcgaagctaataatttttcctaagaggacactcactcaggctgagatgatttgcctaaggtcttacagccaggaagaactgattgctttttccacctcccatgactattccaattaagatgatatatttgatgagtgttatcattgatgttctaaattgataataataattttttggccaggcacagtggctcatgcttgtaatcccagcactgtgggagaccaaggcgggtggatcacttgaggtcaggagtttgagaccagcctggccaacatggtgaaaccccgtctctacttaaaatacaaaaattagccgggtgtggtggtgcatgcctgtagtctcagcctctcgggaggctgaggcaggaggatctctggaatctgggtggtggaggttgcagtgatctgagatggcaccactgcactccagcctgggcaacagagcaagactccatgataggtaggtaggtaggtagatagatagataatttttcacaatatagcaccttttagcactttcccacatattagtttcaattgttaatacaagtttactaataatgaccaagccattgaaaagcacattgaatagacagctggctgcctctccctgcccgccctctggtggagagagtgacaaagaacaaaacagacccagagcaggcacggagggagaagcgcattagtattggcaccagcttggacccacactcccctcctgccttccagggtcccacccgcacccctctggctacagcagctagatttcccaccctgcatgaaggagccatgcctgtccaagccactgtgactgtagctgcttttccttctccttcaaacgacccttcccctttctcacacctagcaaaatcctggtccttcttcaagacctggatcagatagcactctatccaggacactgagccctcattccccatgcagcagccctcccacctgtttgattttgtgcatttttgtccatactttatgatggcactgcagtcgtatggaaacctccatgtctcttctccaggacttatttttagcactctgcttgagacttagaaggctgggctcacacctgtaatctcagcactttgggaggctgaggtgggaggattgctggaggccaagagttcaagaacaacttaggcaacaaagcaaggccccatctctacaaaaagaaaaaaagaaaaaaaaattagctgggcatggtggtgcacacctgtagtctcagctactaggaaggctgagataggagggtcatttgagcccaggatgttgaggctacagtgagccttgatcatgccactgtactccagtctaggtaacagagtcctgtctcaaataataattatcattattggttgcttgaattattgattaattaaatcctgaattgggaaaatcaaataaagaatatggaagtgcttttaaactaaagtacaaattaaagtacaaattgctcatgataatatttagattcaagaatatttccaccaagaggaccctggaaaaattatgaagtaagttaaagtgtcttccacttccctctatcctttgtttcagcacctcttccactgtctctcccaagacaggtcccaacatcctgtgactgctcttcagcacccccagatcctcctgggctcccaagtcaccagcttccccgacccagctcagatgtcttcatcctctctccctttcctgggacagcagtgggcaacaatcttgtgcctgcttctgctagtaggctaaggttgaaattacacactgcagcagaaaatgtaactttatattctataactgaatcattttgctcttcagccccccttcccccgatgggtaattcagtcttatctggctaaaacagtctcttggggcatattaccataattacctcagaggttacctttagcccattctggatcctgctccctcctgcctttctctccgaagggacctaagagtcagactatcatcctggcattgagatgggggtggagagcctcatgcgtggcccttgtgctggtccacaagcgtcctgcactcttacaccccagggttgcagctggtctcgccattctctgctggcctggccattgtatctactcaggaagtcagggcactgtggccttgccttcccgacaccaggctcactccagccgactgtttctctgtcacttctgatttcccataggcagacgggactcctggatgcctaggtgctaggtggatgtgggccatggggactgggggaccactgactctgaaactcccacggccatttctctcctatctcccgggcaccagcagagagcagaactctaaagggcttgtaactttcctggtttctcacaagaagagaaaatcctttcccatctggaattccccataactgacctgatgtttcttccacaacctaggttacctctcccccacaacacacgcgagattcaacgcagagggggaagaaaacgtggacactctcacgtgacctccgccttccccctccctctctagctccttcacacattggaaggctttcccagtttccatcccatctgctgggaaccaccctactgtcaaatccttccccatcccttgcatgttttacttttttctcctctgaagcaatatatctccacctcatggcccagtgtgcacagagatagcaatattggggaaatactcccaaatatacgcagaggaaatattccccaaaatgctgtcctgccgtaactagtttatgtgcatcacttcctagaagacacaacaacagattccacctaaaattaagccccctaagaaatgaggtggctttggagggttctggacaccagactagaagagtaggagaaatgacttgagttctctgacccgcagaccccacctcaaagaaaactgcctgcgttctatgggaatgaagggtgtattttgtgaacattaaggtgtgacccactgggaaagcaaagaaatggacagtcttgggggaataggccggcttctctctgggtttgtggaatttggttctgctgtggtgtatgtatacaggtcagctgctcccccaagccttcaaagcaaggttcccacgcatctttccatgaagtctgtaccaccctttttggtaaaagatccagccacaaaatggatgattttataagccaaaatttgaatactggcaattattcaagtagcccaggctcagccacgtgccgtctgcgtccgtgggctacacacaccccctcttttctcactgcctcctgggcggtgtggatcagctgcagagtgtgatctgcggtcagggagtgccttcccggagttttcgctttcagacccctggtgttaaagacgttctgtgagcgggtggggccgggcgccccagtcacggcggccgccgcctcctcttcccgcaggacgggacagcgcccctgtggatcgcgtcccagatgggccacagcgaggtggtgcgggtgatgctgctgcgcggagccgaccgcgacgctgcgcggaacgtgagtgcccgagtcgcgcggccaaagagcgaagcctcccggcgcgcctgtgtggagaaaacgggtcttgactgagtctgcagcccacatgggtttcctcccaacctccttccttgagcaggaaaacaaagtcaaggtctgattcggtgctgctcggtctctctcctcctccacccgagatgaccttgggacgcactagagagggtggaatcttagccttaggcctgagggcggtagagacggggcctcccgcctgtcctgggggcctcccgcctgtcctgggggcctcccggctgtcctggggcgtgtcctagggggatcccctggctggtgctgcgcctcctgcaggccctgcctcttgcccctcctccctggagctgcagaccccttgcaccccgtcccctgttggcccgccgtcatccactggcctctgctggtgccacctaatactgcctttgtgtgctgcacagcaggcccttttccccataaggaaggcttgaagagaacctgaccacctatgctgtttgctttttgtgttttactgtggcctttgtataacccttgcttacgtaacccaccttcccctctccaagtctaagctccaaaaaagggaaatcaccagacgcgttcgccaccatttcactgccctctctctcactcttcttcttcccacaatctctgaagccagaaaagacccccaccccccgccccccaattcattcttccttctttctgattacagataaaccctaatggcaggccgaagtggtttcttggctacgggagaattatggactaaatcctccaaacacagcgactgatatgtgaaaatgggagaaaaaggaatttggaaactgtgttcttgagccaaaaaataacgacagaagctaaatattaatttttgaatttggcttttcattctttttagcagattttattttatttttttctgagacagagtctcactctgtcacccaggctggagtgcagtggcacggtctcagctcactgtaacttccgcctctgggttcaagtgattctcgtgcctcagcctcccgagtagctgggactacaggcacgggctaccacacccggctattgtatttttggtagagacggggtttcaagtgaccctcctgccttggccttccaaagtgctagaattacaggcgtgagccactgcacctggccttttagcagattttaatctatcacctctgcccctaagccccactacccacacacgggcggatgcctagagcagactagggcaaggctgtataaatttttttagaaacagtaaatacagctcaacaatgatctaaattattaaagacagttaaccatttctgctaagttatgaacagccgagaatgcctctttggtccaaccatggcctaaaaatatgctcttgaaattccccttgtcccctgcccagtgttctcaggaactgtagaagtatgaattcccaaatggcagagttctaacataatctaagtcactgtttatctgatactctttcatgcagaatttactgcttaatattctctaaaatgctcctagattaagagacattgctgatctgtgcttaatttacacgtcattagtttctgacaacggtactttccagttcccaactgactgctttcaagcaacacagatatatgttaataatcaacttttattttcctctttctgttaaggatggcacaacagcattattgaaagcagccaacaaagggtataatgatgtcataaaagagttgcttaaattctcacccactcttggtattttgaaggtaagacctaaagataaattttactaatctgtaagagagaggttagaaagtaagtcctcacttggggactgtgtcgaatttgggtgcagttagcctggttagttggattcttgaaagaacacacctgcagcttcttgatgctggagatcccaggggctctggtagaagtggggaggtggtagaaagagtgaaccacagtctgtcattacctagttttgcagaaaaaaaaaaatcgacagtagtaatgaaatagctaattggaaagtatgccattttgacaccatttggaggatttgtgaaatcaaggaagaagaacagacacttatgtctgttctcttcattttcttaagcaaagaaccactctgttttgttcccttaagtgaaataaaataagcctcaaacacctggaagcctcagaaaatatgtcagtatggatacctgggtcacctaaaaaacagagccaaaactctttttttaagttttgatctttttgttttgttttgttttgcttttttgagatggagtctccctttgtagcccagactggagtgcaatggcacgatctcggctcactgcaacctctgcctcccaggttcaagtgattctcctgtctcagcctcccaagtaggtgggattacaggcacgctgccaccacacccagctttttgtatttttagtagagacggggtttcaccatattggccaggctggtcttgaactcctgacctcaagtgatccacttgcctcagcctcccaaagtgctgggattactggcatgagccaccctatctggcctaaattttgatcatttttgattaaaatatttctaacctatattatatatcaggagtcagcaaactttttctgtaaagtcttaataaatattagtatttctgtttactaatataattatattattgattatattaattttattatattatattatttattatattaatagtaatgcttactaacattttagtaaatattactaaatagtaaatagtaataaatattactaattactaatatatttactacagtaaagatatatttattaatatataaatattactataggaaatatatactacagaatgtatttactatacactatatatatagtatatatagtatatatatatatatactgtatatatagtgtatatatatatatactatatatatatagtataaatttacattttttcagagacagggtttcactctgttgcccaagcttgagtacagtgatgcaatcatagctcacagtaatcttgaattcttgcgctcaagtaatcctcctgcctcggctgggactacagccacacaccactgcacccatctaatttttaaatttgttgtagagatagggtctcactatattgtccaagctggtctcaaactcccagccttaagcaatcctcctgccttgaccaggaggcatattagtatatggcatatatttactatatatagtaaattatatactgtaaatacatactatataatatatagtacatatagtatggatgtattatatacatacagtatgtatagagtatacatacatacagtatgtgtagagtatacatacatacatacggtatgtgtagagtatgcatacatacatacggtatgtgtagagtatgcatacatacatacggtatgtgtagagtatgcatacatacatacggtatgtgtagagtatgcatacatacatacggtatgtgtagagtatgcatacatacatagtatatatacatacatatagtatgtatatattatatactatataatatatacatactatatagtatatactatataatataaatatatactatatatactatagagtaaatatttatgtctagtaatatttactgaaatgttagtgaatattactgttaccagatagcaaatattttaggctgtgtgggccatacaagtctctcccaactgccccaactctgctgtggtaatccaaaagtaaccatagaaaatacaacaaaaaggcccagtgcggtggctcacacctgtaatcccagcactttgggaggctgaggcaggtggatcgcttgaatccaagagttccaaaccagcctgggcaacatagctagactccatctccacaaaaaatgtttttaaaattaactggtcatgatggcatgcacctgtagtcccagctacttgggaggctgaggtgggaggatggcttgagcctgggaaatgaagctgtgatcgagccactgcactgcagcctaggtgacagagaagctcctgtctcaaaaaaaaaatcttaattcctataaaactttatttatgaacattgttatttgtggaatttcatattttcacatattacaaaatatttttcgtcttttaatctttttaaaatcatttaaaaatgtaaaaacagtctgagtgcagtgatttatccctataatccagcactttgggaggctgaggcaggaagactgcttgaggccaggagttagagaccagcctggagaatatagtaagaccctatctctacaaaagtttaaaaattagatggatgccatggtgtgtggctgtagtcccagctgaggcaggaggattgcttgagcccaggagttcaaggttactgtgagctgtgattgtatctttgcacttctgccagggcaacggagtgaaaccctgcctctgcaaaaatttttaaaagtagaagccgttcttagcttgcaggatttgatttgcaggctgtggtttgctgacccctgagatataatgctcctgttttattacatacaggacaccaaatctgttctaaatggacacagcggcttagctttaggactgtcctctcagagtctatcaatgtatataaaacctacttgcccttgaatgaccccagacactttttggatattttgtgtctgctctttatatttttagattccattcttgctgacagttaatacagaactgctgttgtcaatgtgttggcctctctcccctgccctaatgagctcatgagctactttcatctgccatgagctttttttttttttttttggagacagggtctcgctatgttgcccaggctggtcttgacctttgaactcctgggctcaagtgattctctcatcctcctgcctcagcctcctaaagcgctgggattacaggtgtgagccactgtgtctggcctgccatgagctttagaagccagaaagctgcacttgttaaaattgtttgtaaagtaagaataaaccatctatgaaaatgaattctatgaacaaaaggaataagctttagaaagcttggactttgcaaaatatagtcttgtttcaaacagctcttttttggctttttaaaaactcctggtctggtgtggtggctcacacctgtaatcctagctctttgggaggccaaggtgggcgaatcacctgagattaggagttcaagaccagcttggccaatgtggtgaaaccccgtctctactaaaaatacaaaaataagccaagagtggtggtgtacacctgtaatcccagctactcaggagtttgaggcaggagaacctgggaggcagaggttgcaatgagccgagatcacgccactgcactccagcccaggtgacaagagcaaaactccatctccagaaaaaagaaaaaaaagaggccaaaaagctgcacttgttaaaattgtttgtaaaggccgggcacactggctcacgcttgtaatcccagcactttgggaggcaaaggcgggtggatcacctgaggtcaggagttcaagaccagcctggccaacatgatgaaaccctgtctctacaaaaatacaaaaattagctgggcgtgggggctcatgcctgtaatcccagcactttggaaggccaaggcaggaggatcacgaggtcaggaaatcaagaccatcctggctaacacggtgaaaccctgtctctactaaaaatacaaaaaattagccgggtgtgtggcgggcgcctgtagtgccagctacttggaagactgaggcaggagaatggcgtgaacccgggaggcagagcttgcagtgagccgagatcacaccactgcactcaagcctgggtgacaaagcaagactccgtatcaaaaaaaaaaaaaaaattgtaaagtaaaaataaaccatctatgaaagtgaattctatgaataaaaggaacaagctttagaaagcttgaactttgcaaaatctaatcttgtttcaaatagctcttttttggctttttaaaaactcctggtcaggcatggtggctcacacctgtaatcccagccctttgggaggctgaggtgggcaaaacacctgagctcaggagttggcgaccagcccaggcaacatggcgaaaccctgtctctacaaaaaatacaaaaattagcagagtggctgttacacacctgtagtcccagctactcaggaggctgaggcacgagaatcgtttgagccctggaggcagaggttgcagtgaactgagattgcgccattgcactccagcctgggagacagagcgagacactgtctccaaaaaaaaaaaaaaaaaaaaaaaaattctgacccgtgttgcatgtaggtgaagttgatagattggctaagatttagacaagtaaattgttacaagagtagtgaattatcatacatacttaaaagcaaccatagaaaaatgctactttgtgggaatttttctctgggtatgatattttactcttttacaaaatcagagtggtttttattatgagcaactaattaggaaactaagtttgcattaggtactatttatggacatatgtaccctctagaaccatgtcttatgactgcccactgttcttagttttgttatagtctcctcccctcctctccgtggtccagctacatgctgcatttagctggttccttattttgataaatatttgcagtaaatgtcataaaacattaacaactgacctatgaggcccttctgtgctcaaaaatgctccaactcaaagctccggggcattgcctcaccccacatacccttcctcttaagccctgtagctccacaatcacagtcctgcccacctgagtgctcagagtgtctgtagctggtctgacaggtcagcccgttggctaaacagctcttcctctaacctcgctggaagtggctcagcaaaactacagactgtacgtgttgtccttacgtgttgtccttgaagaacaaaaatgttgggcacggcgttgttgtttcttctgcagcaagttccaaagtatgtaaaacagactgagtgaccatgaagtcatgtgtcccctcagccctattccttatttcacttgtaagagaacattagcaatatttgtactgaccattggttatgtatccaaggacactatactaggggctgatgtgactttgaaaagtacaaggcaagataaggaaggttacgggtatgaggttacagtcttatcacccagatggtttatgatgaaagccatgctgaatgccaatggctgtgagctcactcctgacacacactgtcattttctcttagaatgggacatcagcgctccatgcagcagtgctcagtggaaacattaaaacagttgcgctgctcctagaagcaggggcagacccatccctgagaaacaaggtacccactaagcaatcttttaactcgtttgggcccattgatgtgtcctcctaggccaggaaggataaacatctccctggctccagtcaccatcttcattctttgcatagtaagggcattcaaggttgctgttagtaggtgattagtgagcagtacagttggacccaggaaattctactgttaataaaaaccctgactcatatcaatggtttttttttttcttttttaacaaacccttgtgtcaagggctgactttcaatagatttttgcagcgagggaggtgctctgctatgtacgaaaccctgacccagaagccggtcatttacaaatggtttagcaccaggttccccatggacgtgcgttgtgtgatgggtgagggcgctatcaatggttttctttttttctttgagagggagtctcgctctgtcacccagactggagtgcagtggcgtgatcttggctcactgcaacctccacctcccagcttcaagcaattcttctgcctcagcctcctgagtagctgggattaccggcgcagaccaccatgcccggctaatttttttgtgttttagtagagacggggtttcaccatgttagccaggctggtcttgaactcctgacctcaagtgatccacccacctcggcctcccaaagtgctgggattacacacatgaggcaccacgcccggccagtggttatcaatgaacagtggtgcactctcctggtggaggcgaggaagaaagggagagcagttactatgggagtattgttctgtcatctaagatgtaccctaaaaatgccaaaattctggtagtttatcaccattcccataagttcgatgttcatatcttgaaaattgcttgtgctatatttggttgcttttgtattgttaacaggagtacatgccactgttacaaaacaaacccacttttttctagtcctaaattcttcatttacaattaggccaaacttcgcggtgggtgggtacacaataagaatttttttaaatgattgtcattttacttcctcctcttcaacatctgcttaagctggcacatgtatagattgcagcagaggagagtagcctaggaaaggtcttgagagaatgcatgcgccaggcgcaaaggcccactcctgtaaacccagcactttgggaggctgaggcaggtagattgcttgagcccaggagttcaagaccagcctgggcaacatggcgaagcctgtctccacaaaaaatacaaaaattagccaggtgtggtggtgtgcacctgtagtcccaactactgaggaggctgaggtgggaggattacctgaacccagccaaggaggtcaagggtgcagtgagccatggtcacgccactgcaatccaccctgaacgacggagtagagagaaaatgcactaaactacaacctttatttacttatttattatttatttaaatgtaaatttttttctttttatagagatgtgttcttgctgtgttgcccaggctggtcttgaactcctggtctcaagcaatcctcccaccttggcctaccaaagtgctggtattataggcataagccaccacacctggcctaaactacaaacttttctgttgctattgttgtttttgagacagagtctcactctgttgacaggctggagtgcagtggcacgatctcagctcactgcaacctccacctcccaggttcaagcaattctcctgcctcagcctgcccaatagctggaactacaggtgtgcaccatcatgcccagctaatttttttgtatttttagtagagacagggttttgccacgttgaccaggatggtctccatctcttgaccttgtgatccgcccccctcggcctcccaaagtgctgggattacaggcgtgagccactgcgcccagccataaactacaaacttttggaggagaaagtggtattggtgtttacgaatagaggaggatatgaaaagcaacttttactttatacttaacatactctgaatttttctaagcatatcttactgtgttaaatttttttttaataataaaaacaaaaacatataacatttcatgacattttgaaaagaaaccttaagaagtgccagttaaacaacatgccaggggtcacttttttcatttgactcagcatgtagaagtattacttccccattcccattgaattgcttgtctataacatttctgcttatctctccttagatacttggatttgttttccattagctggcctggctgtgtgataagccagttgaaatcacaattgcctttctttagatcttatctttagaccttgtgcacagacttcctaaagagaccagtctttgttggtgagctatccagtcctgaattaaggcaaggaggaaacattaatacctttacataggaactgaaaaatgcaattccttgtgtgtctcctagaataatggaataactaccaacaataatggttatgagtaatttcaagtgggcaaaatgctggactttggaccctcctgaatccaagcaagtgtaaccgcccaatgggttcaccttgcctgctgcctagacagaaccgatgtatcaggacaggggacttgcagtggagaaagagtaattcacgcagagccagctgtgcgggagataggagttttattattactcaaatcagtatctccgagcatttggggatcagagtttttaaagataatttggcggataggggcttgggaagtagggagtgctgattggtcagattggagatggaatcatagggggtcaaagttaggttttcttaatgttttctgtttctaggtgcgatggcagaactgattgggccagattactggtctgggtggtgtcgctgatccatcaagtgcaaggtctgcaaaatatttcaagcactaatcttaggtcttacaatagtgatgttacccccggagcaaatcggggcagttcaaactcttcgagccagaagctgcatgacccctaaattgaatttttttttttttgaaacagaatttctctcttgttgcccaagctggagtgcaatggtgcgatctcagctcactgcaacctccgcctcccaggttcaaacgattctcctgcctcagccttccgagtagctgggattacaggggcatgccaggctaattttttgtacttttagtagaaacagggtttcaccaactttcactttgagaaacagggtttcccaaagtgctgggattacaggcgtgagccaccgcgcccggccctaaattgtaatttctaatcttgtagctaatttgttagtcctacaaaggcagactggtccccaggcaagaagggggtcttttcgggaaagggctgttatcaattttgtttcagagtcaaaccatgagctgaattccttcccaaagttagtctgacctatgcccagcaatgaacaagcacagcttaaaggttagaagcaagatggagttggttaggtctgatttctttcactgtcttaatttcctcagttataattttgcaaaggcggtttcacagggaggaaatattagtacctgtatatagaaactgaaaaatgcaattccttgtgcatctcctagaataatggaataatcaccagcaataatggttataagtattttccagtgggcagaatgctagactttggaccctcccttaaaaatgacttgaaaacatgtgtgggcactcctgttggaccttcatactgcagaagccctcagacacctgggaggagccgccagggaagtccccagcttcctaccagccactccatagaagccagtcttgctaatagcagctccataggcaagggtgttgggattcctgcagaaggagcattcttggctttcattctttcattcaacaaacactagataccatgcactgtgctatgtgctgggaatgccatagtgaataagattcacagttgctgctttcatgaagctcagagtttagtggggaataaagacaattaaagcaattgcaatatggagtgacagctgtaagcaggggagtaaagaatggtttggaggcttccaggagaaagtgacttctcagctagtacagaacactcttctgctccaggagttccaagacttctgctctggggcttcgagacagatgcctgaggagaaggccaaccagtggccccaacagccattcctcacactatagccattcctcagactgtagccatacccctgggtgcaggggtcttatgttcccaacacccttgactgagcacatcttctcccaggagcagtggggagatttagtggtttaatactgtagtatcatgaatatgggcctatgctcctgctccataatgaacgagatagcctttaggggctagcctggggcactcgccatcacatcaatctgtacaatctcagcaacctgagaatctagtggggactaacggggagggaagagcaattaaaccaggattttagaacagcatggaagacagaatggtgatgtgaatgaccaaaacttgacaacatgatttgaaagtataaagctttttttaatagcagaggatatggacattcatggagatggtcacacaaggcaacacgctggcaggctggtagacagaggtagagcttcttaagctcccttctccttgactgtagaggttcctctaactacctgccagtctgcttaccatggaccagccactgatgtagacagctcagttattcctgagtgtttgctctgagactggatgaagcttaggtctgtttaccaggagcatttctctgcaggcccaggtgttaggcctgtacaatatctgttcctgcaggaactaagctaacagaacttgaccccatagaggagcctctggtctgtagtagcatagcataataatttcctctgtgattgaatccagcatcggcatccagggtcccatgtggtgagaaggggtgcagccacaggacatgctgcacagcagaccacttgtgacaaacttacaattcctaacaagtgaggttccagccagcagatagaggtcagggggcaggatccagctagaagatggggactgcagaagtttcacctaggatcaagtttccagataaagcaactggggttccaggcttggctgctggagaagaaaatatggtgagacaggtaacatctacaaccaagcctccatccccgatactgcctgccgctttaccctttaatggcctcccctgaaattcccagaacatccttctttctttttagagacagagtctctgtcacccaggctggagtgcagtgttgccatcatagctaactgtaaccttgaactcctgtgcttaagtgatactcctgcctcagcctcctgagtagctgaactataggcatgagccaccatgcctggccacaagaaagtccttctgattcctctatacaaacatttctcaaagtgggatccttggacccctgaagatcttcatgacccatacagggggtctaagaagtcaaaacaaggttgggtgtagtggctcatgcctgtaatcccagcactttgggaggcagaggtgggaggatcacttgagcctggaagttcaagaccaacctgggcaatatagcaagaccccctctctacaaaagaaataaaaatctatttacaattttaaaaaagaattcaaaaccatattcttgataataaaaagatgttagccagttgaggtagttcatgcctgtaatcccagcagtatggaaggttgaggcagcaggatcgcttgaagccaaaagttcaagaccagcatgggccatacagcaagacctcatctctttaagaaattaaaaaacaaaaaacatagctgggcatggtggtgtgtgcctgtagtcctaactactagggtggctgaggtggaaagatcacttgaacccaggagttcaaggctgcagtgagctacatgattgtgccactgcactccagccttagcaacagagagaaaacctgtcccctataaaagcaaacaagatcttatctgcctttttcactgtgctgacatttgctctaatggtacaaaagcaaaagcaatggtgggtgaaactgttggggccttagtacacctcaaagcaggaacactaaactgtactggcaaaatattttacaagcctttgtaaattattttacaaattttgtaaattactctacaaaaataccagttgtacttaagaatgtctctgatgaagcagtaaaaatatgtcaattttattaaattttggctcttcctatacatctttttaaaattttgtgtaattggctgggtgcggtggctcatgcctgtaatctcagcactttgggaggccgaggcaggtggatcatgtgaggtcaggagttcgagactagcctggccaacatggtgaaaccccgtctctactaaaaatacaaaaattagccaggcatggtcgcgcatgcctgtaatcccagctactcagggggttgaggcaggagaattgcttgaacccgggaggcggaggttgcagtgagccgagacctcaccactgcactccagcctgggtgacggagcgagactctgtctcaaaaaataatgacaataataataataataaaattctgtgtgatggcggggcaaagtggccaacacctataatctcagcacttcaggaggcctaggtgggaagactgcttgaggccaggagtttaagaccagcctgggcaacatagcaagaccctatctctccagaaaaaaaataagccagggatagtggcacacacctgtagtcccagcttgagcccagagagtttgaggctgtcatgagctatgattgcaccactgcatgccagcctgggtgacacagtgagaccatctgtctaaaaaaataaataaataaaacagaattctgggccgggcatggtggctaacacctgtaatcccagcactttgggaggttaaggcgagtggatcacctgaggtcaggagttcaaaagcagcctgtccaacatggcgaaaccccatctctactaaaaatataaaaattagccaggcacagtggtgggcgcctgtaatcccaactactcaggaggctgaagcaggagaatcacttgaacccgggagacagaggctgtagtgagcagagattgtgccattgcactccagcctgggcgacagaataagactctgtttcaaaataaataaataaaataaaataaaattctgtgtgatgaaatggaaaacatgcctacagcacttctgctgtgtactgaagtatgatgattatctcaagaaaaagcacctggccaggaacggtggctcacgcctgtaattccagcactttgggaggctgaggcaggtggatcatgaggtcaagaaatcgagaccatcctggccaacatggtgaaaccccatctctactacaaatacaaaaattagccaggtgtggtggcacgttcctgtagtcccagctactcgggaggctgaggcaggagaatcgcttgaaccggggaggcggaggttgcagtgagctgagattgcgccactgcagtccagcatggcaacagattgagactccatctcaaaaggaaaaaaaaaagcacctgttgggcggtgagcaggcaaaactgcccccaaaagtctgaagaagctgagaagccaagaaagaagctgacatccagatgatctcagcagaaaagaagaaaaaaataaaaacaggctgacatatccagtttctcagaaagtaacagggacaggagtcatagtctcaggacaccaccccccagacccagggcctaagggaaggaatatacaggacaagtgaagtcaacctctcagggaaaggcaagaacactacgtgactgcctaagggcaggacttatgggcaaggtcgttttgacctatggtcaggattttcagtaggaaacacaaaaaagtagataaaataggaatcttagaggcattcccaaaactagggttaatcacatggcagcctgagtgcggtggctcacacctgtaatcccagcagtttgggaggccgaggcaggcgcatcacttgaggtcaggagttcgagaccagcctggccaacacgatgaaacctcatctctactaaaatacaaaaattagctgggcatggtggtgtgcacctataatcccagctactggggaggctgaggcaggagaatcacttgaactcgggaggtagaggttgcagtgagccgagatggcaccactgcactccagcctgggcaacagagtgagactccgtcttaaaaaaaaaaaaaagaagtaaacatggcagattagcatccaagatggagttgcattagcctccacagtccctgtgcagttgtttgaattgcaaagtgaacctgccacttttttcatagatcactatttttacttgaaagaacaaggtatctaccactatgaccttaacagcttcccaaaacttaaaggcttttctgatggatcagtttttttgtttgtttgtttgtgagatggagtctctctcactatcactcaggctggagtgcagtggcgtgatctcagctcactgcaacctccgcctcccaggttcaagggattctcctgcctcagcctcctgagtagctgggattacaggcatgtgccaccacgcccagctaatttttgtatttttagtggagacaggtttttgccatattggccaggctggtcttaaacttgtgacctcaggtgatccacttgccttggcctcccaaagtgctgggattacaggcgtgagccaccacgcccagccagaatgtgagtttttgatattgcacaatgaaatgtgccaacattctacaaactcagtgaactgatattttccaaatgagcagtgcatgttacaaaccatgcataggtaaaagatccaactataaatagataaacctgtgggttttaaagttcattggtatggtttcaaatcccacattgcatttaacctttaagaaactaccatttgttgagtattgatgtggcatcagagaataatatccacagcaatccaaaaagactgttaaaatactccttccttttccagctacatatctgtgtgaagcttaattttctttatatccttctaccaaaacagcatatcacaatagacaggatacagatggagatatgagaatccaattgtattctgttaagctacacatgaaagaaatatgtaaagctgttgagcagtgctactcttctgagaatttttacttgtttttgaaaatttaatttttcataactatattaacttggatttattatttttagtgaattaataaatatatttttaaaattttctcagttttaatttcttttttttttctttttgaaaatattttctttctaaataatagagatgaggtttcactatgttgcccaggctggtctccaactcctgagctcaagtggtcctctcacctcagcctctcaaagtgctagcattacaggtgtgagccactgcgcatagccctcagctttcatttttaataagttaaaaacaaaatttgttagactcttcagtaatttttgagagtataaagggtcctgaaaccaacaggtttgagagccacttccacatcacacctgttgtcaatggtagggactggttcactagatgcctaatggatgtatctcagcagcaatgtgaaaagaaaggccttcgagtgatactgagtaaggtggaaggtgttagccaccaatgctcttctttcccgggtgtctcttatgctctggaggtttcctatctctgccttctcatcaaaagatatctggcccgggcgcggtggctcacacctgtaatcccagcaccttgggaggcggaggcgggcggatcacttgaggtcaggagttcaagaccagcctggctaaatggcgaaaccccatctctactaaaaatacaaaattcagccgagcatggtggcacatgcctgtagtcccagccactcgggaggctgaggcaggagaattgcttgaacccaggaggcagagattgcagtgagccgaggtcacaccactgcactccagcctgggtgacaaagtgagactccatctcaaaaaacaaaaaaaaagacacctgtgctgagtcctgactcagtcccaagtccttagtgggcagactacctcatgtcatacattaataaatataaggtaggctgggcacggtggctgatgcctgtaatcccaacactttggaagctgaggcagaaggatcacttaaaccgaggagttcaagaccagctggggcaacatggcaaaccccatctctggaaattagccgagcatagtggtgcacatctgtggtcccagctactcgggaggctgaggtgggaggatcatttgagctggggaggtcaacgctgcagtgagccatgattgcaacactgcactccagcctgggtgacagagcaagaccctgtctcaaaaaataataataataaaatacatataaggtataacatttaatttgaccggtacttattgagcacattttagacatgctgggcattgtgctggagataaggatacaatgattaattagatctggacccttccccctaagagattacagtctagtaagggatctggctggaaaatgtctctaagaatgagataaggatataacaagtaatatttatacatttaaagaagatttgtaatacctttatataaaagagtgagtccagtgtggatttttttcattagtgaaggagaaagagtgggtcaaatgcccctctttggagtccctaaaaccacaccagctatggggattcactaatgcccatcttctcttctttcaggccaatgaacttccggcagaactaaccaaaaatgaacgtatattgcgtctcctgagaagtaaagaaggtcccagaaagagctaacttagctccatatttgacagaaagatagaaagcttaaccacattgtccaaaaagaaattgcatttcaagcagtgttggaaattcttttatgaaaaaaaaagatgcccagaatgcccatcctgtgggtccctgacaaagaagagctacgctctgtgcacgaagtcaagaaccaaacagctcagggaccctcttgccccttcaccatggacttctcatggtgtcctgtaactcatctcccggggggcctggcatgttcacagattccacagaaactcattttcaacaatgctaacttggacctgtcagttaaactctaaggtggacagggttctcagtactaagcaaggagacagaatgctttgttcctttaaaagactgaaaagctgaccttcaatggattgaggcacttttgcttttgtgttaaatgtagatgtgctaaaatatatagatctatcatattttacctacatatgtatgtcattccagtataaaacattctcctctacccaagaaccatagccatgattgttataaatcaatgaagtgtaaacatacattattaaaaaaccacttctgacattccattatgtgctattcaaagatggactattgaactatagaaaagacagactgtgcatttgttcgttgatcctcatcttattcctgacatgtaaaaatcaattttacgtagagtcaacattgtaggtaggttaaaataccagtggcaaatttggaaattcagaaacttataaaccacgagaaatatataggcttgtctctttggtcttttattttggctctattgttgggaatctatttcctattctataagtaagtatacctaacatgctgtggaatcttgagtttccaacaccgtgctgcttgatagaatgactttgaggtccttggataaaatgtgatatatgcaagtacagtatgttgctattactattgcaggaatataaataataaaagactgttattagcacttagtaagtcttcatctatgcatgtttttgagttgactgattccaagaatgaaatatgaggtttattgaattattcctttgaaagggatcaaaacttatattcaatgcactttataattaatggtgtctaaatgcctcagtcagtgcctaactgcacatacaaaaataaaaccttctttctgtaatctaccaaaataaacgcaatggtatttctgctatttaaacacatctttagcttatttcttcatgttctgctctggttttcagtcagtgtctatgtaaagacacttttagaggaaaatgttgtaatcccaaaagaatttttgtttaaccaactttcagagttactaaaaggattatctttaattcagtaaataatagaatataatcttcaaaattagaagatattctcttaaaatttataacaattaatgcaacaaaaatcagcatattttgataaatgtctcaagcaaatgagcaactcacaggccccacaggtgcctacagcctgaccagctatacaaaaagcctgcaacctgattctaggataaaatattagaaagctctctgttgctaaaacatccagatataaacattttggtggctaaaatcaatgccatttcctcattgacattcttttattcagcaaatttgtacaaatatacattttctcctgtgcgaatttcaaaaagctatattcattttgaagaggaaaataatatggcattaaatgctttgtattttccccttagttagcccttatggcaaaaatagttgctaatcactgatacaaagcaaaacgttatgggtactgataacaaagttccaaaagccaaaatgggatgaatcacaaacttactgtttttcactaaaacatgtaattggcctattacatcaatagttttaagtgggtaatgttcttgaacaatattagagccataaaattgaagccagtagcttgaacaatatggaggccttcttactgtagggaagaggtgtctagcttagaaggatcacatttgatctagatgagattacccatagcagggaaaatgaatcatcacctaccaaagactgtacggaaaggtgtgttattttcaaaattgcattttagtttgcacacatgtaaatgattattctatgttaatctaattgacaattcagttagctccgcatcctaagacttaaaactagcaattcctatgcaaatcatctgcttaactgaactacaaacgtttttcattaattcattctttgatgacatattccatgttatataataattcaaaataaagttaatatactacccca

SEQ ID NO: 1134 - DNA, 37869 bp, Homo sapiens
gctgaccggaaggtccgggtgcgggacgtgtgcattccacggcgcccgggagctgtcccggtgccgacccgcgagcttcccggcgtgctccgcgccctcccgcaactacttccggggcgggtgccgggggcggtgccccggcgagggagcgtggcggcgagctgtttggggggggttggcgacggcagcccgagggcggcgcaaggcctgaggcccagcacaggtgggttccgcggcggcccggccccagcacttgccggcacctgcagcccgcctagacccggcgctcgggcgtcccgcgctgcacttgctcgccgcgtgactggaggaccgagcccccacattttctttatgtggttgtggtgggggcacagtaatgccctgtgcgccgtagcgttcctgtggggatgtggccggggggcgtcgggaagcgtcactgctgtgagttacgggtttgtcggccagggacccgccccggggccagtgagctacctttgcgatgcggttccacggggcgagagggggtgcctgggtgctttcacagacctcctctgtgggcgtgacagttaccaccagcatcacatttgttaagatttttaaaaattttttaatttttgtgggtacgtagtaggtgtatatatttatggcgtatatgagagattttgatacaggcatgcagttcgtaataatcacatgtaaaatgggggtctccatcccttcaagcatttatcctttgtgttacaaacaatatgattatactctttgaattatttttaaatgtgcagccgggcgcggtggctcactcacgcctgtaatcctagcactttgggaggcaaaggcgggcggatcacctgaagtcaaggatttgagaccagcctggccaacatggggacacttcgtctctactaaacatacgaaaactaggctggcatggtggctcatacctgtaatctcagctactcgggaagctgaggcaggagaatcgcttgaacccaggaggcggaggttgcattgagccgagatcacgccgctgcactctagcctgggtaacagagtgagattatgtctcaaaaaaaataataataaataaataaaatgtgcaattagattatattgactatagtcaccctgttgtgcggtcaaatactagatctttttttttttttttttttttttgagacggagtctcgctttgtcgcccaggctggagtgcagtggcttgatcaaatactagatcttattcattctgttttttttgtatccattaagcatccccaccctccactacccttcccagccttggttacactagaagtaaccatccttctactttctatgtccatgagttcagttgttttgatttttagataaccacaaataattgagaacatgcaatatttatctttctgtgcctggcttatttcactaaacataacgatctccgcttccatccatgtttttgcaaatgataggatctcattctttttttatggctgaatagtactccattgtgtctaagtaccacattttctttaggattcactgtaaaggtaacagatacttagcattttcagaatggacagaaccaaaaagttgaatgaaaactaaaacgtcttatctctaatgctactttacaccacaccactcgggatgggacattttagttttcactttagtgttttttttttgtttttttttttgagacagaatttcgctctgttgcccaggctggagtgcagtggcttgagctcggctcactgcaatcgcctcccaggctcaagcgattctcttgcctcagcctcctgagtactgagactacaggcgcccaccaccacacccagctaatttttgtaattttagtaaagatgggagttcaccattttggccagggtggtctcgaactcctggcctcaagtggtccgtcacgcttggtctggttctcattgtccttcagacctctggggatgtcagatatgcaagtctccagtaaatagagaacacggcctcaccctgcaggaggcctttggcgtggaagagacatgcccagtgaaggcttgagggaggtatggaagggactctgaactgaccctcagctcgtttggtttcttatccaggcttcgttggccagggctgttagggtgggattctcacctgcaaagtgagggaagggcactgcacgatcttgggctctgctagctgaagaggtggtggctccaggaaggagggctttgcttgccccaccgcacctacacacactcttcaccaagggtctgtgaagtgttcgtctcccacattggtggcttgtttctttagccatcttggctgtcacctggggcttggaagcattctttaatagaaactgaggtcctcatcgcatctattaactaccatagcacctgtaggtcatcacaacctgacaaggcctttgttttcgcctttgctccctttcctacccttgtttcctggcactcttgtacctaaggattctactaggaagctgatgaccttgccttgatttggggattcctggtgtgccgttacccatgtaggcccatctcggggaaagtgttacctcaccagttcaccggcctgttatatttccccccatagctctctcttcaaaggatgcctaagtggattcctattcagttgacggttgctgcgtgccaccagtcacatcctggtttgtctgttggggaattgctttctatttttttcagaaaaatttatttttacttttttgaaattttcaatttcataaccattccagaaaaattaatttatatttaaaatttacaggccaggtgcagtggctcacgcctatatttccaggactttgagaggctgaggcgggcggatcacctgaggtgaggagttcgagaccagcctggccaacatggtgaaacccccgtctctactaaaaatacaaaaattagcctaacatgatggcgcacacctgtaatctcagctattcaggtggctgaggctcaagaagcccttaaacccaggaggcagaggttccagtgagctgaaatcatgccactgcactccagcctgggcaacagagcgagactgtctcaaaaaaataaataaaatttacatacagtaaaattcattttggtgttcagttctgtggtttcataaaggcatggagtcacagatccaccgtcacagtcatacaggtctatcgtcccccaaattccctctctgccccaacctccaaccctttaattttgccttttccagaatgtcatgtaagtgaaattatactgtaggcaggcttcttccatttagcgtaaatcatttgaaattcattcacgtgttgcatgtcaactgttggatccttgtgtttaatgctgagtagcatccattatatggatgtgccaccgtttgtttatccattcttttatgtatcataatagcagcctttttagatatgtccccgttagacagtgaggcactagggattggagttgctaagtagcagagctgcttttttgttgttttttttttttgttttgtttttggagacaaagtcttgctctgtttcccaggctggagtgcaatggcgtgatcttggctcaccgcaacctccgcctcctcagttcaagtgatgctcctacctcagcctcccgagtagctggccttcatgcccagctaatttttgtatttttagtagagacaggatttcaccatgttggccaggctggtcttgaactcttgacctcaagtgatctgcccaccttggcctcccaaagtgctgggattacaggtgtgagccaccgcaccgggtccaagctgaattttgatcaaaccccaaatccagggttcttccccaccacatcaaggaactgattgggttaaacaacccaattagcatttcttcactgcccatccaagaggttgtcaggttcctagagttggtggagaattctcttttacctggtgcctgcggttggaaggaggagcaggtactccacagttaatgcctcaccatatgtgctcctctttactggtgtgatagcaggctcaccagatttagcatggttgggactgcccaaagcatacattatttcagcaaataaatttgtctgagttactcccggggttgactgcactgggttatcagtctgctagtgcagtggtgtagcaggggcaggaccagcctgtttcatgccctggaacaaccagccaggaaagatctaacccttgggccttcctcctcagtgatgtccgagctcagcgatgaagccagcgagccggaactcctgaaccgcagcttgtccatgtggcacgggctcgggacacaggtcagcggggaggagctggatgtccccctggatcttcacacagctgcttccattggccagtatgaagtggtgaaggagtgtgtgcagcggtaagagatctcggggaacttcctctcacattttgagcagcgcagtgatggcttcgatcccacgtgatggggctttgcacacagttgtggatgtttaatgcgtgtagaataggttaacctgcttatctcaggcagctgtcagtaagtattgatgctgagccctgacaaagaggccgtttttattcctaggaagaaaaagagggagtaaactttgatcagaagcttataaacagtcattctttaaccagactaattttattcactaattgcagaaatgcccaaacaaacaagcaaaataaaaataaagacagaaagtgatggcctggtgcggtggctcacacttgtaattccagcactttgggaggctgagatgggcgggtcacttgaggtcaggagtttgagaccattctggataacatgatgaaaccccatctctactaaaaatataaaagttagctgggtgtggtggcatgtacctgtaatcccagctactcaggaggctgaggcaggagaatcgcttgaacccgggaggtggaggttacagtgagctgagattgcgccactgcactctagcctgggcaacagagtgagactctgtctcaaaaacaaaaaaaagaaaaaagaaagtgatccctggccttcttttcccggagggttcattcgatccctgtgatccctgttcccctctagcttctgccatggaggaggagagaggctgggctttcagtgcctctggggaatgacctcccgacgtcactgcccacctgccctttgctaatctgtgtacaatagttagagacaatataaagcccctggcagggtccatggctgcgtcttgcccatagtaggatgtgatcatcttgtttttggaaaagggtcgtctcctcacttccacccccttatgttccacacacagcctaactctgtctcctggttctcatttgatattgtggtgcagcgacctctcttcctctctctgcgtgcctcttccagttcccagtgagccaaagcaaagcattgctgaagccccaggtctccggttcccaagttgtggccctcacttagacatacccagcccatggagtgctggtgcaccttggtacagggtggtctgttgcgctccctccacaggaggctctaggcataggcagctgggtatgcagtcagtacggcccctcaaagggtcacgtttggaattctcaggctcttaagtctttgggtgtcctgttaagatgcagagtccataaccgctccatagaggagcagggggaggcgtttgtgttgtgatgggattttgacactagctgaggtggaggcttgctgatagtaagcacaggatggggcctgaggggagctgggggcatcagaaggaaggggtggggctgaacgaggagtggtaagagagccccagggagatgctctgctgttgtgtaaaggaagatagtgttaggacgagctgggtgcattcgagccctgctgcagaggcatctccatgcagcccccctggccaggggctgccactgaaccctggtatcaggaccttctggaatggctgcccaggtgtgcatcccagagtcactgagggctgccaggcaatggaaggtagttgcctgctgtggtctaatatgtgaatcccggctgggcgcggtggctcacgcctgtaatccagcactttgggaggctaaggcgggtggatcacgaggtcaggagatcgagaccatcctggctaacacggtgaaaccccatctctactaaaaatacaaaaaactagctgggcgtagtggcgggcgcctgtagtcccagctacttgggaggctgaggcaggagaatggcgtgaacttgggaggcggagcttgcagtgagccgagatcgcgccactgcactccagcctgggcgacagagcgagactctgtctcaaaaaaacaacaaaaaagtgaatcccgtaaaagggacagatcctggggttcagtcaccagttgttatcccctctgcaggcaagaactggggaagggaaagaaggcctgtgggcgttaaccatgtaggatcccaggtaaccatgcaagtgggtattattttaaatgtgactcccttgtcccaaccccagagtcgcagctaggaagcccacagttttttcccatgggaaaatgcattgccagaattttaacagcaatcagtgagaaagatgggattctttggtcacagatttttcaagaatgtttctttaaggtgaggtgacaaaggatgaatcagtggcggtgggacttgtccacggtggagtcccttctttcctcactgctcctctccacccagcagtgggctagtagatgccaggcctgtggtggtcagggtttttcaactgtggctgtgttgacaatccaggctggatcattctttgctgtgggggctgtcctggacactgtgggatgtttagcggcagccttggcctccagcagcccttccctgcccagttgtgagaaccaaaaatgccttcacacattgccacatattccctggttgagtgccatctgcctatctggtggtgtgaaagagcatagctggccttgggctaggaggatgcgaaatcagagcaaggagacgaaggctcagggcctcacaaggcagtgtacgagcaactgtcagcatttttctgcctgcctgcctccaatccccacaacgtccagggtggcagataacttctgcttcctgtcaactcatcccgcctggcctagcctcgccaccagctttggtgaaccccacatgcgaggcggctggccatgtctagcatatcttgcgtttgtttaggagagagttagatttgaataagaagaatggtggtggctggaccccgctgatgtatgcctcctacattggccacgacacaatcgtgcacctgctgcttgaggcgggggtgagtgtgaatgtgccgaccccagaagggcagactccactgatgctggcctccagctgtggcaacgagagcatcgcctactttcttctccaggtgagctacgagggaactcaggcccagaaacctgaggggctccgtggccaccctgacagagatgcgaaccactgcaggccacggtgttcgtgtgtgctcgtgtaatcacttctgattcttgcagcatggccgcctggagggcgcccgccccacgcagaggagatgaggccgtaacgcacgttctgtgttctcttgaagcaaggtgcagagctagaaatgaaagacatccagggctggacagccctcttccactgtaccagcgccgggcaccagcacatggtcaggttcctcttggacagtggagccaatgccaacgtgaggtgattgccacatctttagtggccacaggagtggcctaggtgtcatctgactctaaggagggtggctctggaggcagctaaccagagtttagggccaccctgcttcggcacgagaggctcaagatgaggggtaggaccagagtccttccaggcacaggccttttcgtacatctgtgagatgcatctcttcaagccctctcagcttccttttctttatctgaaacccacctgggtcatacagttgtaagaattacatgttttattgtatgccaggggcctaacatactgaatggcatttaaatgtcatacattacatgcaaattccttccattttcttgctttttgtatggatgaggtgaggtgatgctttgaaacagtcatgaggccgggcgtggtggctcacgcctgtgatcccagctctttgggaggccgaggtaggcagatcacgaggtcaggagatcgagaccatcctggctaacatggtgaaaccccatctctactaaaaatacgaaaaaattagctgggcatggtgacgggcgcctgtagtcccagctactcgggaggctgaggcaagagaatggtgtgaacccgggaggtggagcttgcagtgagccgagattgcaccactgcactccagcctgggtgacagagcaagactccatctcaaaaaaaaaaaaacaaaaacaacagtcatgagttttggccgggctcagtggctcacacctgtaatcctagcactctgggaggccaaggcgggcagatcatgaggtcaggagttcgagaccagtctggccaacatggtgaaaccccgtctctactaaaaatacaaaaattagctgggcgtggtggcaggtgcctgtaatcccagctactcgggagtctgaggcgggagaatcacttgaaaccagaaggcagaggttgcagtgaactgagagatcgtgccactgcactccagcctgagcaacaagagcaaaactctgtctcaaaaacaaacaaaaaaccagtcatgagttttataagttggaagtgggattgttgtctaaagcttgtcatgataataatcacctttgaacaaacgcagcgggtaccaatgcagcacccaccctggctgtcattcattctaagacacctgataattttgtatgccactaagaaagaaaaaatatgctactaattaacattcaactcgcctgttgatttaaagatgttttctgacttgagagatgttaaaatatgaacactgtgtgtcttaagatggatgaaaaccagcatttcccatgcatggttcctgacttccaaaccagcatgagacaaggagggatttggaagccctctgaagacagtgccgagttagcataaccaagcatgaaaagcaagcttcaggagctaagcgtggcaaagatagcttagatcattagtacttgaacttttcagagtgggttcatggaggacgttgaacttgaagccaggatttggatgaatggatgggagatgctggctttctgtgaggaattagaacagctttttgaatatgattgaggtggagatttcagaggtagccagtgggaatagccaacaggtgggacgacaggcagacatctgtctttaggacaaagaccagccctggggacagacaccagaagagtaaatggagctgatgtgttatattcactgttctcatgtcacctgttaattctggaaagggacagtgttctacgcttagggatcggtgactcgtgcactgctcagggtttatcttcagcagggagtttttgcctggcggaacttgtctcttccaatcatctgactgtggcccacatcttgcagggagccgatatgtggatttactcccttgatggaagcagctgctgctggccatgagataatcgtgcagtattttctgaatcacgtaagtgaccctgattattagcatgtaatgtagtcacggcaaatgaggaatcatattactgaagtataagctattacagaattttcctttgcacagaaataactttcattcatttattcaacacattttcattatctattgacgcccggtgttgagtggtgcttaggcattaaggatacagtggtgagtagaaatagacacctattcctgtaataattttgaaaatactatctgaaaattatggaaaaatattttaaaagtaaatagcactcataatcctgtcacttagaaaaattatatagaataagaaggcagagatcctcctctctttttcaacctccctgatgcccacttggtttgagaaagagctgccctaggacttttcctctgctgtggaaagatgtgtctgtaggcaagtgtgtgcacattgctttgtgttttgaacaaagtgggattctacgtatagtctgtaacttagagacatcttatagacatcttatctttgtacagtattccgtgtacaatctgcctcagttaatttaatgagtttcttattagtagaaacttagtttttaacattttgcaattataaacagtgttccgggaatatccttttacacatagctttaatacatttgcagttatttctgtatgttgtatttctgttttattttattaatttatttttttgagacatggtgttgccctgtatcccaggctggagttcagtggcgagatcgtggctcactgcagcttcagcctcctgggctcaagcgatcctcctgcctcagcccccaagtagctgggactacaggtgcatgctaccatgccccggctaattatttaattttttttttttggtagagttgggggtctcagtatgttgtgcaggctagtcttgaattcctgagctcaagcgatcacctcagcctcccaaagtgctgggatcacaggtgcaagcctgtccacacagaaccttgtacataaatattcatagcagtattattcataattgccaaaaagtagaaaaacccacaagtccatctactgaggaattgataaacaaaatatatatctgtatagcaggatattattcggccctacaaagtaatgcagtactgctgcatgctgcggcaggggtgaaccctgatgcgttaggctgggctgggtgcggtggcgcacgccggtaatcccaacactttgggaggctgaggccagagggtcgcttcagccctggagttggaggttgcagtgagctatgattgcgccgccacactccattctgggtcacagagtggatcctgcctcaaaaagaaaaagaaaaggaaaacattcggctcagtgaaagaagccagacacaacaggccacacactaggtgatttcactcataggaaatgtccagaataagcaaatacatagacagaaaatagatgagtggtttcctgggtcttggggaatgggaagattggggtgataaaaatgtgctaaaattgtttgtggtgatggttgaacaactgtgaatatacgagaagccgttgaattgtacattgtaagtgggtgacttgttggtatgtggattatatctttataaggctgttaaacccaatggggggaagtgcaggcggtcctgatgaattcccactaccaaggttgtctgttgtcctgcccaccagtcatagacaaaggtgtccattttctcttgtcctcaccagtcctgatgtcagtcaaccttttgtcaatctggcgggtgaattgtagcgtctcattttagtttgtccttgttagagtagttgaaatttttttctttttttttttttttggagacagaagtcttgtgctgtgtcgcccaggctggaaggctggagtgcagtggcgtgatctcggctcactgcaacctctacctcccaagttcaagcagttcttctgcctcagcctcccgagtagctgggactgcaggcacccgcccgcacacctggctaattttttgtattttagtagagatgaggtttcaccatgttgcccaggctgctcttgaactcctgaactcaggcaatccacccaccttagcctcccaaagtgctaggattacaggcataagccactgcgcccagccagttgaacatttttaaattgatttcttagccatttgtatttcttttttttttttttttttgagactgagtctcactcagtcgcccaggctggagtacagtggcatgatctcagctcactgcaacctccacctcccaggtttaagagattgtcctgcctcagcctcccgagtagctgggactaaaaatacaaaaaatcccggctaattttttgtatttttagtagagacaaggtttcaccgtgttagccaggatggtctcgatctcctgacctcatgatctgcccgccctggcctcccaaagtgctgggattacaggtgtgagccactgtgcccggctggccatttgtatttctcttacgagctgtctatgtttattgcccaattttctattggatagtttgtttttttctcacttattggtgggaatttcttaaatagtgaaaaattcacatggtatctctttttaacaaagaattttgggacacaacatgcacatggtacacatgcagaccagaaggtgggtgcaccgcaggcctgtcccccaccctgcctgcgtctccttggcaccctccccacgggcgactctgggaatacacccacacatgctcatggtcctgccccatgtgcagctgctcccatcttgcattttttaaaaaacttaatcatgaagatttttctatattggtgtataaagagacggggccaggtgcattgtctcgctcctgtaatcccagcactttgagaggccaaggcagacagatcacttgaggtcaggagtttgagaccagcttggccaaggtggtgaaacccgcctctaccaaaaatacaaaaatacaaaatacaggtggctgacgctgtaatcccagctacttgggaggctgagacaggagaatcacttgaacctgggaggcagaggttgcgatgagccaagatgttgccactgcactccagcctgggtgacagagtgagactatctctaaataaataaataaataaataaataaataaatcaataaatcaataaagagatggggtcttgctctgtccctcaggctggagtggagtggtgcagtctcagctcactgcagccttgacctcctggtctcaagtgatcctcctgcctcagcctcccaagtagctgggattacaggtgcgtgccaccacgcccagccaatttttgtattttttttgtagagatggggttttgccacgttgcccaggctggtcttgaactcctgagctcaggcagttcgcctgcctcggtctcccaaagtgctgggattacaggcacgagccaacgcacccagcccctctcttttttttttttttttgagatggcgtcttgctctgttgcccaggctagagtgcagtggcacgatctcggctcactgcaacctcagacttccgggttcacaccattctcctgcctcagcctcccgagtagctgggaccacaggcgcccgccaccatgcccagctaatttttcatatttttagtagagacggggtttcaccgcgttagccaggatggtctcgatctcctgacctcgtgatccgcccaccttggcctcccaaagtgctgggattacaggcgtgagccaccgtgcctggcctctcttttttttttttttttttatggtggcatggtattccctgtagggatgaatcagagtttttttgtttgtttgtttgtttgttttgagatggagtctcgctctgtagccctggctggagtgcagtggcgcaatctcggctcattgcaacctctgcctcccaggttcaagcgattctcctgcctcagcctcctgagtagctgggattacaggcgtgtgccaccacgcccagctaattttgtatttttagtagacagggtttcggcatgttggtcaggatggtcttgaactcctgacctcaagtgatctaccactttggcctcccaaagtgctgagattacaggcatgagccactgcgcctggcctaccgttgacatttcttacacgtctttttaagcacatatgggaatttcttcaggagcttaggatgtgttcttcaaagtagagtctttgttgtgtgaggtgggttcagtcggtagtgggtagtgtaaacttgctttgttccatagtggtcctggttcacacccctccccttagggtgttagacttcttttttttttttgagatggagtctctctctgtcacccaggctggagtgcagtggcgcgatctcggctcactgcaacctctgcctcccaggttcaagcgattttcctgcctcagcctcccgagtagctgggactgtaggcactcgccaccatgcccagctaatttttgtatttttagtagagacagggtttcaccatgttggccaggatggtctcaatctcttgaccttgtgacccgcccgccttggtcttccaaagtgctgggattacaggcgtgagccaccgtgcctggccttttttttttttttttttttggggtggggtcttgctctgtccccaaggctggagtacagtggtgtgatctcagctcagtgcaacttctgactcccaggctcaagcaattcgcctggctcagcctcccgagtagctgggattccaggtgtgtgccaccatatccagctaatttttgtatttttagtggagacagggtttcaccatgttggccaggctggtctcgaactcctgacctcatgatctgtctgcctcagcctcccaaagtgctgggattacaggcgtgagccactgtgcctggccaggatgttagactttttggctccctggccatttgggtttctttttctgcaaataattatttttgtattttttatttattttttttatatagggtcttgctttgtcaccacactagagtgcagtggcctgatcatgggtcattgtagtctcaacctcctgggctgaagtaatccttctgcctcagcctcctcagtagctgggactacaggcacgcactaccacgcctggctgttttttttttgtagagacaaaaatctcactatgttgcccaggctggtcttgaactcctggcctcaagcaatcttcccaccttggcctcccaaagtgctggagttacagacctgagccaccatgcccggccagataattctttgacagataatcctgctgacatgaactagacttccttaagacacatcatagaatcaatagcccagaaccataaagagcctctacttgtaagtttagagtcattttaagtaaggtagaactggagatcataagagatatgtactcttataatttttgattgtatgtttgtttctttttgagacagagtctcactctgtttgcccatgctggagcacagtggcgcgatcatagtttgttgcagcctcaacctcccaggttcaagggatccttgcaactcagcctcctgagtagctgagaccacaagcgcatgctatcacactagctgatttgatttttttgtagagttggggtctcactaagttgcttaggctggtctcaaactcctggctgcaagtggtcctcccaccttggcctcccaaagcgctgggattacaggcaggaaccacggtgcttggccaacaatttgcatgcctttaccacattccccaaatgttaacatttcacctcattttcttatcagtctctttatgtataacatgcatatgttttctgaatcatttaaatgtaaattgtgacataatgccccttttcccctaaatatgtatttcctgagagtaagaatttcattatgtatttcctaaaagcaaaaatgttctctttcccagtcacacaaaattatcagactcaggaactcaacactgagttcttcctccagcacttgacaagaatcaaagtgttggttagtgactgctttgggggatggggcaggactggcagcaggtggcccgatggcctgggtggtttgcctgccagcgatgctggtgggcaagccctgcctggaagctcctctctcccacgtttttcctgccgcccagtagttagaccacctggagccagaggagggggcccacccggtttcccagcctgtccctccagagctgggctccatttctggaggtagagaatggggcaagtctgggcatcttgtgctctttgctaggggaggaaagggctgtggctgctttccttgtcccccatttcccttctgccagtggggccaagccccagcagctcagtcaggagaagaggatatggatctgtctgggcctctctctttaagagaaagttgattcgtgccttccggatagtcttgttccagggtttctaaactttctgatcccaccttcatgttaaaatgagttttgatcatgtgtctctttagtaatatggacattataaaataggaaaaaaaagtctcttaaagcctaagtagttaaaaatttattttcacatcaggcatagtggctcatgccagtaatcccagcacttttagaggccaaagtgggaagatcgcttgaggctggagttggagaccagtctgggcaatacagtgagaccttgtctctaaattaaaaaaaaaaaaaaaaaaaaaattggccaggcatggtggctcatgcctgtaatcccagcactttgggatgccaaggcaggtggatcacctgaggtcaggagttcaagaccagcctggccaacatggtgaaaccccattagcggggcgtggtggcgtgcccctgtagtcccagctacttgggaggctgaggcgggagaatcacttgaacccggaaggcagaggttgcagtgagccgagattgcgccattgcactccagcctgggtgacagagtgagactccgtctcaaaaaaaaaaagccagttgtggtgtgtgtttgtaatcccagggaggctgagaagggaggatcacttgagctggggaggtcagggttgcaatgagccagtgtaatccagcgtgggccacagagtgagattctgcctcaaaaacaaaaccaaaaatatataacgagttaaaatcctacagtaaagaggctactgttttattctggttaaaccttagggttccttctatcaaacttaaactagaattttttttttttcttgagatggagtcgccctctgtcgcccaggctggagtgcagcagcttactgcaatctctgcctcccgtgttgaagcgattctcctgcctcagcctcccgagtagctgggattacaggtgtgtgccaccactcccagctaacttttgtgtttttagtagatacaggctggtctcaaactcctgaccaggctggttgttggccaggctggtctcaaactcctgacctcaagtgatccgcccacctcagcctccaaaagtgctgggattacaggtgtgagcctctgtgcccagccaagaaattattttttatttttgagatagagtcttgcttcgtctgttgcccaggctggtgtgcagtggcgtgatcttggctcattgcaacttccacctcctggactcaggcaattctccttcctcagcttcctgagtagctgggagtacagacgtgtgccaccacgcccggctaatttttgtatttttagtagagatggggttttaccacgttttcccacattggccaggctggtcttgaactcctgacctcaggtgatccacccgtctcggcctaccaaagtgctgggattacaggcttgagccaccgtgcccagcttataaattattgttattatttattattatttttttgagatggaatctcagtctgtcgtcgaggctgtagtgcagtggcgcgatctcagctcactgcaacctccgcctcctggattcaaggatttctcctccctcagcctcctgagtagctgggatacaggcacgcaccaccacacctggctaatttttgtattttttagtagagacggggtttcaccacattgcccaggctggtctcgaactcatgacctatgatccacccaccttggtcccccaaagtgctgggattacaggcgtgagccactgtgcccggcctataaattattttttaaggcacaaagtctcataggtaatttttaatcagagtcaaaagtaggatggggggcactctagaaagtaaaactccttatactttgtgaaaacacagttttttgtcctgtatccctgcccagagaccacctctgcctcccccaccaactacatatgggggtcaaggttgaggccccctggtctaacgggagagacagttgccgtatgggtggtagcaaaactccttaagggttgtgatttttttttttttttttttttttgagttggagtctccgtgtgtcgcccaggctggagtccagtggtgcgatcttggctcactgcaacctccacctcctgggttcaagcgattctcctgcctcagccccccggagtagctgggactgcaggtgcccaccaccacgcccggctaatttctttttgtatttgtagtagagatgaggattcaccctgttggccaggctggtatggaactcctgaccttgtgctccgtccacctcggcctcccaaagtgctgggattacaggcatgagccacggcgcctggctgtgccttttttctcttaatgatgttttgtgcaccctagtccgtgtcaccgcaggtactcccacccaccacgtaaatgggcgggaggcgctctgttttctggatatgctctcacgtagctcattaatctcttattttaagttccttctgattctcactatgctgaatgccacagtgaaaattctaaattgtagtgtatgtcctgcattatttccttaggcgccgctgcacttcagcctgggtaacagagcaagatcctattaaaaaaaaaaaagcaaacatgcttatggtagtacattttaaaaacatagaagattggaaaattggaaaaatccccatcaaaaatagtaaataacttaaaaatagcaacattttgggtatgttaccttccaatattgttttctgtgtaatttttttggtctcattttgccggagttgtaatgtatatgtagttttgtatcatgatccttttttatttttttgagacaaggtctcgctctattgcccaggctggagtacagtggtgcgatctcagctcgctgcagcgtcaagctctgggacttaagtgatcctcctgcctcagcctcctgagtagctgggactacaggcatgtgccgccacaccctgctaattttttattaaagatgctccccctttccggggtcccgcctcctcctctgagctttggctctggcttccctgcctcccccagctgcctggtctgacaggagagaaggacagttacagtgtacagtgacaccaaaaacatgctgtattgattatagtttatttttttttcttgtagaggtgggttcatgctgtgttgcccaggttgttgtccaactcctgagccgagcgatccacctgccttggcctgtcaaatgctgggattacaggcatgagccacctcacttggccatgatcctttttcaacttgatcatacagctgtttgtaaatatcaccatctatggcaataacagaactgactgcttatccccctgagcattcaagttttctctaggtaggttttcattattgtgaatatgctgtgccaaacatcctttttttttttttttttttttttttgagacagagtctcactctgtcttcaggctggagtgcagtggcatgatctcagctcactgcagcctccgcttcccgggttcaagcaattctcctgcctcagcctcccgagtagctgagactataggcgttcaccaccacgcccggctaatttttgtatttttagtagagacggggtttcaccatgttggccaggatggtctcaatctcctgacctcgtgatctgcccacctcggcctcccaaagtgctgggattacaggcatgagccaccgcacccggcctgtgccaaacatctttgtgcactaaagccttttctgtatttagggttatttccttagggtcatggaagtggaattgttgcgctgcaagacctgtaaatacattatagagctttggatcaaagttacgaattctgcttcagaggatggtgctttcattctgactggtttaaaaggctgctttctttgaagacaagcgaagtgagtgggacacagcccaggcgcagaaggtgaaggctgggatctccgcatggtggctgccagccccctgcaagggaggtcatgagcgtgggagatgactccccagcccccagccctcctcatccttgtccctaagaagagagtgagagcaaaacttgtggctgcggtgcagacaagcctgcctctttctcatgcagatgtgatgtttcccacacagggaggcagtcagaaaccagcatatgcccttctgtcttcccagccagcagcccaggaagggcaggtgctttgaaggagaggcccctaaccccctttcacggacattcacagggagtcaaggtggacgcgagagaccacagtggagccacagcccggatgctggccaagcagtacggacacatgaagatcgtggccttgatggacacttactcgccctctctgcccaagagcctctatcggagcccaggtacccacacctgccagccgcgccctgctggggtctctggttgccttgagctttaggtgacctggcagagaaagatgtcccccgcttccccggctcccaccttctctgagatttggctctgcctcccccagctgcttacatgtcaaggttgaggcccctgctctaacaggagataaggatggttacgatggagagtggtacaaaaccaggctgttgtgaatgtagaggctttctgtagtatgcttgactaccgagtaggggcaggcccctcttagttttctgttttcactgtttcctgagctatggcttgttcattcttctatatgaacttgaatatcaacttgtctagctccttaaaaacagtattgatatttttactgagattgtgacaatgtataaattaactatatctttgtgttgttgtcttatccaagaacaagggatgacttcttgttccaatgtacttttgggtcttgcaggagggttttaaatttttcttcatctacattttgcatgtgacttaagtttattcctaagtgtttgatcatctttgtcgctattgtaaatggggttttccctatcattatatcctttttttccccccaactctcagggtattaattattcagtgctatttattttttatttcagtaggtttttggagaacaggtggtggttggatacgtgaataagtcctttagtggtgtcattatatcgtttcactgcatattgtcagtgcatttgaaggcagtggatttctgcaaacttttgttttttttttgatacgggagtttcgctcttgttgctcaggctggagtgcaatgaagcgatcttgcctcaccgcaacctcttcctcccaggttcaagcaattttgcctcagcctcccaggtagctgggattacaggcgtgcaccaccatgcccggctaattttttgtattttcagtagagatggggtttctccatgttggtcaggctggtctagaactcgcaacctcaggtgatccacccatctcagcctcccaaagtgctgggattacaggtgtgagccactgcactcagccctgcaaactaattttatattctgctaccttacagaattcttacattgttcaggttagttttgttattgattctttagggctttacaggtgtactaacatataatctttaagtatcgatggatacactgcttcctgctgattctcatgactctgactttgttgaattgcaccgttcttttgtttagttgctaacacctctagctcattgttcaacatagtggagatagtgagcctccttaccttggtcctgatcttagtggaaatgccacgttacatgagaggctgactgtaaaagggaaggcatatgttattttagcttattaacaaagtattcctcagttcttctattcctgagtggtgttttacaggagtaactattgaattgtgttcccatatctttggagacgatggtgaattttcatatggtagattgtcttcatgaacctcctaataatgaatcaaccttacattcttggcataaatcccacatgttgtactattttaatgtgtttttgaattctgtttattaatatttagtatttttctatggatattcagtcataagtgatactggtctatagttttctttcttctttttttttgtttttgaaatggagtcttgctctgttgcccaggctggactggagtggcgagatctcagctcactgcaacctccgcaacctccgcctcctgagttcaagcaattcttctgcctcagcctcccgagtagctgggatcacaggcgtgcaccactacacccagctaatttttgtatttttagtagagacggggtttcaccatgttggccaggctggtctcgaactcctgatctccagtgatccgcctgcctcagcctcccaaagtgctgggattacaggcgtgagccaccgctcccggcgtggtctatacttttctatttttgttctgtctatcaggtatgggtatcagtgtttacttcataaaaataatttggaagttttccttccttttttgtgttctaggacaatacacgtagcattagtgctacctggtcttagaagttttgatagaatcctcccatgaaaccatctggtctctttctgtgaggtggttcctcgataacagtttttctatttcttctatagagattggcctcctcatactttcttttcttatggggtcagttttggtaaattatattttcctgagagatcacttcatctaggatttcagacttatctgcagaggtctacaagataatattttctccctttttttttttttttttttgagacagagtttcactcttgttccccaggctggagtgcagtggctcgatcttgactcaccgcaacctctgcctcccgggttcaagtgattctcctgcctcagcgtcccaagtagatgggattacaggcatgcgctaccatgcctggataattttatgtttttagtagagacagggtttctccatgttggccgggctggtctcaaactcccgacctcaggtggtctgcccacctgggcctcccaaagtactgggattataggtgtgagccaccgcacccggccaatttttttctccttttaaaatattctgtttcagggccaggcgcggtggcttatgcctataatctcagcactttggaaggccgagttgggcggatcacctgaggtcgggagttcgagaccagcctgatcagtatggagaaaccccatctctactaaaaatataaaattagctgggcgtagtggtgcatgcctgtaatcccagctactcgggaggctgaggtgggagaatcccttgaacccgggaggcagaggttgaggtgagccgagatcgtgccattgcagtccagcctaggcaacaagagcgaaactctgtctcaaaaaaaaaaaaaaaaaaaaaattctgtttcaggctgggtgcagtggctcatgcctgtaatctcagcactttgggaggctgaggcgtgtggatcacttgaggtcaggagttcaagaccagcctggccaacatggtgaaaccccgtctccactaaaaatacaaaaataagccaatgtggtggtgtgcgccagctactctggaggctgaggcaggagaatcacttgaacccgggagggggagattgcagtaagccaaaatcacgccactgcactccagcttggcgacagagcgagactccatctcaaagaaaagtaaatagataaaataaaacaaaataaaatactctgtttcagtggttattttctcctgttattatctttttttggcatggaaaatattgatttattttttgtgacagggtcttgctttgtcacccaggctggagtccagtgacccaatctcgactcaatgcaacctccgcctcccaggctcaaaacgatccttctacctcagctctacgagtagctaggactgtaggtgcaccctaccacgcccagcttacgtttgtattttttgtagagaggtggttttgccatgttgaccaggctggtctcaagagtcctgagctcaagcaatccacccgcctcagcctcccaaagtgctgggactacaggcatgagctactgcacctgacctggaaaatatttatctcatttttaattgacacaaaataactacatatttatggggtacagtgtgtgatgttttgatacatgtatacactgtgtaatgatcaaattaaggtgattagcttatccatcacctcaaacatttatcatttcgaggtgagaacatttaaaatcatgtcttctagtagctattttgaggtataagctgttgttccgtatagtcactctactgtgaacaccagaacttctttcttcgatctgtaattttacacctattgaccaatctctcccactacctccccacccccaacctctgataatcactattctactctacatgtttgacatgagcttttaaaaatcctgtaaatgggtgacatcatgtagtcatgtagtcttttttgttgtttgtttggtttttgagacaggttctcgctttgtcacccaggctggagtgtggtggcataatcttggctcactgcagcctccaattcctgggctcaagtgatcctcctatctcagcctcccgagtagctggcactacaggcacctaccaccacacctggctaatgttttatttttttgtagagacggggtcttgctatactgaccaggttggttttgaactcctgggctcaagtgatcctctcgccttggcctcccagagtgttgggattacaagtgtgagtcaccacaacagctggcatttgtctttcttttctatgtctggcttattttactgaacatagtctcttccaggcttattcatgttgccacaaatgatcagatttcattctttatgtctgaataatattcaattgtgtatataaactcattttctgtcttcgttcatccactgatggacacaggttgattctctatctaggctactgtgaatactgcggcagtaaacatgagggtgtagacatctctttggtatactgatttcctttcttttggataaatacccagtagtggaattgctggatctcatttcttatattttttaatttttttttttttttgagatggagtttcgctcttgtttcctaggctggagtgcaatggcacgatcttggctcactgcaacctccacctcccgggttcaagcgattctcctgcctcagcctccctagtagctgggattacaggcatgtgccaccacgtctggctaattttgcatttttgggagagacagggtttctccatgttggtcagggtggtctcgaactcccgacataaggtggtccacccgactcggcctcccaaagtgctgggattacaggcatgaaccgctgcacccggcaaaaatttcttctattaaaaaaaatagagacagtgtctcagtatgttgcccaggctggtctcaaactcctgggcccaagcgatcctcccacctcagtctcccacagtgctgagattataggcatgagccactgcgcccggcctcacttcttattttgaatatttgtgtttgttctttttttttttttgagacagagtctcgctctgttgcccaggctggagtgcagtggcgcgatctcggctcactgcaacccccgcctcccaggttcaagcgattctcctgcctcagccttttgagtagctgggactacagggtgcccaccaccacacctggctaattttttttttgtatttttagtagagacagggtttcactgtgttagccaggatggtctcgatctcctcacctcgtgatctgcccacctcggcctcccaaactgctagaattacaggtgtgagccaccgtgcgcagcctcttcctttttttcttaagttaaatactagtactttgtctgtttagtggaaaaacaagaaaaacccatcggattttgatttattaatgagacctactgattgtctgtttaatttctgcttttatttttatttggcttactttgttgttctagttttttgagttggaaacttctttcattttcattgttgcccttttgttgctaaatgttagaggctgtgaatttttgctgattgctgctttaagtgtattctgggggttctgtatttaatactttccttgttatttttagaaattctgtaatttttatttatattttctccttcacccaggagttgtctaatagaagtattatgattgtttttgtttgttaatttctagatggaagggcctttttgatcttgcaattaatttctcatgttattctgattaactttaatgtgtctgatcagagagtgtttataattcttacatttacataacttccttgtcatcttatttatcatctactgatctatctatatatatatatatttttttcagatgtagtctcactctgtcacccaggctggagtgcccaagtgcgatcttgactcactgcaacctctgcctcccaggttcaagcgactctcctgcctcagcctcccgagtagttgggattccaggcatctgccaccacgcctggctcatttttttttgtatttttagtagggacagggtttcaccatgttggccaggttggtcttgaagtcctgacctcaagtgatccgcccacctcggcctcccaaagtgctgggattacaggcgtgagccaccgcgcccggccctgatcaatattttttagtgttccgtgttttgcttgagaagttgtattctctattatctgtatacagtttagcatatctgtgagtctatcttatttaggattatgtactcttagttcattttctacaaaattacctattagcgtgtttctgatttatgaaggaagttggtgcattttttggtgacagattttcataacttgttatagattcactgtgaattatggcttttagtattagaagtgtccttctggctgggcatggcccatacctgtaatccgagcactttgggaggccaaggcgggcagatcccctgaggtcaggagttcgagaccagtccagcctacatggtgaaaccttgtctctactcaaaatacacaaattagccaggcatggtggcacatacttacaatcccagctactcgggaggctgaggcaggagaatcacttgaacccgggaggcggaggttacaatgagccgagattgtgccactgcactccagcctaggtgacggagtgaaactctgtttcaaaaaaaaaaaaaaaaaagtgtccttccgtgtcatatttaatgtgttttgccctgaattccacgttgatagcaggattgcagccctggctcttttgtggtttccatctgcctgttctttttaagctgctctgagggtgtgttgggtgctgagattcacgcagctgccgttcccttgcttattgctgcctctttgcatttgtcttacagctccctccccttcagcttggatggaagcacagtctccctggagtgctatagatctttgagtgtgaggaggtgtgtgtccatatggctagctcagtcgccagagcttgagcctcgtcatggggaaggacagagtggcccacgttcagggcctgagctctccctctttgctggcctgccctgagttgtcctgtcagtttgcacctgagcgagcagctcctttctcagtgtcaggctcagcccagcctcttccctggcattgggattgtttcataataaacacagctcaggtggtaatgcaaaggacctttcccttcatttctgccccagcttacccactccacaaggagatctcatcatttcctcctgtatacaactcacgtatctcttaaaagtagaatcagatcagagccttatacaaatcaaatatgaaaaactgaaaagctacaaaataataaaagctctggtttgagctctgaaagctcagactgggaagtgatttgaaacagtttataatcatagcaaacacatgccatgctttagaaaatacaaaattgtggctgggcgctgtggctcactcctgtgatgccagcactttgtgggaggccaaggtgggcggatcacaaggtcaggagatcgagaccagcctggccaacatggtgaaaccccgtctctactaaaaatacaaaaacaagattagctgggcatggtggccgggtgcctgtagtcccagctacttgggagcctgaggcaggagagtggcgtgaacccaggaggtggagcttgcagtgagccgtgatcgcaccattgcactcctgcctgggtgacagagcaagactccgtctcaaaaaaataaagaaaaaaaaaagaaaatacagaattgcttaataagttgtttccagccgggcacagtggtaacgtgcctataatcccagcactttgcgaggctgaggtgggtggatcacctgaggtcaggagttcaagaccagcctaatatgatgaaaccccatctctactaaaatataaaaattagctgggtatggtggcatctgcctataattcccaactactcgggaggctgagataggagaattgcttgaacccaggaggcggaagttccagcctgggcagcaagagcaaaactccttctcaaaagaaaaaaaaaaaagttgtttccaaaggaagggattaggaaaaagtagttgtgacttatattaccatatattttaatgaagagatgggttttacttattcaaattagaacagaatttctgattatgaacaatacagacttatgaacaatttggcaaaccccaacagagataataaactcctggctgggcatggtggctcatgcctgtaatcccagcactttgggaggccaaggcaggcagatcaggagtttgagaccagcctggccaacatggcaaaagcctgtgtctactgaaaaagaaaagaaaaaaaacactgggcatggtggcacgcatctgtaaccgcagctacttggaagggtgaggcgtgagaatcgctagaacccaggaggcggaggttgcagtgagtgagccaagatcatgccattacacttcagctcgggggacagagtgagactctgtctcaagaaaaatgaaacttcccatcctcactaactttgcagctccctgtggcccattggagcagcgccccggcctgttagggcatttctcagaagtgatgccctggcagatacccttctccttaatttaacaaaaccggcgacagtcactttctttcagtttgccgtaaggattagtaaatgagtccattactgaacacactatcttaatcttggtgtttgatcacagaaaagtacgaagatctgagctcttctgacgagtcctgccctgctcctcagagacagaggccttgccggaagaagggtgtcagcatccacgagggaccgcgagccctggccaggatcacaggcattggcctgggcggcagagccccacggcctcgctatggtgagtggcccgcgtttcccgagggctctttctcattgcataccaggattttgtgttggcaagaatggaatagctcttaggctcctgaaatgtgggtcgctggacctcaggtggcagcgggacaggtggcccagctttcatgctcagggagactcaggattgagtcctgtgatggaaatgcattggtcacggactagctcttgttttttgctttatctcctggagtttccttttcgttggttaaatttaggaatagaactttctctcctgcagcagaaatgtagctaaggtcagatttcattcatcacataggtgggttggctcatacagggaggaggcaaagcgtgaagttcacttccctgccctgcccataccagctgggtcgggtgcgctgctgggggcaggaggccaagaaaacaggccctgctgttttctcagggcgatgaagttgtactcagaccctcctgagagagggcccgcttgttgacttgctggtgaagaatcctagcctttgggttttccagtctcgttcattctcagattcccagccccagggtgttgagcgttttgctcttggggagtgctggggtttctttttaggggagttgggtttggtgcctactctctattgctgtggtctgtcccagagctcagctggaggtgtgagttatgtcttcctttgatggctgtcacccactcatagccaggccaaggctgctggtctcacaggcctggtggctggtccttctcgggagcaaggcctctttgaggccaggacttggaagagtgagagtagacagtgtttcagccaggggtccaccagtaattgaattcccttctagaccccaggaacaagcagatgtgcagacttctgtcttcccaagcctgggtgctgggttgggaactggagacccaccttctcccatcatcctgggaagggtgagctgactgggccactgggaaggcctctctcgagctgctggccagccccaccacagcatgagggcccgcccgtgtcccgtccgctgagctgtgagcactggctctgggacaccgggctggtcgttctgagtggcagagtctcttccttccaaaaggtccctgccacctgctacagcctgaggtgtggtggggacaggaaggaagctgtcatcctggggctgagttggtaattaatctatatagctgtacaacaaatgctttaacaaaatcatacatgtctgaagccgcttgtgtgcggttctttgtatgtatccacagagaagtaatcatggtggtggtctcaggtgtggtatttcaggggatttttgttttctcataccttgtgaaatttaaattttctataagtgcatatattttatttgccagtaattaagaaatttggggccgggcgcagtggctcacgcctgtaatcccagcactttgggaggccgaggcaggtggatcaagagatccagaccatcctggccaacatggtgaaatcccatctttactaaaaatgcaaaaattagctgggcatggtagtacgtgcctataatcccagctactcgggaggctgaggcaggagaatcggttgaacccgggaggcggaggttgcagtgagccgagattgtgccactgcactccagtctggtgacagagcaagactccgtctcaaaaaaaaaaaaaaaaaattgggggggccaggtgcagtggcttatacctgtaatcccagcactttggaaggctgaggtaggaagattgcttgggctcaggagttgtgagaccagcctgggcaatgtagcaagaccctatctctacaaaaaattttgaaaattagccagatatggtggcccatgcctgtagccccagttacatgagaggctgaggtggaaggattgcttgagcccaggaggtcaaggctgtagtgacccatgatggtgccattgcattccagtctggataacacagcaagaccctgtctcaaaaacagtttagggggcaatgataaatagcatgtgctgattagaaaaacttctccataactaggaaaatacgtaaagaggaaagtaagttccccatggtcccatcaaccagtcctttgggttcttttttgagacagggtttcactgtagcccaggctggagtgcagtggcacgatcatagctcactgaaggctccagttcctgagctcaagcgatcctcctgtctcagcctcccaagtagctgagattacagacatgtgccaccgtgactggtcaagtcagtctttttatgtaaaggggcaaaactggagtgaaattgcctggtatacatgcccctttttctgcttggttttagaggcaggtagagttaggtaatttcatattattgttgttaatttttacctcaaggcctttttccttcctgctcagccaggtctctttttcgccggggttgactgaccagaggaggcccgctaagcgcctgtggttaaaggtcacagggacataaagacacgtggtcgatgggtgtctgtgtgaggtcattagctacctcctgctaaaaggaacactcatggtatagttttctctggtcaggcatctgtaaatacagctgaccatttgctacgttttccccttggaaaagaaatggagagggcccaggcttgacctggctgccagccctcgccccaccaggcacttgcttgggccactgactgaccctcagagcatcttttccacccacacaccacagatagagccatgccaggtcgcaggggcaagtaggtgaggtcatgactgggaagtcacctgcctccatcctgggcctcggcctctgaggaggtttcactttggagttccctgggcttatgggccccattctgtacacagagcaggctcctccccgtggctatgtcaccttcaacagcagtggcgagaaccccctggaagaagagggcctctgctgccgggatgtcacctcccccatcaatgagcgggatgtggagagcagcagcagcagcagcagtcggggtacgtgcacccccacccatccggcccgtggctcaggcaggtcctggagctcctgtgtgcccatccccacttatcccctgggcctggcgctggacacagccatccagcagaggacaggaaaggggtaggtgtggacggccctggttcttgtgaggaatgggagaagcttctggtccagcatccccgtgcggcttaagggagccgttccacagcaacaggtttagctccttgcttgggagcccctgaggctttcagggcaggccccagtaggaatgtctgttataactgcacctccgtgcagcagctgtttccatagtgcccaccgtgtgccaagcactgctccgggtgcttgggatttatcagtgaacaaaaaagacagaagccctgcccgtctgtatagaggggagggtttaggacaggcaggaagtttgaaatataaggaagcaaccgctgcaggccccaaggagtgccctggtggaggcggctcagcccggggcacgcccatgcgcagcacctcggtgagggctgcaggcggacgccctgtcttcccgccctcagaggaacatgctttctgtgccaacctggggcccgtccagagcagcagcagcagcgagggcctggccagagcccaggggctcagcagcgaagcttctgtggagagcaacgaggtacggattctttctttcttggtctcccatagccggtccctggctgggatgcctgacatcccccagttactttaagatgagcatgtatgtaagaagcagctgctgcacgtgtgtgctgcactgggacgtgctgtgtccagggtctggcttctcagacgacagcgaacgcaccggaagcccctgtgtggcgggtggggggtttcacgaagcctctcaagcccctgtgtggcgggtgggggtttcaccaaggctctcaagttagcccgcgcactctttcagatgcacgcctctcactgcaggactcggatcatgcctgtaaaagctcagctcgcaaacaagctaaaagttacatgaagaccaagaatcctgacagccagtggcctccccgcgctgcaactgacagggaaggctttctcgctgagtccagcccccagactcagagggccccctactcaggaccccaggtaagaccgcttgtgaaactggaggttacactcagagacggcactttttgtgacttaggaggcatgtgttgtgtatatgacgtgccaggcgctgctaggagaacagaatggcggtggcatccccatggcctgttaggctccacaggctcacagccggctccatggctggcagccccgctgcagcgcttctactctgttcctctccacggaaaggacctgtctccctgctttccatactggagttggcctccctgagcctggggagaagaaaagcacacttgacctcagagctgcctgcaggagtctgacaagatgtggttgaagcagagacaggaactacacacagtgtgtgcttggtgatggttacagctgccaccatcctcctcctttctgtggtccctctgaccacacattaccttagggatcagaggtgtgactcacagctcagctgtctcacctgtgtctgctgagttctcctaccctgtgtgggcagaagaggcacggagaggagaggcagagggaagctctggttggttatttggtttgtttgttcgagacggagtctcgcactgtcatctgggctggagtgcagtggcgcgatctcggctcactgcaacctcctcctcctgggttcaagcgattctcctgcctcagcctcccaagtagctgggattacaggcacccgccaccatgcccatctaattttttgtatttttagtagagacgggatttcactatgttggccaggctggtctcaaattcctgacatcgtgatccgcccgcctcgacctcccaaagtgctgggattacaggcgtgagccaccacacctggcctggtgccatgcccggcctggctggttatttgttaaagcactggctttgctgttcagtagagccttggatttgccggcttctccctgcagcccctggctcagtgagcaggcacacgtctcggtcccttcaacatacgttgagtggagtctggtcagggtagtgtcctaagtatgtttctttcagaaaatagcttgaagaaaatgtcagagtaacatttgtttgtccattaaaagcaataaactctcaaaagtaggatttctggagttgaaaagtaaatgaaatgaaaatatcactagacgagctcacagcagaattgagcaggcagaagagtcagacaacttgtgaacacaggtcacctgagatcatctcgcttgaggaacagaaagaatgagtaaaaaaaattaacagaaatctgtgatcccctcaagcacaccgacaccaccccatacagtggcattccagaaggagagcagaaacgatgggtgagaaacagcctgaccatctcagtggatcagaaacacggatcttacatccagggagctcggtgaactccagacaggtgaactcggagaagagctgcgcttagacaagtggaaatcagaacatccgacactgagactctagaattagagggcagcgctctccgcctacaaagcattgtcgagatcagcagctccatggtcccttcacagaactgagcatgtgtgggaggaggaggccagtttctggtgatgaacatacattgtccccacgtggccgaccatagtgtgaggactcacctgcctgcaacatcctgccctgcctgagccaccagagtaggaggggacagcctgggcgccacacacaaggcactgtcttggttctgagcctggggaagtggtggggctccgagtggaggaaaacgtctctgcttcgtcgtcagccactacctcccccaacctgtcccctgtgcctgccaggaccttgccgcactgctggagcagatcgggtgtctgaagtacctgcaggtgtttgaggagcaggacgtggacctccgcatctttctgaccctcactgagagcgacctgaaggaaattggcatcacgtgcgtccagaagggccgctctggccctcagcccggggttggggcaaactcccactcatgtaagcgctcttgggacgctgaggcatatcctggtcacattccccccgcaggctgtttgggcccaagaggaagatgacgtccgccattgcccgctggcacagcagtgcccgcccacccggggatgccctggagctggcctacgccgaccggctggaggctgagatgcaggagctcgccatccagctgcacaaggtgagtggctgggtgggggatgggggggcagggtgacacccgtgagttggctccatctctgacagaaaaggtgggtgctgtgtggaggggtcaggtggatgcagtggggagagggccccacacacaggacagggccgtggccaagggtctggcttgaccggccacctcccagcctccccgcgccccccacccccctgcagcgctgcgaggaggtagaggccacgcggggccaggtgtgtcaggagcaggagctgcgcgccgtggtggagagctgcctgctggagcaggaccgcgcccgcgaggacctccaggcccggctgcgggagacgtgggccctggcccgggatgctgccctcgtcctggaccagctgcggtgagtggctctgagctgccctgggctgggtctccagtggtcagccacctggcccctgggcccccacacatcctttcctcctgattttgtaactgaggggtggatttcagggtctggagccaccccacccccatttcatcaggcccttccttcctgcaggcagacccaggcaggagttgggtccgggaatctgcaccggtcgccctcctgctctttagtgcagcctcatggggcactggcccagcccatgagggccagctgcaaggacagggctgagcccctccctcccctagaaggtctgaggtgggggctctgcagcggccaggcctctgctctcaccaatatttgtttctgtgtctggcagagcctgtcaagctgagctgtcatctcgagtgaggcaggaccagccccctggtgcagccactctgggcctagccgtccccccagctggtaagagcagtggcctgactccgcactgggcagaggggaaggtgggggagccctgaagccaggtttgacccagtgggcttggcctggttctccggccggcagccactctcccaggtccctgtgtgcacatgatcccagagtccaaggaaaagagggggccctggggacccaagcccacttcctcacctgtgacaggaaaactgcctatcccccaggggtaggaggtactcgagaaaggccctgtgccttggctggctgtgctgtgctgagaccgccagtgacttctgtagcctccagccagggcccagacccgggtccccaccggcagagctttgccttctctcgggctgacccgggcctcgtagtgtttgctcagcctgtgggaggaagggcacaacagggcttccctgcctcggccttgggaggttgcttagacactgtcaggcgggtagggaggttctgatccaagcaggttctcctggttgcatgggctcagaataaagcagggcctgtggggacgcagacccccagctaactcggtccctgcacctgcaccacagactccaagggctggcaagcgtccctgcaggccatgagcctccccgagctctcgggagccctggaggaccgtgtccgtgagatgggtgagtctccggggaccagacgactgagcgctccttttgtttccgagggaggcaaagggacccctttccagggaaagcgggtttgtgtctctctaccccaaggctgacctcggggctggggccataacgggtgaggggcaggtcacatcctgcagctgagaccccggggcagcaccacccagccctcctgagcctggccgggagaggctcaaggtcatcattcctcagggcaagcactgtgcttagtgacccagagcctggagaagctgcaggtgctgaacgggaagaagtggcgggagacctagcctgcgggccggtgagtgtctgccagcctggatcccgcgtggtgggagcagcagggcctgtctgggcggctgcaggtgtgggtatgcacccacctgtccccctcccttctcaccggggctttttctttcagaatctgacgttgggtgattggtccaccctgaagctgtgtgccagggagtgaggaggacagtgagcaggtagctgccatgtgcagcccaggcccagtgggggccagaggatcaggccccgggagcagccggcagacagaggcaagacgggggctgcggccctggctcggcagctcgggccagcactgaggcgggacgagggcctcacccagaacctcgtggtgaggcccagagttcatgggctgccctggcccataccaggcagggccctggggggaaagtgtatccatatacacgcacaggtgccaactgaggtgggaccttaggaatgaggactggggcacctggaaaatgccattttttggaaaataaaatttaagaacagctag

SEQ ID NO: 1135 - DNA, 411116 bp, Homo sapiens
atggcctccctcaccgcatacggtaactggggccgtcgcgggttcctggggcggcggggcggaagggaggggcccagggagccgtcgaaacacccggggaaacttcggggttcgcctctgcggaggggtctggaagggagggagacggcggccgtgcgcgccgctcctgaggggccgatgttccgcggggtttcgggccgcgggtaacccgggaaccgggtgtctgcgggaaaaacgcttcaaaatttgggaggatctgggagcttcgggactctagaaacattcccctcgcttccgaccactcaggggaagggacgcgggtgttaagtcctcctctagcggggtgaggcttggagttgggagatgtgcgttcagccagcgcttatcttgtccctgactgaccttgggcaagttatttaaacttttcagcctctgcatttctccgtctgtaaatcagagagatgagaacatctctctgacagatgctgtggagttaaaataatatgcactgtaacatgtttttaatgcaaaaaaagaaatcagtttggaaataaaagtttatgaaaaaggaaggcattcatcgttcccctgcccattgttttgttaaataaatatatatgaatagacatatacatatatacatgtgtggtattgcatggttctgaaggaaaacaaaatcactgtgtgaaggtttcaggctcagctagaaatcctagcgcgctggggaagccagcaaggcttcttatcaacgttcttgcttgtgtggataaagcaattctctttagccctttatcagaaatactgctgagacttggttataggaagcagaaactcaagtagacctccctcccttcctcttgcttgcagtcagttgttgcgataagatctagatttggcattttaaaggggaaagctgtgagcaattgatggggaatgttctgcagggacatctcaaagcctgggatgggtgggacggaaattactattctttggtgtggaatcttcattctctaggccagtgatgtcccctgctcattttaccaaggttaacagggtcagtctctttctctggatttaaattgtttaaaatgatcatttaggtggctcagagggtttgcaattgatgcctgggaaccagtaacaaattgtgagcagattacaaatttcagtctggtggcctgttttttctttcctccaacccccttcccccgtgctcagaacatttttgctgggatttaagttgttcttacctgcacgcacatttaacactcaacattgtggttcctgggttaccatctggggataattcaatatgctgatggcattttaggcatattcattggcaaaacatctatttttacaccttttcctatcagagggatctaacttctgtttttttacatcattttagattttgtatgctgccccatggatactgtcagtaataggtttacgtaatgatcagttctgtacgtttctagaagctttaaaagcttaattgagcacccaggtggagaaaatgaagtcagaataagtgaaatcattttgaaaagaagtatatttcagtaattaaaggaaaaaggtggcagatctttgtttttggtgattaagaattacacaggtttctcattagacccttaaagagaactgaagcatatttcaataaaaatatcaattagaatttctgcttgacacattctcctcctgcatccatccctaaaatgatgcatatacttggccacaaattccacgttaattcttagatctgtagcagtgtgagctaaaccatgacagaataaattagtccatcagggttttcaacctagtgaacaagttaaggagaaaaacattgagcacatttaatacattcttcacccactggatactattgagatcattatctgatgagagcttggtccagccctggaaccctccgcaaatcttctctttgacaattgaattccttgtaaaaaatgtcccctgtcaattctgttggatttgggtttaggcatcatgatgggggatgatctaaactttttgcctggaatttatagggttcaatttttgtgtttaattgactgatttaataaatgctttattcttatctttagcacaggggctgccaagagaatgaacagttacactgtagaccatgtgttttaggttcacaagatgagagagaaatttggcttatgtaggcatttcattagcagcagcctctagtaatcctcattagcttcccttctaatatgcatttctgatcccgttctttctgcattttgatcctgctctttttgtcttttgagcttgctctttccgcattttagtatgaatttttactttcaggccaccatctagactcacattctagaaatgagaaatgagattagggtaatcagtaactgtaatccccaccggtaaaaatatgttcaatgaatgatgttatttttagaattctgggtttttaaggcctcaaccctttatactcaccactgacatttattttcttgtcctttaaatggtttaggttcttaaccactttaactcattaaataaccatgcgcatgagactaaggatgggagacaagtattttttagagagaaatgactgggactttaattgttcttggccatgcaaaggaaggcacagaggctgtgtccccacctgaaccaggaagggcgttgtggttagactcacagacctggcctggacctgtcagccgtgatgaggcttaataaggagctgaaagagctgatagagcacagtgatggctgtttcatatagggaagccctctctgaggagaaacttaagcagagaactaaatgaagaaaaggaatgaggcattccattacatggggaaagaggattcttggcaatgtgaacagtaagtgcaaaggccctgagtcaggaatgagcttgtcatgttcaaggctagctagaaggtcattgtggctagagcagagagagcaagcagaagacaggaagacagtgcagtctgagccggtgttgttatataactcctctcccctcattttcctcctacctcttgattttttgtgtgtggactccttctgctaatgctgatgtttgcctgggttctctcaaacttttaaataatttgactctcaaccatttggatgacattggttagatacctcccagatgctaaacaatgaccccatgtgcagagtcagtctcgtagtgggagacctgtaaactggagcaagaaagttttcagagttgtaagtagaagtgtggggtgtgcctgggcatgaagataataataatggcactttatgtgaattagctcagttaatcttcacagcaacttttaagacattgatccaaagtcagccctatattcatttgaagaagttgaggcacagataggttaaggaacttatttagggagtgtaatgagagctaagcctaactgtggaatgtgggaatcaaatggggtgagaagacatgagagcctaggacatcatttcccctcccatgacttcatctttattcaggtgactcccacatagaaatcaccagttagaacttctttcttgcatgtgctatgcttgtatagttagctgccagactatctgtatgctcttctctctttgtgttagcatcacaaactcaatgtgtccaaaacaacccccatcttcctctcctgtccctgttttctatagagtatctccaactactgagctctaactatgttccaggctctagccttaacccagggttactagaacgaataagatctcccgctgtttctgtgacagatggcagagtcagctggaggagacagactcctaaatggagaattataatgcagtgttgtagggaagggctgggtagggtaagggatgggccaaaacagtttcctggaggaggagattgggagaaggccaactgggagaaggaggtcattccagggagcaacagcaacatgaatgaagatgaaggggagaaatgtcaggggtgtgaaggcagccactagtagcatggtgctggtaggtggaacatgacatctgaaacagagtggctagaggttgaaaggggccagcatgctctacccagtcaccctggaatcctggaagtcattgtggagtcctcccttaccagcacatactaacagtgaccttgagtaaatttttgtttgtttgtttgagacaatgtctcactctgttgcccaggctggattgcagtggcatgatcctggctcattgcagcctctacctccctggctcaagcagtcttccttcatcagcctccatagtagctgtgaccacaggtgtgggtcaccatgccaggctaacttttaatttttttttttttttttttaagtagaggcagggtcttgatatgtttcctaggctggtctttcctaggtgatcctcctgccttggcctctcaaatccctgctggaattacaggtgtgagccaccacgcctggcctgaccttgagcaaattaattcaccttctgtgtctcagttttctcatctgtaaaatgaggtcactaagaagttaaaatgcaatagtactgtcaagtgcgcaggagcagtatgtagtgctcagtaagcattaggtattattatcaactcctgctcctagccagtatactctcaatcaccaagtcctgttggtcctttttccttaacatctttcaactttgctttctccttgccctgccctctgttcttatgctagtccaggccaccatcattgcccactttggctgcaacagtggcctcccaactggttcctctgcttctagtcctggcttctttgaattacacttgcaaatctgatcctgttgttccttgtttaaaattctccagtggctcttctctgtgtagggctaaaaattgaacttcctgcccttctctcttgttgcctttgaccctagcatcccaccctctgggcgggaggttgtttgaggccttctcaggtttctggaccttgatgcatgctctgaacgactccctccttctttacaaggccccctctcttttccccttgacattctctgtctgacttggtgcttcctctgggacttcttagggtaagccctttccatagcaggttctaattttgtactgcggtgagtaatcccctctgtgggttgtaaaactcagatgacaaggaccagctattttatctttgtgttccttgtgcctcgcacagtgcctggcacatagtaggtgaccagtacttgggtgtgtgactgagggagtgaatggagtatagtagggggcagtacaccatgtggaagttttaaaaactcctttttcctattgcaaataataagcataataacttttacccttcagaaaagacaaacaagcaaaagaataaaagcatccagactacatggtgagatcaggtacatgctagctggctgggacttatgctttacctactagataaatccaaggagctctttaatgacttctcttgttttttccctacaccacctgacatgcttgttattatgcaagcaagacactcatggtcaacatcgattaggatccttttgattaagaagctgcagcaaagcatgtacagattattttttgaccttcagcccttcatattttgtaaatttctttgtggggtaaaattaaattaaaaaatttttttgattctgagaagcagcattttaattctttcctttaaaacgttatgtttttttgtaacagtgtcatagtctgctctgggctgctatataacaaaatgccaaagtctgggtggcttaaacaacagacatttatttctcatagttctggaggctggaagtccctgttggaggtggtggcagatttaatgtatggtgagggcctgtttcctggcttgtagatagtcatcttcttgctggatgctcacgtggcctttccttggtgtgtgctcagggacagagtgggatctctgtctcttataagggaactaatcccatcaccgggggcccatcctcatgaacaagaagatagaagagatagagattacccagctaggaggaaagaataggtcttgaatattaacttttttcgtaaacctataaaatacacgggaaacgtggactaaatcaacacattgatatttctgaggaacacactcatgtatacatgtacatacacaagtttacacaagtaaactacatttttttcttactagtcagttctctagaaccttttataaacaatttagagtgcttttaaaaatctaaaatctaaacccaattatgtcccaaatgccccatccccaaatactatcacactgggggttagtgagggccttaacatatgaattttgggaggacacattcagctcacaataagtaacaatgtggatttttctactagaatgtagtcctagacacacagtccacagctcccaaggaagtttctagaacaaacaatttaaaataggctttgtgagtgcttactgtgtgtcaggcactgttgtaggttcaggaagcaaaacaaaaacaaacaaaaaacaaaaaaacaaaaaaaccttgcctgtttcatggatcttatgatgtaataataaggcatgaatctttacctcctgaagataatgaaaacagaatataagattttcaacagtgaatcaagtaggtgtaagtaggaaaggaaaggcttttctctaattagggttcatgaaagggcttttgtcacagtgcctgctgctagaagtggaatcaaagggacgccgggataatgagcaccagacacagtatttaaaatgcaggaaaggtgattcaagtatttgaaagcttacgggaggctttggcaaacatttcttgtgccttctatgcattaggctgagacagggtttgaggatgcaagatgagtaaaagatggctttgccctctgggagtctgggtctcactcaggtctgatgcaggttgcagaggagaatactactagaactattactacttcaactagtatctctcctgcctgtcttctagtgaagtggcacataataaatgaaaaaacgttatgaaaacagcaatactgtctttgttttatgatagtaacaaagagatctgtttgcataggaaaagctcttcccagtggaaacacactttatatcctctgattgatttttcagcaccttagggagagacctcccaagccaccactttctacctaggaccagcctgtgtctactatatgttttttgaatggatgaatttcagtcacaacaaaaagaaagtccaggcccagggaggttaggtgaggagatagagattacccagctaggaggaaagaataggtcttgaatattaacttacacagcaaacatggactaaatcaacacattgatatttctgaggaatacccacatgtatacatgtacatacacaagtgaactacatttttttcttactagtcggttctttagaaccttttataaacaatttagattgctttttaaaaaatcagatgcagtaagtagttataactcactctatacaataaacatatattttgtaaattaaatggtatttctagtgcgccagtgtaggtagttattaaaggaatcagatggtgaatatttttgcaaagtcagtagttatgcatcattcttctgtttggtaagttcttggctttcatctgtccctgtatataagcaggcttgtaatatgttttgaaaggtttaatgaaaaccttttctttgtaaaatttctccttactttcttgtgagtgagatgtttgtttgctcagcctttgtggattgtggattccaggagaaggctttacctcagcttctagtccctgtgtctttgtcagggaaattggtatctttttttttttttttttttttgagacggagtctcactctgtcacccaggctggagtgcagtggcgcgatctctgctcactgcaagctccgccttccgggttcacgccattctcctgcctcagcctcccgagtagctgggactacaggcgcccaccaccacgcccggctaattttttgtatttttggtagagacggggtttcaccatgttagccaggatggtctcaatctcctgaccttgtgatccacccgcctcggcctcccaaagtgctgggattataggcatgagccaccacacccggccggaaattgctatcttaactgtcaacctggcctatgcctaaaataaggactttggagcttcatagtttataaacaataatcaagcaattataagaattagtgaaatttccccaaatcagagtgaaacggatgacatgaagatgaataacttaaaacaattgcttcagtaaatgctacttacttcttgggctagactcatgtcaggatatcagttctggttctcccactttctagttgtgtgatgaagagcaaatgacttaaccctccaggtgccattacctcaatagaaaagaaagggaaggagcccatcattcttgtatttctagcaatctgagcggtcacccctcagaacccagcctgggtttggctgccagtctaacttgccatttacctcgtgatgtgaaagccactcagcatttcctattatgattgtcaggtaattctctcaagtaatgtcctctcacctgaaattacttggagatggacttctcctcatggtagttacgtgatgtgttcattttgtgataattttcactgagttgtgcacttgggatttgggcattttattgtatctgtgttaaacttcagtaaaaaaaaaagtcctttctttttatttttaaggcccttctgccttggggcaggtctttcttaaaaagaagctctttgaatcacacgatgcatgccatttctcttctcagcctcagtctatgaatattctgaactaatctatttcttgtgtttctcccttcctgattacacttgtaattctcccattcctagcgcagggcagatcatacaggtccttaaaaagtctttggttgattcctaaggccttgagagttttgcttatgggccttaaagttaagctgtagatcagtgctgctcagtttaatgagactgcaaatcatttggatatcttgtgaaaatgaaaatactgatttagtagcttcgggggagcctggaattctgcatttctaatggactctcaggtggtgcagctgctgctgttcaagagactgcactcggaggagcagggtggtagagaacagtagttggtgcttatatagtgaatgctaccatgacttatgcatgtgaactgtataaagtggccctggttaaaggaactagacttggaattctgttcttttaatttagacatttttggttgtgttttgcttgatagaaatatgcttatattctctgttttgtttggccagtagtgcaacattaaaaaaactttgaaaaaaattggtaatttatacacacacacacacacagaaaagtgcagataataatatttaatagttgccccgggaccccccccgcccattccctaaaaaggacttctactctgatttttatcatcacagattagggttgaaaaacatggcctgtaatgatattgatttattttttaattgttgagatttgctttatggtctaaagtatggtcaagttttataatacttcaccatgggcttaagaagaatatatattccctgactgtcagatgaagcattcagtaactgtccattaaattgagattaattgtactgttcaaattttcagtgtttttactaaaatttttcttgcccaagcaatcagttattaagtatgttaaaatcattcttctcatggtaggtttgtctgttattccctgtagttctgttaatttttgcttcataggtttcagattattttattctggccatatagatttaacatttgtttataccttcttggataattgaaccctgaacctttcatcattattactcaccacctttatccttaataatgctttttgtcttaaagcctttttcctaaaagtaatataggtaccctggctttattttggttagtatctgcttgctgcatctttataaatattttactttcaacatttgtgtccttaggttttagatgtttctcttacaaacagcatttagttttttttggttgttgtttttagaaatccatctcatagtctcttaaatagcaaatttagaccattaacatgtattgttattactactatatttgaacttatttttaaccattttactttgttctttctctgtatttttcctatgactttccccctcatttatttcctttatcaaagttgaacttttttgttatattccttctcccactgttcctcaccaccctaccccatccttacccctttgaacacaactaactggtttggaaatgtagtctatttctgctgttttaataattgcccttgtacttttacttcaatcttacttaacaaattctacacctattcattatattttgtttaactaactctaaatttaatatgttaacctctcctccaaacaatactttgagcacccagctcctggcttgtattctattattatttagtattttacttttattctttttttaaaccctcctatattagacattaaaattattattttatattgacagtagagttgcccacatatttacaagaattccacattcagtggaaagacataaataggcactgtgttttctttttcgtggcggttaggatgaaaggtaagatagtttaattgttgagatgggctttattttcttttgttataagattgtgttgtttatgaacacgcccccaaataatttgagataaataaaatgtgtgtagttttgtccacactttttcgctaagcagtcctctgaaaacagtagatcttgttctgtatggagcctcaatgcttagcacatcagataactgactgtcaaagatgtaacaccagatacaggaggaacctgcctaacccaacttgtgatattaatctgtcctcctgtctttgcctctgctctcaattgcttttctagtgtaagacaaacctggattctgattccagctttgtgacttcctgtgagtgtgactctgggcaagttctttaattttttgagcccctaattcctcatctgcataatagagttataccttaaaagagttgttttgaagcttaaataatgggtataagtgaaataataaatgttcagcatagtgcctgacaaagagtgagtgctcagtaactgatggtgtctaattccaccaccttttctttttcctaggtacttttacagaatttgtattctaggtttgccctgccataatttccgcacttctctatttctttaaaaaagttatagtgaactataatatacatgtagacaagtgaggaagaaaaatgtgtaatgtaatatataattataaaatgaatgccatgtagccaccacctcggttaagaaacagaacacttccagcatccccgaacccacccctgccccatactctttcataacgcaaactcacttcttccccgtcagtggaaccaccacgctgacttttgtgctaattattttgttgcttttctttatagttttaccatccattatgcagtaataaacaatataattcagttgtgtttgttgttgaaatttttataagtggattcacagatattattttcagtttgctcctttcattccatattttgcttgtgagactcattcataatattttgtgtagcttcactttaattttctttgctatgtgggattccatcttatggatatcctgtttcttataagtatgaaataaaaatatagctggaggttgcagtgagctgagatcacacaattgcactccagcctgggcaataaaagcaagggcaaaactctgtctcaaaaaaaaaaaaaaaaaaaaaaaaaaaaaaggtaacactaattgaacacgttctatgtggtaggtcctgttatataaatactttctcatgtattaaataattgaatgctcatataatgttataatataggtgcctttattattctcattttacatatgaggaaacaaagccacatagagaagaaataatgtgtccaggggttggaatagactgtttaatctggatactgactctagaacccacaatgttcattaatctcattcatagtctcaagttttcccactagttacatgattttatcatttaactctaggtggttcttaaaggattaaatggatattcaggctcttctgtaaaatctagcctttttgttttaattccagtaggtaagaataccttccttcaggtcatcactttgcacttggcaattgccacggctctttgtacttttgctcttggagtcttttcaaaatactgccaccaaaattgttgccctggttttaccattcaggcttgattcaaattgccatagttttgctgttcatagcctcttcctaggcattcatttcctaattcaagcattctgcttgtttgttgattactgatttctcattatgctttttcttcttcattccttttctcctcctcattcatagtcatttctgtgcttataaatctctctctctctctctgattgtatacattttttggtgccattgacctgtcctatgaaagtcttcttccttccaaaatcttataagtatagatcaggatagagccctagagaagggtttagaaagaatgaggaatgacaactttagagtacttagtttgatatgttttaagtctgaattttattgattcagcaaattccacaaatatatacagaattatttgctaactatggatttcatgtagctgatttatttttttaaaccgtacctcctcccctgccccccaagagtgagataagcactattgttaccatttgcaggtggaggaatcagtacttaaggaaattaaacagcttggccatgttcaaagaggttatgtgtagcaaagctgggcttccaacttaggtcttctgactctcatcccagtgctttctctttgatcacagcaacctctctgaaattaataggaaggagaattaattatttgtttgttccttctttaattttgttccttccttttttaaaaccaacgaacattcattgagcatttaccttatgccagccacagcactaaactctggaaattgcaaattggataacatgtgggtcttccctggacaagctcatggttgaggagatgtgtaaaccagtgtaatcttgcatgcccagtgctattattggaggtgtggctagctgttcaggaagcattctagagattggagatggtttggagatgtttcttagggaaagagttggccacatacacttgctagaattagttttcccatattaaaaatagttttaaaaatatttcctagcatttacctttctgtttgtgaatgtgcactggcctctgagagccaccactgtttctctgtcctctggcttgccacctgcttttgtcaatacttcccaactgctttcaaaccaagggcacctatagaaaaccccttaaagatgactcctatttcctggcttctctgtccaggtacctgctgttctttcctgctaagaacattcacctacaaagccatcttctctgtcaatccacattgtgttcccattaaagtctgaattgatacgtttctaggcaccttttctctttggatgcatttgactaaatcctaataattacttcttcccctcagacctatactttccaccattatagatcagaattttcttattgtcacataatgttcaaatgttgcctttagaccagtgttgcaactatttaatatgactcttgtaacctgtagtggtttatattagacaaaatgtatttattgtaatattttaaaatcacttataccctatgttaatttttttacagcagttttaggttcataacaaaattaaaaggaagttacagaagagttcccaaaccctcctgtccccacatatactcccctgttatcaatatctcccactggagtggtgcatttgttacaattgataaacctacatcaacacgtcataatcacccaaaatccatagtttatattagggctcactcttggttgttgggtaatttaataatgacttgtatccaccattgcagtatcatacagactaatttcattgccctaataatcctatgtggtgttgctgtttattccttccctccactctgacccctggcaaccactaatctttttattgtctccatagttttgccttttccagaatgtcacatagttggaatcataaagaatttggccttttcagattcatttctttaacttagtattatgcatttaaggttcctccatgtcttttcatgacctgatagctcatttcattttagtgttgaataatattccattgtctggatataccacagttttattttccattcctctatggaaggtcatcttggttgcttccaagttatggcaactatgaataaagctgctaggatatgccacagttttattttccattcctctacggaaggacatcttggttacttccaagttatagcaattatgaataaagctgctataaacatctgtatgtaggtttttggatgggcgtaagttttcagcttctttcagtaaataccaaataccaaggggtgtgattgctggatggtatggtaagagtatgtttagttttgtaataaattgccaaactctcttctagaatggctgtaccattttgtattctcaccagcaatagaggtcctgttgccagcatttggtcttgtcagtgttccagattttggccattctaataaatgtgtagtggtattttatgtttgttttaatttgcatttctctggtgtctgacgtggagcatcttttcatgtgtgtatctgccatctgtatcatctttggtgatgtgtctgtaaaagtgattggcccatttttttaagtcagcttatttgttttcttattgttgttttaagagttctttgtatactttatataacaatcctttatcagatatgtgttttacaaatattttctcccagtttgtgccctgtcttctcattctgtttgtattatctttcatagagtagcagtttttaatccagtgtatccattatttttttcatggatcttgtctttggcgttatatctaaaacatcactgccatctagatgtttttcctatgttatcttctaggagtttttaaattttgtgttcctgcaatgtttcataaacaatttcaaatactcctgatctagatttgagctctcttctgccacatgctgtcagtgtgaccttgggcacggcactcagccacctggattctcagcctttccatcagagatgtaagggtggcacctacctcgtgcacgaaatgttgtgggtgaaaatgctgatatgcaatgcacctgtgaggctttgatttcttttgcccccctctgcctagaacattttctgttcacggtaatgaggaaattgattcctgtgctgcacttttagcttttgagggcattgcatctgcccctctctgtctccactgccactcctcccatggtttgaccaccactatttctcgtcagaatactgcagcagcctcgcaaataagtccttctactctcatctcagtgtcctccaatctatcctggaaactgccacaaagtgatcttcctaaaacaaaaataggatcctgctttctaggcagaagccaaacttgttaacttggtttacaagacactttgcaacctggctgctgctcatctctccttctcttactgcattcagctgctaacccacgaagctgcctgtggcctctcagcctccagaggatggaggatggggatgatagctcccctgcctgcatcgtttccctcaattcatccactttttgcccagtcagatagtactcaccttttaggttttcattaggatgttaaatttcctccaggaaaccttacctgatactctttagtctatagtctgggtcaggcaccctctctcctgtctaactccctgcccccaactgcccaagcacccttcactctcccattgtaataatgatgacatgaaactgcaattgcctgtgtgtagctgtctgggttgtttattgatatgttctaagtgcccatcccagggtctggcacctggctctccctaaacgttgatgggtgaaccactgaatgagtatgagactacccgtgtcatagacaaggagagctggtttatttaccaccagtcatatatttacattgtggtcatggtgtctactaagttataattaaccttcttgtcttttattttcttaacagacaaagatgtgagcagcggaagttataacctttcctctgcaacgacgggcagctactacagttgtgtcagccagatcaccataggtgagcactagtgtcattttgatttttttaaaaaaatattattgcctggaaaagctggaggtcaagggggtggctggggaggagagggaagaaaatataaatgcataggcatttattttcagaatcagagcaattgcttgtggactcacttttctggatcgccctcttgtggatttctactgcttttgcatggaattagatggaggaaatgtccagggagataagaagtcatctcttgttcccagatcttcatcatttgctttaacccttttgtttttgtagcacctgtactattatgcacttgatagtacaatcgaattactttttaaagatttatattaatctatttttaaaagaaataagtgcaaattgaaaatgcatggtaaaagtctactctttgctgtttggagaacatgctaagcaagtgttagagtgctgctgaaaatcaaagtgagactttctccttgttatgctcactcaaccttaaacactggttactttggtcgaaagtagaagagtgagccgtgccatttttcttttggttgaatccttcttctcctttccatttcctttcaaaactttcttgattctagaatgttgggcagtgacttagagatcagaaaagaaaagtgaagataatagctacagcttatgcttattttgcacttattgcctgccagctgctcttgactccctgcatacattattttacttaatcagaactctatgagcaagttactgttatttctccattttacagatgaggaaacttgcgctttgccacccagctagaaattaattacccaagatttcattctaggtctgtttgacactaaatcctatatactcttaaacactatgccgtggcttctcaaactccagcaatgtggatgcctatgcaaagcattaatgatgaacctctaaaatggatttaaattatttttattatgaggttacttaagtatgttcaaacatagaactatatatagacaccttgcattccaaatagccattaaaattgattttgcagatgagatttaaaattcagtaacccaaataaaaatacaaatttaccacactaattgaatatgatgtatgttgttattttgctgaaatgcagtcactgcttgtaatgcaatggggtactggctgcagtgatgttggttctttgagtgcagtacagttttactgctaggtacttcatgatgactctgcattgctgccacctttctgagttcaaccccctgtgaaatcaatgttaatgctcactgatgtgaggttattgaatcttcatttgccatgaatgtacctcggcatatccatctctccccttttctcattcattgtaccaattggtgccaaacctgatagaaacacaaaagtaaacccaggcattaaaattaagtggcaggacttggttcagaatatgcttgtattaatttttaaatgattaacttttaaatgagaaacaaagatagtttaaaaattctcgtggagagctcgcagaccctggtttgaaaacactgagcaacctaaaatgccattcccagagacatcagtgagacattaaacattagctaagtagtaggaggacatttagggttcacagtaggggggtgacaagacaaatgtatggatgagagaagattattatggtggtgaacaggatggagttcctatgggagaatctggtgttgtaacagagttagtggctgtgactgtggtcttgacatgagacagaaatcaactagggaggtgggatgaagaggcgggtctagggggagagggatggaattgctggcaggactagtcattggctggatatggggatagtaagtgttccctgagattttgcatcagggtgacagagtctgagctgttcccaggaatgtggaagtcaggaagagggaggatgtgatggtgataggttagatgtgttgatttgatgtgcccgtgagacttctcacgtcagaatgcctcacggaaaattagaaatatggagaacatgttcaggagatgaagatattggcactatctgcacagagagttcagtcaaatctttggaagaagatgagataataagagtgagaattagtacgttgtgtgtgtttggaggaccaaggaccaatctttgggggaagcacggtgagggtagaaataatgacagaggtaggagaaccaagcaagcacctttcttggaaagcccagagaatttctaggacagactgaggaggttgaaaattaaagtctgccttggtgacatcgtgagagccacgtgagtgggtggcgggatgggagccacgttgcagagctctgaaaagggagaggagggctgtgagtagagaattctcttttaaggtgcttttttcaatgaaaatggaggggtagatagtgtgaggatgattcagtagctaacaaacactttggggagctttctttttgccaagcactgtgttctaactactttttctgtatttactcatttaatcctcaaaaagatcctgaggtaaacagtgatattttcccccattttataaatgaggagatggagtccctgagagggtaaagaattgcctgaggacatatgagagtaagagctgcaatttgagcccaggtcattgggctcctattggatgacactcttgttacctgacatcttgcagacttgggccaagtggccttccctggtccagtcagctttagctaccatgtcagggtgttgggttgaaatgtatcccccaaaaaggtactttgaagttcgaatccccagtacctgtgattgtgactgtatttggaaatagggtctttgcaggtgtagttaagttaagatgaggtcatctggactagggtgggccctactccaatgtgactagtgtccttataagaagggaagagacacagagaccatacagagagagctgtgtgatggcagaggcagagatatgagtgatgcatctccaagccaaggaataccctgggatttctggcaacaccagaagcctggagagaggcatggaacagattctcctctagagccttcagagatagcacagccctgctgacaccttattttggactcgcagcccccagaaccatgagagaataaatttctgttgttttaagccacccagtttgtggtactttgtcacagcagccctagaaaactaacctctgaaggggaggtaggtatgacagatgcttaatcttcccagaaggtgccagtgtaacaagaaggctcttgaatactgcttcagttccctggctcaaattggctgaaacgataggaaatttattatttcacataacagggacaccagaggcaggcccgtctttaggatgggttgattaggctgctcagtgacattgtgaaaggccttctcccctgtgccttcctctctcaatttatcttcatggtggcagccacatggctgcagggtttcaggaattgcattcagacctgacaatgatcacagggtaagaagttttggtgccctcctcaggccattgctctaggagctgagaaactttcccctgcagctccttgacagactcctcctatctcactaggcaggtctgcgtcccaagaccccatccttgagccaatcattgacaagggagatggcattatctttggccctatcaggcccacctgaggcttttggacagggatgaggatgggaaggagccttgtgtcctgggtcacaaggctgtgtggggtgggacagattcccaaatgaagtcgtggctctgttgggagggaggaggggaatgattctgcataggcaatgggcaatatccactgctcacagtctgtccagtgcaaagcacttttgcaatatttatagtaagaacaaaaatactttacaaccttagactcaaagcactagagggaggacagatctatggatcatccaagaggtgttttctaaaatctcctttgttttctttcatttcttgtacttcagtccttctcttacagaatagtcatctcacacagaagtgtcacatttgtgagggtgttccatttaggaaaatagcatatgtgtggatttcctagtaatgtggttcctagatgaacctatgtcttgcccaaagcaggggggtcaaaaaatccagggaacagaagaaagactcctcctaaaactattctgtttatccatgagatactcgattagctccttattttctagataaattcccattttagccatgtatgagagatttaagaaccacatagttaacattattttttctcaagacagcttacaatttggggtgttctttctctttcttcacaattttgggttcagtgggaattgagacccctattcctgcctccctccccaagaggggacatgatggtgggtgagggaggatgagcaggctatcaatgctgccaatgtgacatttctattctttgccccgtgggtatcagctgttctcttggatggttgtctcttcaaaatactgtggcttcattgttgcttttaaattgagactcatctatttatattccatcataattatgcagatcttgtcatagctcgtttatatcaataatgcagattaaaatatttgctaatgaactccattttcagagtaaatgatgtagaaatttcctaaacaaaaaagacttgttagctgtgtgaactatattttttcaaaattaaatatatgctataaattagctataattttatataagaaatgctaaaacctgaaatcttagagagtccagagttccttagagactttttatttttttggaaaaagaacatatatttatttattaagtgtttatgatgaatcagatactatatatttatatatttaaccgcatatatttaaggtgcacaacataatgtcttggtatacatagtgaaatgattactacagtcaagcaacttgacatgaccatcatatcacagttaccttttttaacatgtgtgtggtaagagcacctaaaatctactgttagcaaatttccagttcacacaagatgaagttattaactctagttctcatgctgtatattaaatctctagacttattcatattacataacttaattacaacttggtacttttttacttacgtcttctgatcctccttgctcctggtaatcaccggtccactctttgtttatatatatctaaatctttatatatatataatctctaaatctttatatatatatctaaatctttatatatatctaaatctttatgtatatataatttgtatatatataaaatctttataatttaatgtaaattaatccttataatttatatatatataaaagtttatatatgtaaaaattttgtgtataagtgagatcataaacttattttctgttatttcacttagcataatattccccaggtttgtccaaattcatgttaccttccccatgtctcagaccctatccctagaaagcctccctcccctgaactcctgaggagcagtttctgatctactttaaaatggtttctttcatcttgctttgtactgtagttagttgtagtttatgggaaagaacatagattttggagtcaaatctgtgctgaagttctgcctctggaacttgatgtaggccaggttgagatccagttttctcatctgtaaaactgaaattgtgatagtccccttgtacaattgctgtgaggattctagatcagttctgcagtttctatcttatagtaggccttaagtaattttttttattatgaacacaggtcttatttcctttattgattggactctgagctccttgaaggcagagtgggcacttagcatgcgcttaataaacataagttgattaagtgaacaagagccatcaagagggatgatgcctgcctgtttattatgaacatgcattcttagctcaaatggtatttggtttgactaacagctaagattttggggaagtatgaaaataagcacactatatggctttgattgctgccactcacctaatatgtttatctcaccaggttatgacgttgcggggcctgtggcaattgggcttacccactggaaaaatccatacgtacaaggcagaccaaccctcccatcagatctgcctctcttcgtctccaaagatgcaggcatccctgtgtaccaccgatccttcacccgcaagactgaccaggccacacctttgtcctgtccagcctcactgtctatcactccagtgccttcttacagcagtagcagccaggaaaccctgagtcaagacacaacaggtaagtgttggcttcctgttggagattcgggactgggtgtgtataagattccttcatgcatttgcctgctgaataaattgcatttgtatttctgcttgtgtgatatgatggaccccaacaatacctctatgttcatactggcttttctttttaatgagatggggtctcactttgttgtccaggctggtatcgaactcctggcctcaagcaatccctcccacctcagcctcctgagtagctgggactacaggcacgcacaccaccatgcccagctctcactggcctttaatagctttgctataccagaaggaaggttgaatgtgtatagaaatatttgacctaagtgctagttctgtttggtaaaatgttatctagaaatcaactctgaatcagaatttcaagatatgtcatatggctttaatttattgaatgctctatttagtgacaagatatctatcttggactaaactcgtgtattcaaaaaagtcatcaaaaagtcatctttgaataccgtagttaatatcaattcatgttgctccaccaaattgatctatttcaggggtctgcaaactactgccaaatctggctggctacctgtttttgtacagcccgagaactaagaatagtttttacatttttaaatggttggaaaaaaagtttttaaacaatattttgatacacatgaaagttacataaaattcacatttcagtatttatatataaggttttcctgggacacagccacactgattcatttctgtattgtctatggctgttttcacataacagtggcagagttgagtaattgtactcttgcaaacgctgaaatatttattatctggccctttatagaaaatgtttgctgactgctgatctatgtgatccttggaagtcatgagttaaacagtcagggcaagaagaatgcttacaacatcctgccttaaaatttatcgcttatatcacactggaaatagctgcagaaatggccatgcaaggatggccagttaattgtttttatttctaaaatctgagttggaggtttaaattatgcaaaatctatcctgccatgttttccttctatagatacagcacttagaggtaatggtttagtcagccaaatccaatgtgtaattctggttctggaaataaatctttgaatgttgggataccacgacactcaacaatttatagatgctgccacctagaggtaagatgctgaggttgcagaagttccagattatcaaaactaatctttaaagcagtagattgcagacttcactaaaggttaagaatcagcactgcacttgttaaaaatgaagattcctgggtcttaccccaggggatgctgtgtccatggcacagggtgagcttcagcaatctgcatttggcaggcttttccttcctgggattttgattcctgcggttcacaaacatacctggaggaccccctccaaaggctctttagtcaaatggctgaattgaaatatcagggattggtaatgaagagcactggggaacatttgcataccatcagttctgcacatggcaaaagtaatcatctttctgactgtccttgttgaaggtcagtttgacagcggaaagaaatcactatctggggcttgaaaatgtttctgtatagtaagtttaaaattttctgggttttgcttttattgtgaaggaaagctgactcttcttgctttagtttaataaaatcagaagttaatatataaagtacctcctttatatattaacccagggtagctgaaagcttatggcattttttggcaaagaggggtgtgaaatggcagctgccagattaacattttatcatggttcccttagttgactttttttctcctccatagagcactatactcagagtcaatctgatttttggataaaggtttctgtgtttaacttggaggttttcacaaacaaaagcctataattctcttcattcctggggactttccattagcaataaaatattgatttgttccaagcaactgcttattattattcttactattagtatcctaacaaagtaagcctggacatccaaatatatactacacaagcatgtgataatcattttatcatagaaagttatagatgctggtatagtttttgtaagtctcgacaatgactatgtgtaggccaattattacatttatttgattttttagaacaaattgttgattttaatatgtatttttgtgtgaaagcttatagtttcctttctttttatttgtgttttaaagaataaagttaatttcattttgtttaaaaaatacagttttattactcatttatacttaattttttgcttcttttgctagttaaaagaaaactctgaggtgagataagtcagttcagctatactaggataccctacaaattccagactttgccagacatcccttcacaattctaagctatctctcttctctataaacttttggactgatatagaggagctgacaagttttaggcacaatataactatacaattattcatggattgtgagaattttcttatgtttaagaatttcccaaacacattataaaatcatttttccattttataaatcccaccattctgcagtcctagaaagaatgcttaatagcagaacactaactaaatgactagagcttcttgagctctcattttatttagctgtgttcgctattgtcaccatcctattccatcattctttcccttcattgtgtgactaacttctatagtagattctcttgtattagactttacttaaccctgcttgtcaccttgtgcagtgaacaacttgtgaaactgcatagtggtcctgaatgtagttcttccttatgacagaaaaactgtttccagtgtccagcttggtccatccatctatccatccatccactcacccattcatccatccaatatacactaagttaccactccatgttatgtattgtgataagtccttgggagagaaaattaagtaaggcatcacctctatctcaggagctcagagtctagtggaggaggcagacaagtaaggcaagcattctgattcagtgtggtgttaagatagatgatttcacaagacgtgatcacatatgtttttgttttaaattatttaattaatatattattaaaatactaatagtattaaaatattttaaaatatatatctaaaatattagtacaaatacactgaatgcagaatatattattaaattatttcttcaattaaaagaaggtaaatttgagacaaccataggaggaaagcttggaaatgatctctatctcagatacttttagtaggtttgacacacaatttttaaaaaagtaaatgatgatagtattcaattgatattaaattcattacaaataatttataagctttggtttaagagaaaagtaattagaaactttacacttcaaaaagttgctactagatactggactttgggatatactgtaagaattctggttaaatcaagaaatattttgaggacaaaaataaggcatgaaaggtattttaaaaattaaaatggaaataactccttcttgcttagtaagtgtcatagaaaaagagtaaaactattgtcactttatttccttccaatttttattttaggtttgggagtacacgtgcaggtttgctacatggccaaattgcatttcgcttgggtttgttatacaaattatttaatcacccaggtagtgagcacagtacctcataggtagttttttaatcctcaccctcctcccaacctccaccctcaagtaggccttggtgtctgttgttcccttctgtgtgtccatgttaacatgcaatttttgataaccaagatttgtaacttccatcaccactaccacctccgcctcacaacttctctttctagtcattcctatatccccagctgatcctcaatcactccattcctttctatccaatccccagctgcatactgatgcccccaaagccatattttcatgtctgatttctctgacaagttttacatgtgtatttataagtgcctactggaactttcaacccggatatatcccatactatcaaaacttatatatcccgaatggaacttccttctggtagctctcaaagttgaatttattattctatttaatgctggcatagtctcattgtgttagttggactgccatagcaaatatacaactgggtggcttaaacaacaaacgtttctttctcacagaaaagaaaaaaaagaggctaggaagtccaagattagggcactgaccgatttggcgtctggtgagggctgtcttcatggtttctagctggctggtcttctcactgtaccctcacaggatagaatgagagcgagctggccctctggcttcttattataagggcactaatcccatttatgagggctccaccctcataacctaatcacctcccaaagtccctaccttcaaatgccatcacgctggaattaggattccaacatatgaattttggagagacacaaacattcaattaattgcatcatccacagtcctaatccagtgttttgggttaaccccctcatgcttaaccttctgctggccatcagcctccacagccagctggctaacttattaattatgtctattttagaaatattgctacttcaaagcttcgtctccatccctactgacattatttctgctcaagctctcactatctctccttagactagtgctgctagcagtcttgttacaagtcttcctgaatcttaattcttccatgaccatagtttagctttcccaattcatctctctccctcctttccctcactccccctcactttctgtctctcccttcctctctctccccttctctcttttgctctttctctctccctccctctcccaccttttcttcctctttttccacctcctcctgccctccacttgaaaatctctgttgcttctccataatagaataaagtctaaacacttcatacagggtacaggtacgtaagggccttcctaactaattttaactgactctccagcatgtctcaccgctctgtacagatgtgtcagcatagtacttacacttgattctttactgttccctaaaagctcatgattttgcacatctgtgccatctactttgatacctttccttacattcttctcctagaatattcttattcttcaaactcaattaagagtttgtgaattctttccctttttgcctcagcatattttgttattctttctgtttccactggcaattcttatgcacagatttaattttgctcttattgtactccaatacagttttttcatatggctaccataatagacgtaaataaagttcttgagttaggaattaatgttttgatcatgtacttgttcgctcagtgcagagcttggcatgtaagaagtatgttttctatgaccattgaaactgcatattagacacagttgaagagagaactaggcctggaagatagagctgaagaaattaccccattatcagtacagagatatatgagatacaaaaacaagaaggagaaggttgaaatgtagaaagcagaatgaaaaagttcaacatccatttaatagaaattctgtcctgctttaagataatagaatgtatatatatgaggaatatttaaaaaggcaatgactgaaagtttccccagaattgatgaggagacacaaattctttgatgtaagaaacatgatgagtgccaagtagaataaataaaaatatatccatatgtaaatgtatggtgagtcagcaaaaatcagaaacatcttagaaataacctgagagaaaagacacattacctgcaagtgagaaacaaattgtggatagactttcaagtagtaatgatagaggctggaaaacagcagcttgatatcttcaaagtgctgaaggaaacgaaggtcaattcagaattccagatacagctaagtgatcactggagagggaggtcagcataagaaattatttggaaaaagactgggaaaaatgtattctatgcacacctcctgaaagaatgactaaacaacctagtttagaaaagaagggtcttggctgggcatggtggctcacgcctgtaatcctagcattttgggaggctgaggcaggcagatcacctgaggtcaggagttcaagaccagcctggtcaacatggtgaaaccccatctctactaaaatacaaaaattagctgggcgtggtgtcatgcacctgtaatcctagctctttgggaaattgaggcataagaattgcttgaacccggcaggcggaggctgcagtgagctgagttggtgccgctgcactccagcctgagcaacaaagtgagactctgttattaaaaagaatgatcttgaatctagaagaaacgatgaaataataagaaaaatatgtatataaaaattcaaaagatcccacttagaagaatgatttctcaagcagggatgatgttgtttcacaggggacatttggcaatgtctgcagatatttttggttgacacaacttggcaggaggtatcacaggcatctagtgggtggacaccagggatactgctaaacatcctacatgcacaagacgtggtccctaactcattgtcccatgttcactgtcaattcttaactctccttcctccctgggtgtttcttgtcctgtgtgtagtaccttgcccttgcaatgggtcccctcctttagggcattcccagggctctcgtttctctcctagggctgtgcttggtgaagtatgattagcacctttgatttcccctttctcaggtttctgtgttctttaactctccctaaattgtatctcatgctgcacctaggcctttcttttttgctaataccagtttctcaaccttggtgccgtggacattttgggctgaataattcttagctgtgggggttgttttgtgcattgtaggatgtttagcagcatccctggcctgcacccaacagacgtcagttgtgatatctgaaaaaagttttcagacattgccaaatatatgtttgcaggcgaaatcacccccagttgagaaccactgacttacaccaaagtctgatcctgttctctgaagctctgcttagtggcagaagtctggtaccctaatcattgataatgggttcatgggttttaatgcatttgatcctattttagcaagggccttttgccaaccatactctaatcaaaaacatggggggaatttttttccaaagaggaagatttttttcccccttaagactacaggtaacacctttgacacttgccctgcctgcttccctacaccccacctctctgtgaaattatgtcatgaatcaaacctcctctgtatgtgttcaagaccattggtaatctccctgcatttccataagcaggaatcattgagaactcttccctttgccttgtgccctccttctccggcctcaccatcttccctttagtggtcttctggtgggattgtgtttctaaaaaagaacactaggctgggtgtggtggctcacgcctgtaatcccagtactttgggaggccaaggtgggtggatcacaaggtcaggagttcgagatcaccttggccaagatggtgaaaccctgtctctactaaaaatacaaaaattagctgggtgtggtggcatgtgcctgtagtcccagctacctgggaggctgaggcaggagaatcacttgaacccgggaggtgaaggttgcagtgattcgagattgcaccactgcactccagcctgggtgacaagagcataactctgtcttaaaagcaaacaaacaaacaatactaatgaattccaaacattccttatggactttacaaatatgttcctcatcaggaaaggagttgagaaatgactatcttctgttccagatcacttcccaggagtctagcttttacctgtgcacctaaggtctgagcagagcatggtgtcttatattgacggggaagatgttcactcacctttcctggtgaccttaccgagcttactggtactccatatatgcaagctctgaaatcttaggtgcccaatgttatgttgctatgaatttgcctggggtatagaataccttagaagaggtgcccatttgatagcatgaattcaatgtcttataacaaattgtgaccagatactttcagaacggatgccaaaggaaacaggtttgatttcagagatagagtgccgcagacagtgaccctgcaacctgaacaactgatgtgaccacgagatgcagagtaattggacctcaccaggagactcatgtgctcccttgtagagaagctgagagacactccttgtcctgtccctgcttgcacaccatgtgcccagccagcctgagcctttctgctagagtgttagttcagctaaatctgtggcacagagtaatggaagatcagctaccctctacaaaaaccagggcaatataaattagaaagtctctaaaccattatatttaaagtgggtttcttctagagaacatagagttgggtctagtgtttttatccattctgacaatttcttttaattgatgtcgttagaccattcacaagtaaagtgatgattggcatagttgaattagtatctgccatgtttgtaaccattttctattattacatttgttcaccatttctttttttttctactttttctcttgccttttctgattttaattgagcattgtatatgatttttaaaaaatgggatgtcatcttcctacttccctttctgcttttaaaaatttcccttttgtcaaaatagccctgaaggggtatttagattttaatcgtatgttatggaataaattttccggtttggtttatatggagtgtgaatatgagggttaacttacttaagttaggatattgtaacaagtagggcatttttatgcattttggaaggtgatttgtggtttcctaagatgctggctgggtagaagatgtcacagtggaagggaaggcaaatttgagttgaggctattcaggtgagggaccagtgttccaagcagcaggacagtgtgcaaaggctgattccagaggagctgggggtaaatgtctccttcacattgaagttgagtgctgaatgtgttatcaatagaggtattgccgcacagggtggctgggttctctggggctgttactctggtcttccatggtgcattccatgtgttaatggacatttgtgagcaagcccagaattttaacctccatgtatactacttctctgtgaaaaactaagttgggaaccgcctggactttagaactaagaggatcattggaaatgttcattttgacaagagcattggctaagagaaatacattgctgagctttcttcaaatttcctattttcctaaacttgcctatattgttcttttcagaattcaagaacatttcttgttgtttaattatcgattccagcggagtcctgttcattcttcctccatgtgtgctggttatttagttttagaagactgaaaacaccaatgaatcagggaatgattggtggcaaatgatgaagacaaagtcaatttaatgatgtagctatgaagttacttggggatttctaatataagagactgaagaacttgaattaaagctgtgttgaatgtgatttgcaaataattatatatttcagccataaaatcagatggctttaagatgctccaataaagtcatccattcttctagtcatctaaactcttgctactcaaagtgtggtccacaagagctaagagagcctgagtttggatttaaaaatatcgtccaaaagggataatgcgagggacattttagagatagcttcaatagcacttcgtaattaatgggatgtgatatatgactgaatggatgtcccgtatattttcaataaggttaaaatatgatactgaagcttcatagtttaggccagtgattctcaaactttagtgtcaatataagcccagtggacttcttgttaaactgcagatcctcatccagtaggtctgggcaaggggtagtgagattctgcatttctttttttttttcttttttctttttctttttctttttagacagtctcactccatcatccaggctgtagtgcagtggcatgatcttggctcactgcaacttctgcctcctggattcaagcacttgtgcctcagcgtcccaagtagctggaataacaggcatgcaccaacacacctggctaatttttttttttttttttgtatttttagtagagacagggtttcgtcatgttggccaggctagtcttgaactcctgacctcaagttatccacctgcctcggcttctcaaagtgctaggattacatgcgtgagccaccacacctggcctagattctgcatttctaacaagcttccaagtgatgcccatgctgtcagtcatggagcttgggattcagtacaagacacaggtaacaaaaaatattataccaaataatttgtggtcactaacaggcagatgctttgaaggataggaataatcctcttcttaaagattcttggcaatactgtttttatcaaaacacgcctctgagttcccaaaacagtactctataaagaaaattttctttaccaccagttataagtgggaagtctgcttatgccctgttacaggaatattatttgtctgtgatatataagtgtccaaacgtttccacagacattgttttgatattaaaaaccaaatgaaaatcccagcaaccatggtactgactcaagagggagcttagctgtcttagttctggttctctgggaaatagattttgagccagagatgtgcatgcaagaagtttcctggggagagcagttgggatccgtatgtatggtgtgtgtgtgtggtagatggagggaagcataaccaggcagagggaagatatgagctgtgatgatgcacaaacatggcctcagccctcacagagggatacctggagctgggacagtccttcaacattgtcccacaacaaagctattgtaacctgccatcattgcctggatgcaagctgccacgaggaatgaatgtgaccctggggaattctctttgcgggcagtttcccaagaaagattcagccgagagccatcagcagctgggggtgtaccatggggcccacagcatccatgacatcagctgatggaagtgaagtgtttagaaagatctacgcgggaaagcaagtgggagagaatggtggaattctcagtttgaccgcaagcatggaaaatctctgctgacctaagaaaaaggcccagaatctgagcaggttttccaacccccaggaactgctgagtatctggattctggttcagtttgtagttctctccagcaaagaggcacctaacagattgggaaacaccctctggtcactattcctcctggttatgtgggtatatattttggaaactatgcagtttttgtctttttcaggcaaataaggatacaactgatttgtggttgtaattggagaatggaagagttggctcactttccttgtcccaggtcgtgtaactcatattcatttattcagcagctatttattgagtgcctactttgtgcccagtactacattaggtgctgggtgtactggagtgacccaagcagacaaggctcctttcttatggaatggcagtgggataggctagtagaagagagagatatgaaataatcacccaaataaggaaatttcattagctcagtgaaggcaaaggacactattagggggtgtataaagagggcatttaatttggattttgaagatggggaaagactgaggatgtggtagtaatttgagagagatctcaaggatgtgttggagctggtgaagatatagttggaatgtggaataggagacaaagacctggcttgtcttctcagctttgtgacttatcatgttaccttcacactaaagacttaacttctttgagcctcaatttcttcatctgtaaaatggtgcagttataagactcaaatgagataaaataggcaaagtgtttttcaaatcctaaaatgttagcgaaagctacttttcctattaattattctagcccatggattccttctctcccttctcttaactgtctccttctcatatttcctgtgctgggcttcgatgctgaggtttagttaatagtaaaatgctatgtagttaccttcttttagcctatggctttcaacatttttgaacaatacctaaagtaagaaatatttatgtattgtgacctactactactactacttctccatcccttccttcctccctctccctcttacacacacacaaacctgaaaaaaaatttaaggaaataattcttattatttattacatactctgatatttttcattccattccattctgttccccaaaaacaacaagtcaagatccattaaacagatgtcactgcttacgaaggaattgcaactcataatttgaacaagattgatttagataatataatacctgaaatcctttggaaaccttataggggtcacgcaatctttttttaatgtgtgtgtgtgtgaggtctgttgtacaaggaaattatttctctttgagactgattattaatgttcatttcaaaacatctatggtgcctatggcaatgagactgtctcccagagttggcaaagatgtgatccctcaaaagggctctgtattccctgcagttctgacatctctggagtcagtgaagaactgtggcaaaggatctatatccattaaccattattatgataatactgaataacaaacaaccccaaaacctcagtggcatacaggattaagcatttactcgtttatctagaatcagctgggacttggccagagctctgctgatcttggctgggctcactcagtatcttggagttggctggctcttggctgatctaggttgtcctcaatgggagcaattgggatgactcagctgtgctccataagtctctcctcttccagtaggcacaggaatgtgcttcctggcacattctcatgacagtggtggaagtgccagagaaggggccagtccaatcatgcaagcactccaagcttctgatggcagcgtatttgctaatagttcatcagccaaagccatgccacatggatgagcccaaaattaaagatggggcagaatgtcttattctcagtggaacaacactgctaagccacatgatgaaaggctgtggaattagggaactgtgaataattggggccaaagacacaatctatcacagcctctctatctcacgtacatgatctctttcaccccaaagaggccattttatttttcaagtgggctcagatctgagtcctttaggctgggccaggaatatttatctgaaagagacatcatgctgtcctcctcataccctgggtagattgtcctccttttacctattccaacctgaagttgcctataaaggccctctcttcctcagtgtacatcactttaggaaggcagacacttgcaggcagcctgctctgccaatatctgagatgtgcctgggcctacctgcaccctagctacaggcaaaatttatattaagccataacccacactgtatttttttctcccatttttcagttcttcctaggaaaagatttatagcattatactatagtagttttagttgattcatgaaattagatatctaaatgagagattttaatgcgtaaagctatcaatagtacagtacatgtcaaaaatagccttttgttccgacttttcccctaatatttagctctgaatttctggttgtctattggacgtgttcccacatgttcccacaagcacctgtccaagccacttctgtgttccctgtttcaacaagctgcgtcatcatccatcctgcttctgaaacacagagcaaagagtcatctttaaccaaccactcatttgcagtcatcatccctcagttcttttgctcttgtgaataatggctggcaccattattcaaccagacactgaaattgttctttgttcatttactgggccaggttctatgctaagaactggggatgtgagggtgactaagacatgactctctcttttagaagctcagtatctagcaaaggaggtgaactgtgaacacataactcacaatgtaatgtgcacctatgaacacagtgttctcttccacccttcccacatctaattgctcatcaattcttgctcattctacctcacaaatgtccctcaagtctatgctcttttctttagtcctgtggtcattgccatggatcaagtctttctactttcttgccggggcaggggtagtagttcctggctggccttcctatcttcactcttttcccagtctattccaacccccacccccaccacgtgttgtcattgtctaaaacactgatctgaatctgtgattccttggcttataagccatcatggacttggtggtcctcagtaagtaaaacatagaattaccatatgacccaactattccactctgggtatatatccaaaagaattgaaaacaggtattcaaacaaacatttgtaacaaatgttcatagcagcactagtcacaatagccaaaaggtaaaaacagcccaaatgtccatccatggatgaatggataaacaaaatgtggtataatatattatacaatggtatattattcagctgtagaaggaattaagtactgatacatgctacaacatggatgaaccttggaaacatagtgctaagtgaaataagccaggcacaaaataccacatcttgtatgattccatttatatgaaatagagtagtcaaatccatagagacagaaagcagatttgtgattgccaggggaggggagaatgaggaatgactgcttaatgtgtacagggtttccttttgtggtgatgaaaatgttttggaactgggtagtgatgatggttgtacattatgaatgtactgaatgtcactaatggtaaatttgatgttatgtgcattttatcacaataaaataaatgtgtgtccttctatacctgcaaaacccatcaatgatctctggcaacctgtagtttgagtccagatttcatagtgtggggttcatgcccctcatggtctaacctggcctatctttttagctctgttgctctcaagcatcctgcattccagctcttcctggtgtactgttaacatttttgcttatgctcatccctcacctggagtgccttgtttcccttctttcttgcttggtgaaatccaaagtctggttcagatgccgattcctcctcaagggcttcctcataccccatgcttcttcctgtgtgatcccatagcaccttattcagatgattagccaccatgaatcatagttgagtgtgtatctctgccttgccagatggtgagcaccatgcagggagaatgtctgatttgaatttggatccctctagccttgtgtttgatgcataatagttgatcaatatttattgaattaaatgacttgattatttaagtctaggttctatcctgaagctaatgctgtgtccctaatccttaatttaaaatgctgtaatgatcactatgcctgtactttgtttacgatcattttttattatcttcatctaattaccattaattgtcttagctaatagcaaatttcttcctagtttgcttgcacctgcttaacccaaatatttgttttcttggcagtttgagcactcacttagctttcacctgttttcaagtttgctaacagtgcagctgatgttctctcctctccctttgctatccaaagtcccttgaaaccttaacatttaaccactttctctgtgctagggggaatgtgacagaggacgagtcttccactgttttgttagaggatctttgggtcttaggatgacatagtttgcaaagagattctgaatagttatcactaggagaaataaagtagttttccttctttaatctcaagtcagggagtcttcacatgtcattattttaattacgtttattattttttcaagtgtcagatacatttttcttattaattaaaatgcaattacaaaattctaaaagttatattgaagtgcttttaaatgctttatattatccatctatactgctggtgtcgaattacaacatagtaagggctgttaaaatgtttttgaaagctttaaaagggccaatatttcaatattgtgtgtcctgaaatgccactttactttggagccttcctacataataagcagattagtgaagattcaggaagaaattgaagataccattttaaatgtatgtatagaacattatttatttttatttttgaggtgtagtcttgctctgttgcccaggctggagtgcagtggtatgatctcggctcactgcaacctctgcctcccagattcaagtgattctcctgcctcagcctcctgagtagctgagactacaggtgcccaccaccacgtctggctaatttttgtatttttagtagagatggggtttctctatgttggccaggctggcttcgaactcctgaccttgtgattcacccaccttggcctcctaaagtgctgggattacaggcatgagccactgcgcccggcctcaacttgtttttttcacttgttttctctgactctttggtggatatttcaactcttgggagatctcctccttgaagctcttcagacgtgggttctgtcccacttctctgttctacttcttcttttccttgcctaatccttcttcatgtcacttaaatgtcagtgcgtctcaaatgcttgtccttggctcttctttcttgctctctctgcttttcctggtcttgtccaccactacccctatttcacctgcaatctgtattctgtacttttatctcagacctccaacctgaacttctctgacttccttctagacatttccatctgggatgtcctgcaggcactctgactcagattagccaaaaatcgtcctgttgcctcagtttttttttatctgtcccttctggaaaatgtggaactgttagtctgacggtttttaaaatctgtcccttctgcattttccagaagggacagataaaaattggtgaatgtacccagttgcccaagacagaatcataggctgtcctctgccctgctcctcacatccaggtggtaagcctgttgagtctatctccttctatccccaatctccctgccttggttcaaagccttgtcacctttgactggaccattactttgtcacttgtcttccttggagtccctctcattttccatatggctgtcgacttaatctctctaaagcgcaaatctggtatgtcacttccttttgtaaaactttttagttgttcccaattgtgttgtctagagaacaaagtttattctctgtaatgcttcatgattgggcctctgcccaatattatcttcgattactcctacatactcttctttttctcttgtaactacaaaggtgggcctgattgtgaaggccttggataccgtataccatgaacttgactttatggagggtggagccactgctgactttgcattcaaggagagtgaatttcaatattggaaaaaacctttgaaggccactgagtccacttgctccgttagttcctgataagtggatgtccagtctctgaacacagactgccaacctgcctactgttctttgttcttctttataaaatgggaacagtaccaactttcacacaaacatattgtaaagtctaaagtgccgttaaatttatcaagggcaattgtctcacctttcttttggattcctttgcttttatggtttctgtaggagtttttcctcctctgtgggtcttcatccatctatgtctattttactcttttcgcccatctgctatgatcaatttgtatgtattgttcactccttcaaggactgtggattttaatataaagaaataaaattcaacactcaaaacttcctttaaaaagaaaaggcagaaaagatcgtgaggatcacaccatacccagaaatgtcctaaacaggctctttggatcagagactggcaattgagggccatgtgacaggttcttccttcttcagcctccagcttgtctaactgcaatgctctgattcagaattgcactgctcatggaaagattttggccccagagtcacctgcccgcggtcttggctcattcagaattagagtaaggctgacattgaactgtacttgaatgtgagttgttagtgcagatggtggccttggtgtgtaatgcttgccatgtgactggtgcctgggagcagatgggcaccttctttctgtaccagatgacactccaatcttcctcaaaggcacaagtgcaagtggagtgaggcagtctggagccagcaaagcaaggggaggcataaccttagagctagtcaccagcattctgtcctctctggagagaattgctggggatgtatccttaggtgcaagtctgggatttggttcctgagaggatttgttattctcttaaatgttgtgatcccataatgacagctgacacttatatcactctaaagaattgacagtgtgctttcccacacatgaccctgtttgatgttcatattgaccctgtaaaggagttatattaatttcttaggaccgccacaacagaggaccacaagctggatgacctaaaacaacagaaatctattccttcacagttctgaaggccagaagtttgaaataaaaatgtcaacaggctctgctctctctgaagattctgagggagaatcctttctttcctgttccagcttctggtgactcctggaattctttggtttgtgacaacattactcaagtttctacctctgtctacacatggccttctctttgtgtctgtcttccctttttctgtctcttatacaaacacctgtcattggacttaaaatccatcctaattcaggatgctcgagatccttaatcttaactatatgtgcaaagacccttgttcaaaataaagtcactttctgagggtccagatgggcatatattttgggaggcactatttaactcaccacacttggtattagtatcctcatttgaggatatggaaacctagagatggtaggtgttttacacagagacacattggaccatggactctaactcaagtttttggatgccaaatcttacatgctttctgctgcatcatattagtctctcaatatgtgggtgtttttgtgtggtgagaatgttgctttcctttcgtgtatttatttagcacctactacatgcctgatgaagtatatatatttttgttcaactaagaacagactgaaaaattggagctttcttatcttcgtggctgagactagaatcaggagaaagcaagtcaatgatgaattcttatcttggctcagtcatttctttctccttgttcttctctttcccacatcttcagggatatcaagagggactgggcacagcttagcttctagggttatgtggtcagtgtgattgagctaacttggtaagacccgagaaccctcccacatgcctgctaaatgggagctatgctgcttccttcattccctggacagaagatacctacatgccaagcctaaagcttgaaaggaagtgtaaatatgaactactttttcagtttcttagcacatttcttaggagggccaggtgaaactgtgctagaggtcaaggttgtgatgtaccattttgagcccgtttccccatggaacacccagtgtctattgctaacctgttctctgggcctcccctgctggggtagtttcccatgctcccaaggttttcctttcttcttccccccatataaagactttatagtctcatgtgctactttgtcaaacatttgtttctttttatttatgtaaacattttatgaaatatttcagacatgtgaaagggcataaaaacaatatgacaagaacacacatacccagcactcacctgcagacatcagacatgactgatagctttgaggcccccatgtacccctctcctccctgtcagaggtaactgttgttctgaatttggagtttgccattcccacgcatttctttacaatcttacttcattgcctctattcttgtgtgacacagtcttgatcctaaaggaacactggacttcagcaggctttaaagaaggtcatttggagtgacgtttaggagagattttgggggctaatattcattgaatacctactatgtattgccttctgtgttttccatgagctttcactgacagcagccctctctgtttggagtcattatccttgtttgacagccaagaaaatagaaagcagagatggtgaataacctccccaaagtctaacagctgatacctatttgactccatcatgtgtttctcctcaaattgaagctcctttctctctcagtgagaggtgaagagggcgctggtcaggagtgctggatgtgtgatttagactgagtgtccaacctctctgatctttcctgttctctaaaatgaggagtattgagtcaatccctaagacttttcctgttttaaaattctatgcatctcttagaaatctgtggatataaatgctttatgctgtggagtctcatttcaggcccttcccctctagtcttgtaaaacgttcaggtagatatcactttatcactcagaacttcgttttggttacacccatgtcagtttgcagctcctcttctgttctgcaggcttggaggaagatttctatacatcgtcatgggccagcccaagaggtgagaaatgccaaatactcaagctggcttgcccatcttctccttgccatctgtaccttttgggcttgtttggatagcgaagtcaaggtggagaaactcatcaaggtggaacatggtcctttctgggtaaagagagactcaggctaagtttgaagtaggcactctcctgcttctcatcctatgtatcttaactttctcccttcttctttctctgggagagttctttctcttgcccctttggctaccagggacttccttaatgcctctagccattaacggcaaagcctatctttgtggtgccttttgctccatccctccttttctttttcttttgttccaactcctaactgtatttcccccactccaagcaaaaccccaattctccctagatcctcagtggtggaggaaggaaggcatctgtctagaaggcatgaagaagttttggctgcttaagccccaggcctatgtctcatctcttggggtgatttccagtggatccttagcattaggggtccccaagaccacttccagatttggtgatttgctaggaagactcacaaggctcagcacatactcacagctaagatttatcataacaaaagaatacaaaatgaaatcagccaagtttccagaaaaggtggatggggcaaattctggaggaaatcaggaacaaacttttagaagttttcccagagtggaatcacacaggatgagcttaattccttcagcatgaattgtgacaacatgtgtgaagtgtcttccagtgaagctccttaaagacttagcacccagggattttattggccgtgtaggtacctctgcttagcatgtgcaaaaatcccaggaaagtgggtgttcaacataaaccacattgcctgcacaaactgtttaggcacagtgagccactcttatcagttagagatttgagaaaagccttctgaaatctaagttcttagatgccagtcatgtgccaaccctgcaagcaagacttcctaaggaaagcaatctcaggcctgttatgttgacttttctgcacaattctagtcttctttccctacctaggtcctagtttctcagctgttctctgaatctctccccacccacctgtacccatggctccaaagctgcccttctttctctgcttctgggtttttcctttccagagctcatagtggaagaagctatgacctctcctgccctccagtgtacttgcctctccttcactgagcacacagaggctttattattaatcactagggggaaaggggctgtaacaaaagtagtagaaaccttacaaagttcccttaattgtgagcatatcctgcttccatttcttactcttcaaaagtcatttttataaggtgctggaggctttccagatgattctaaatgctgggattttcaggacccagtaactaacccaccagagtttggaacagttgagaggcaggtgcagatgctcagcatatggaggtgaaaataccaccttttttcctgatagagctgtggggagaatgtggcccgaattggataatgcttccctctgcgctttccatccaggccccagaactagccacctcaggcacaatttgagccaatagagcaaccactgatatgtgctggtcccagtggagagggaagaaaggagaccagaatctctagtgcttttgacttttgactagactaccttttcccagttgaaaagcaaggctcccctggcaagggcaggtgaccagaaggatcagttattctagaaagttctccacatgaaaacccagagacatgagaacaagtgcttacttccctggggacaagtgcacatcttcaacactagatgatactgtagtcaaaggaaagtgcaagtgggctctctgcttggctggcggaggtctcaggcccttccagaacctgctcaatttctctctggatcaggccttagaaaaacaagaagttctaatattgacatgtcctgaacacatactctgtgccatgcctcgtctgtggacatgcattaatccactagaatgcagtttccatgtgggcagggagttcttcctgtttagttcgctgctgagtcctcagcactaaaacagtgcccagaacatagtaggcgcctagtggatgtttgttgaatgaatcatttattccactgagtcttcagaacagccttttgaagtactagatgagatattggtttcattttacagatgagaaatctaagtcagtgagattaaataatttgcccaagacatggaacctagtaaatgggtgagcagggatttgaaccagcgttgtctggttatagtcataggggtcttcaaaaaccatgcctgcttggcttgcctttagaattctggatatggcatactctactggcagggagtttgtcttgtgtaatttttgctcagtgtcagcattggagcctagtttctctggactccatatggccacaagggtctgtacccactgaacagaaacccacaggcgtggcagcactatcaccccaggagccagtgggtactgcccctgcaacagatttgagtaacagattttttcttattttgaagcagttgagccataacagaaacaaagtaggcatatttccaccaagcaaaaaggttaaatggacacatatttcacactaaagatcaagtactccagagggtatttgatactcaggtaagcagaatctctagtgcttttgactagcccttgctgtgctagcccagctctccagctccttacacatcattccccttctccatccacagtcacctgtttacaaatggctgactttcaaatgggcagctcttgccagagcctccttatctcccccagtcctgctgcaggagcagctggtgtctggtatactgctcccttttcagttcacataggcttgggtgttttatttcgggtcatgtgggctttcatgaattgaccttgaattttgccaccacttataaccccatttctcccattcatctatcaatccttctttattgaggacatgttgggttttgtgttatgatgtcctggcactataaggtgaatatacttactcccatagtcacatggagagcttgttttctgggttttaaacaaaaggcctaggaaccactttttttttttaaatttttaaatcaaagaccaactgttatgtatctcaagttcctttaggatttgattcttgcctttgtttcctgttggggtagagaatagcaggatgtagtacttgggtgagcactatgtcaagactcatatttttccattgctacaattccacaagatctcaagtagtgtgtatctaggcattctgcaaataagagcttgaatatcttctgctattgtcatttttaaatgcaatttcattacattaataacattcagcttctatcataaaaatggttctcaaaggcagctaatatacagtgcaatatggcattattggatatgaactacttagatttgtctaagattctctgacaaagcagttctggaactggaacttaactatctaggaacccagctcaagatcctgactccctccacaagaagtttactttgctctgccgtcaggacatcagtaatgtgtttatgcctcagagttctaagaaaactcaagattttgctaaatgtttatttcatctcaggacatttctttttataagtaaataaagcaatttgacatttttactcactttaattatccttctcagaacactttctccttgcaaactctaatagcaacaataacagtataatcaagcaagcaataccattaacacatataatcagcaatggttgctgaagttacctcttgcattctccaataagagtgtgagcaacggtatttgtttttactttatacataatcagcacatgtttgattaaatgatgctccaaggaagcatataaacaaaaatggtcacctggtaattaccttagctgtccatggctgttaggagacttttcccacagtttaaatgcagcctgcagttaagtatattaggtctccttagaggctgacttgatcatggtgtataatctttaaatgttctgtttaattcattgtgctgatattttgttgagatttttgcatgtgcattcatcaggaatattggcctgcaatattcttttcttgtagtgtcctcatctggctttggtattagggtaatgctggcctcataaaatgagtttggaattgtttcttcttcaatttttttgaaagggtttaagagggattggttttaatcctttaaatgtttggtagactttaccagtggagacatcagctcctgggcttttatttgttggaaggtttcgattgctgattcaatctcctttcttgttattcttctgttccgagattctatttcttcatgattcagtcttggtagtttgtatgtttctgggaacttatttctgttagattattggtgtataattatctgtactctcttatgaccctttgtatttctgtggtcttggtcctgatactttctcattcatttataattctatttgagtattctcttgttttccaagcctagctaatgatttgtcagttctgtttatattttctttctttctttttttttttttttttgagacagggttctactctgtcacccaggttggagtgcagtggcatgatcagtagctcatgcagcctcagccttccaggcttaaacaatcctcccactgcagcctcctgagtagctgggaccatagacataggctactatgcctggctaatatttttaattttgttttttgtagagacaaggtcttgccaggctggctttgaactcctgggctcaagcgatctttccgccttagcctcccagaatgctaggaattcagatgtgagctaccacgcctggcctttgtttatgttttcaaaaaaaaaaaaaagagttcttagattgatcttttctatttttaaatttaattaattagattttataaataataattatgtatatttatggggtacaatgtgatgttttgatatatgaatacattgtagaaggattaaatcaagctaatagatatattattcacctcaactagttttttttttttgtggtcagaacatttcaagtctattttagcagttttgaaatatacaatgtgtttttattaactccggtcaccatgctatataataaatctccaaaatttattcatcctatctaattgaaattttgtaccctttgactaatatctccctttaccctatccccagtctctggtagtcaccattttactccctgtttctatgagattgactttgtaaatattctacatataagtaagatcatgcagtatttgcctttctgtgcttggcttattttacctagcattctgtcctccaggttcatccaggttgttgcaaatgatagaattccttttctttttaaagctatatagtattctgttgtctgtgctcttatttctttatgctttgatcttagttctgtccttttgctgactttgggcttagtcttctttttctagttccttgaggtataaagttagcgtctttatttgagatctttctcttctttcttaatgtaggcatttattgctataaacatccctcttagaactcctttgctgcatcctgtgagttttggtatgttgtgtttccatttacatttgtctcaagatatttttatatttcccttttgatttcttctttgacccattggttttcaggagtgtgttgtttactttccccatatttgtgaatttttcaaatttcatctcgttattgatttctatttttatactattgtggtataaaagatactagttatgatttcaatatttttaaattttttaagacttactttatggcctaatatgtgatctatcctgaagaatgttccatctgcacctaaaagaattctgctgctgttggatggaagtctgtttgatctatagtgttgttcaagtttgctcttttcttattgattttctggcagaataaactgtttattattaaaaatggggtgttgaagtcttctactagtgttgtgtttctctctatttcacccttcatttctgttactattgctttatatatttaggtgctaagcactgggtacatatatatttacaattgttgtatcttcttgatgaattgacctctttatcatcatataatcatcttatttgtctcttgtgacagtttgtgatttagtctatattctgaacactcctgttctcttttggttaccgtttgtatggaatatctttttccattttttatactttcagcttatgtgtgtccttaaagctaaagtgagtctcttgtaggcagcatataggtatatttttttctttttaaatttattcagccactgtatgtctttttattgaagaatttaatccatttacacttaaagtaattattgataggtaaggacttactactgccattttgtaattgttttctgactgttttgtagtttctttgttccattcttcctttcttaactgtgtttctttgtgatttgatttttgattttttagtggtatactttgattccttttttcatgtgtgtagtagatacacaaaatattttttcatcttttcctttaaaggaagtactttatggcttctctttggcatatgcaaattgctagcatctcatttgtgtattttggggccattattaagtcaaataagggttacctgaacacaagcactgtgataccatgatggttaatctgataatttagacagctactaagtgactaatgggcaggtggtgtatacagtagtatgaatatactggataaagggatgattcattttcccaggtgtgacaaagtgtaacagcacaagattttatcatacattcagaatggcatgcaatttaaaacctatgaattgtttatttctggaatttttcatttaataattttggaccatattagaccatggattactgaaactttggaaagcaaaaccatggagaagggaagccactacagttataaaagtgtattttaagctgataacaactttactttgaccacgtacaaaaactttacactttccccacctcacatggaggctgggtccgtgggtgatggactagaaactagttctgagggagcagtactggaagctgagtggggagctagtggggcaagcctggaccctggatctagtggaacatggggcttcatcagtcagcctgtctctgtgggtgccgccctggtcccttgggccatgggggctgacctggcactggggcagttctgaagcctggggttgagggagttggcctgaagcctagggctctggagctggtttggcactggcataggcctggggcatgagttcatgaaaacaagcttggatcctggggccataggggctggcctggtgccaggtttcactggtgctagggtccgtagccaagttgggtgcccacttcctttttcttccaccattcagagggtatctccacactgtgctggctgggcttgggagaaggatgacatggataatgtgaaactgtccttcttactctttctaaatgtatcttctttctgtgctacacctagatgctataatctctcacctggattccttgactcttgtgaaggtatttttatgtgtgaataattgtttaaattgatgtttctttggggggaccagcactggagtgtcctattctgccatctgatgaacatcattctaccatactgtgtttaaatttatatgccaacatatttggctctttatttggtttctgagtgcctctgggtcaagaactttttcttatttctctattttcagtgtcttgcacagtgcccctacatagtaattcttcagtgtatttgttgaatttaattgctttacttggtttattatggctttgagtcgtaaatgccatacttttatgttaatggttttactagtatttctgaacaacataaaatttgatatttttgtgaaacttaaaatggtataattttcctgaatttttatatttcccatagtgagttgatatcacagttagacctttcagggagtgtgggtgtagaattaagtttggcatcacaattctgtttttataaaaatctcaaagacatgttgactctcttagattcaagtaattagcagatattaaaaatgtcatgtcatgaatctctgtgcctgtgatagcatctaacatgtgaaaaaccatctgttcaggtagctatttacaatgtgtcaagtagcttctctgttgaaaccaggaaacaaccaaaatacaatgacaaaaaacctattttaaaaaaacctattcacacaatcatttttcagcctaaaaatccatattttgtcacaggaggatttttgaaatcattttttggattatattcatttaattacaaaattattcatcctcactttcctcatcaaggatgaaagaatatcctgagaggtatgcatttgtaattttaatataaaggaaagatgctagtgatctagctggctcctgaaattgatccgaactcttaataaataatgcagaaaggtaaataggatatcatgaaggtaatagaaatgtaattgttactttggtgttatgatctaataaggagagtttatagtgtaggcatcccactggggtggaaagaggataccctggggtttcagtcttgcctctacccttaccagttgttgtccatgggcttgtctcatagactctgatcctagtttttctatttgtgaaatgaggctgttataaatttgcatagtattattatgatgcttaaaaaggatgtacaaggtaaaggattattacagaagggcaggtcatctggattatagattattcctaggaaataattaagtcagttctttggacatagttaagtgcagatgcattctagaatgatgtattttcactcattatatctaatatgacctctacttctcccaccccatagctgtgtggtagagctgcattaagttgcttgaacttaaaacacttgccacaagccgtctcttatggaagccttggagccagaggcaaaattataatagttggttataagatatttgcttaacacatatttccagtagtaaaataaactgaattttattgagtactatttgatatactttcacataatttttttcttagccaaattttctaaagttttaggagttaccatgtattgattccaagtaattcagcatagagattgttcattatgcagacagcaataaaacacgttatattacttttagaatttataaaaatgtttgtctctggttgaatattgcgatagctatgtaacaccgtgttttccctttttgctttggctaccaggacactcaaaactcaactttcagttatagaatgttttagccagtgtcagtgtttcttagagggctgtccttagactactgccatcagaatcaccgggagtgcttgttcatgtggactcgggttcttaccccagatgtactaatgtagaatttttctattatgggcctgaaaatctgcattttagacagaacactgtttattcttagacactaaagtttgaaaattactggcctaagagttcagattctttcttcttcctcccattacatggattttgattttctgtttctattttagtagctatattggctatcttatcctaaaccatccatagcctttttagaagtatgaaggacagaatagctgaaaacgtagaagttcaatgggaaaaggttatagaaaccaagatagagtcaaactaaagagaatagtttctgccagtttccttgttttctctttccttaggtgaaagtaagggacacaaacacctcttgcattgaaggaggtgagaaggaggacttgtagctgggacctctgagctcatatttaaccccctgtttctggtagaattgatgatgcagatatcaaaaggccctggagatccatagatttcagaattaacagagtggaagaggccttggcttgaattttttttttttttttttttgcattacttatctgtatctactttgattgtaggatcccttcttataaaggggcagggactctgttttatacctcttagaaatagcacagtgtttagcacttagaacacagttgggaagatgaaaggatggaaaaatggaaggtaaattagtggagctggtgggcattgagaatccgaatttaacctattggtttaagttactgagaattcttgtatcattgaatatgccgatctttaaaaatacacattttagagccaaatctaagttatttaaaaatatgatcaaatactcttcatatcactgtcatattgaagaggaacgggttaaattggaactaccaatttttggccagtgaaccgacctgctgcaggcaggtatgggcaggaaagaagggtttgatgggggccatggcagacctgttcatcagagctcatctagggtcagatcagtgggtggacaggaaagctagaccatggaaatgacaggcagaaccaactctactgactcttgcatagaccagacggatctgtcatgatcttaactgagctggagatagctgagctgtcaggtgtcagggtagctgattaagttaacaagccaaaatgaaagcaacagtcaagcctttaactacttactgcaatagtgtaagcaagcagctaagctagagaaagcaccaccccccaccccagttccattttcccccatggactggtatacttgtccagggtcaggtttatcagtgcagacatgagggctatctcactgctgatggaaccctgaataaaagatttctgcagttttatggacccaggggctaggagaagggagaggggaagggataggagtgaaaagctactgagtactgagtcagaatggagaaaagcatcttcaaagttttccctacccctgacaaggaggtcttgttagaaggacctgaggaaggcctgggtgaccagtggccatagataaatcggcttctgcatgaagatgcctaggctaggaatgcgggtatacgtgagtgtggtcaggcaggagggcctgagtccttgactgcagctccctgcagagactgccatacatcatttgtgcaccaagtctggtgtggggagggcagcattccctgtgagttcttctaggcaaagcctttgtcattgcctatgatcacacatgaaaaatcacacataggattttggtaggagccagactcctcaagaccttcagtgggaaactgactcttcctggagggccagaactgagctggactatatcagggctaagcaggtatgtcagcaattaaagaatatttagtagggcctgtcatagatatagtaggtggtgaactcaaggccactattattaccaccataagaacattcagtttggtactagttgaggaagcatgacatgggactatagctctacagctgtcttcagatatgtgaaggaatgatcatgtgcttgtatgagttatgcaatatgtatttgttgatgagtttagaagatcgaaagggcgtttagtgtggattcaaattatagaattacgcataggcccttgtttccctacctcttttctttaaatgcctctactgcttctactcctctgcctggcacattacatcccctcaccgccaaatctctgcttgtccttcaaaacccaacacagacgacatgtgattcccagggagtccatgtggcatagtggagtgagcatggggcaggaaaacctcaaccctgggatgtcaaatcctcagggagtcctgatacttcccgaaatatgtgaccagggcagatgctgctaattgattgcaaaattttccctttggagcctgacgcagctgcagatcccaaggcagctcatcagtaaactactaccaaccgattaagtagatacaaaggaaaaatcatattgccatggtgaccttcagcctttcattcttcctggtcagaagaaacctcccaacccccttgaattctttttaaaaatgggttttcattaattattgagtagatagaaattatttatgatgtgtaaggaagatgtaaaaaatcacacgatctcaaacacttgtatatgcactatccagtttaaacaaaagaacgtgaatgttgcctttgaagtctcctgtttcctgtcccaattctatcctcttctttctctcctgttagaggtatccagtctcctaaatttgaggtggtcttagcccatttaggctactataacaaaatatcataaactgaccagcttatgaacagtagaaatttatttacttctcacagttttagaggctgagaagtccatgatcaaggtaccagcagattaagtgtctggtgaatgcctgcttcctcattcacagatggtatttttcagggtgtcctcacatggtagatgggacaaggaaactggggcctctttgataaaggcactaatgccagtcatgaaggctgagccccatctccaaatgccttgccttcaaataccatcaccttagggtttatgttctgtcttatttcttcaattagactacaagctccataagggactcagagtgtcctagatatttgtgttctcagagagccaggcattacagattgaacctggtcattgcacaagaatatttattgaatgaaataattaaagagggtcaattttgcattatcctttcccccacaccccacatttagacacattccctcagtggttaactgaacacctgccaggaatgttgcaagaggaattcctacattgggaaggatcttgtactacataagtttcttccaactccaacatttctcaatctctgggaaaatctctgacctatccagaaaagttccctttagtatacagagggaactgcctttaagtcttgaccaaccagcttccctggatcccttggttctttgctttaaaaaacccaactttattgtgaaatataacatatatgcagacaagtgcataaaacataaatgtacactataatgaatgattacgtagcaaccaagtaaattttaaaataacctctattgtgatgccaggttgaagttcagccctttagaaattcagccccttgatatgatctagaaagggttggaaaactattacctgtgtgctaaatatggcccacttcctggttttgtaaataaaactttattggaacgtaaccatgctcatttgttttcatattgtctatggctactttcatgctacaatggcagagttgagtagttgcatcagaggtcaaatgacctgcaaaggaaatatttactgtctggcctttttatataaaaagtttgccaagtcctcttatgtaaaaatttgccaactcctgttctaaagtctgtcttgaaaaaaatataaccgtctgtgcatcctatgtggttttaccctctcagtaaaacaagtctagtgaatctctggttgagaaaaggaagttaaataattataacattcaaaaatattaaactctatggtctattttaatgaaatcttaagaatagccagaaactaaacccaaagcaaattatctctaaatcttgacctccttaagggtctgctgaattgcatcaacaacattttatagctagaagactggagcaacccaatatttttttaggtcatggggtgtaactaattgaatagaaaaagagatcaacatcttgagattatatccctggagaaggcaacacctgaaacagattgagttttttgattaacttattccttagtgagtagaggttaaacatccaagtagatgaaaagacctagaaggaaatagagtagagcacacatcattctttagttgacatttggaaagtgcatttgcacagttacccttcccccacaacatatgcgaatgcacttgcacacacgtgaacacacacagacacaagaaatgatgcttagtcaaagacaaacaaaaacgagatggccactgtccacgtgttttctactatgaacacagaaacttttggctttaattctttcctataatcatcagtcactttccctatagcaaaaccgattttgtttccttggacaatcttgtaaatgaatatgaaaagtaggaaataacttaactgcctacaggggaaatgcatttgaagacaaatgattgtataaagttcattttttaagaatcaagtgtaatttcttatgcaaactgtatttcagtctaaagatctctaatgctcataaggaagtaccttttgttgtacttctttgaggcaaagagagaattgtaatctgagaaagagatacaccattcaaagcctgattacactgcctccttaaatcttctctccccaactgaaaaataattatatataaaaacatcttgcttttcaaatttgcatttaaagaacgcttgtttggggctgtccgagtgaaaaactgagcacactaaaatagcagtctttcaaacatacagaaaattattttttcatccccaaaggaggttgctagaagtgtacctccttgaaaatacgttcgttaaaaatgacatatagagcatagactcacagagtttgatatcagaaggagaccatagacccaaactgagaccctctcgtctaagagaaaaccaatccatggttgtgaatgcatatttctttttttattagttgctttgcattctttattaaagcagaatataaacgatacctgatagtgggacaagtggttggggaacagtgttatcaaacagatctgggctggattcctacatctacgctttataattgtgtgaccttgggaatatgtctgtctctcagaatctcaagtatctcacttgaataatgaaaacgatatggatctttaccattatgttgtttgaagtattaaatgaaataatacctataaaaagtcttaacgtgtagcctggaatgtagtaaaaggatgagaaataagagcacagcattcatgtgcttattagcagccactccaaggctagaagtgatgccactaacacctagtccagattttttcttcctattacgattatgagttcttagagataagagctttttatttgtatgtttgttttttaagaaaaaaaaaacctagtggctttcccccagctgttgtgtttttaagtacctatgatttcttttttttaatttgcagtctgtactaatgtgtactgcggccactgatttttcttaccagttgatgaatataggcagcactgagaaaaaaagctaacaggctgaatgatgataatagttaatacttagtgagtgcttactatatgccaagcactgttcattcatgaatttgtttctttaatcctcagaaaaccctataaggtagcagtgttattatccccgctacacaggaggggaaatggaagcactgagaggtaaagtaacctgtccagttttcatagccaggaatgaggagacccaggagtccaggccaggcagtctggcttcacgcttgctctgggcttgtcctatgtcctggatgcccaggttccccagcctgatctgggcagtgactggattgcttgctggagccgaggctctcagaaccacctcgcgagggctctttgtagctctccagaccgaccccagagcttggataagttaatggtttggttcataaccaccccagggattcagcatcagaaatgacccaggaccccacctgcctaagatgagagggttgcatttcagtttactcttgtttctagacctttcattgggggatacaggggcaagggctctagtataattgctagaatctgttgagatctcttttgtggaccattgtttgagcaagagtaacttttaatgtgaaggggctgcttgaatttgccataaaaataatggtagcctttaagagctagtctaaggattaattgacttaagatttttcttgtttaaatctccttcacctttagggcccacctgctggtcacttgaccttttgccttaatttattttgtaaatactaagccaacaagaggaaaagtgaataccttttacaaagacttccttctcttttgcattgggagtaatttttccttgtagattaactttggatgactggctggggatgagaggatgatgtgcaagagtgacagaatatgaggaaatatgcaggtagtggtatttacagtgactctttagggacattgcttaccaaatgtcatttagttggcacaatgggtattcagtccagttttagagttataaggcaccctgaagacaatttagtcttcatttttacagctaaggaagatgaagaaaagcaatttagtgacagagccaggactagaaaccagatatcctgattttttttttttttttttgagacagagtctcactttgtcacccaggctggagtgcagtggcgtgatctcgactcactgcaacctcagcctcctgggttcaagcaattcttgtgcctcagcctcccaagtagctgggattacaggtatacaccaccaagtccagctaatttttgtatctttttttttttttttttttttttttttttagtagagatggggttttgccatgtgggccgggctggtctcgagctccggacctcaggtgatctgcctgccttggcctcccaaagtgctgggattacaggcatgagccaccatgcccagcccacgtatcctgatttctatgccttttcattttttatactgtttgctgcttgggtagagtaaaaagccatgagaaggaggcagcccttagaaactccccttggctgggagacacagcccgaagattcagtttgcctaagcttgggttcttttatagattccattagttaaaaccctttttctaagttttatatgggaaaaggaaaaagttgtatataaaatatggcaataaatagtgccattattttgtaatattattgcttggaattcagatttataaatttaatcttcatctttccactctcacaaaataaattttagcatttataaagactattttacaaccttttactcatattaatattttctattcaacaattgtgatttgctgtcttaatattcactttgttcaggaatgttcttacttatcatcacattgtgagagtctctcacaagctaaatggtcttggtactttcttgtctttagaagataatgcttacaattttttttttttttttttgtgacggagtctgtctctgtcacccaggctggagtgtagtggcgtgatctcggctcactgcaagctccgcctcccgggttcacaccattctcctgcctcagcctcccgagtagctgggactacaggcacccgccaccatgcccggctaattttttgcatttttagtagagatggggtttcaccgtattagccaggatggtctcgatctcctgacctcgtgatccgcctgcctcggcctcccaaagtgctgggattacaggtgtaagccactgcacccggccgataatgcttaaaatttttgaaacatcattttcctttctctttgccataggaagagtttcagtggacttaaataccttttgtgacaagtgggggtgaatgtatgcttgaattttttctgggatcttaaggttcttgaaggcaatgtgaggtagtaaggtagacaagtataatttaattaactatataaaaactaaatattatggcagcctagttccagaacatttagtgttgcattctgctaccaggaagatgcaaaacgcaagaatcctagtcagataaagtccagcaaagacacctcccataagcctcctttctggatctggtttagggctgtctcttgctgctggaggttgtatggggtggtagaaagaacactagacagaagatccaaagatctgggttcctgggatctccacctgtgctttgggacagttaatgttacctctcttgcccaaagttctctcatttgtaaattcgggttacggcttagaccagtggttgtcagcacagctatgtatcctaatcagttggagatttcccaatatttcatcacaaagttttaaaacgcacagaaatgttgagagaattttgcagtgaacacccgccacgtagattctaccattagcatcgtattaaagttatttttatcacataccaatttatatatccattagttgggaagcttcactaacacactcatatctgttgtagaatatatacctttggggtattaggcagggtgaagaagggagatttctctttctcctttatatacttgtgtttgagatttttgtttaacagtgagcatgtattactactactatgaccaaaagaaaaaaaaaacaaaaaacaaaaaaacagaaaaacccataacaaaacaaatacacatatgcatatattcctgggccaccaacccccagagagtgtgatgcagtagatctgaggtggggcttagtattttttgaagtgtagccaggattgagaacacaggactatgcctctctgaagtgccactggggtttcatagtcacagagtttatgaaatctctttagtgacaacctgaagctcccctctgtagtagattgattccagcttcttctagtttgattccagattcttcctggttcatactgggcattcagccgaatgctgctattggcataacaatgagcttgcagccagcaaaggaactgtgtaggtggagacaacctcagaagcatgagatgcagctttgcttcttggcaatttcttttttattcttattgattctaccatggcagctgtttcagacctctattattgagcccttaaaaccacctcttttatctctttataaataatctgtttgcctcaattgacaccattgccagccactgttgtaggtggctccccagtcacactgtgtggctctctccaggagaaccttctctacccctcatatgtaggttggtatgccagactccccaaacatgctagcctttcctcctttaaagtatttttctcagacatgtagttgccattgcttgtctgttctgtcatctccaccatgctgtcccattcatctttgtacccccagttggtggcacatagtaggtgcttgccatgtaggctgtagatattgtccctttatatcagtgatcaatgtcattgcgaattgtttggtatccttgatagggctttcatgctccaaaaatactttgtatttcccagccattaaaaaattaatatttatttcattaatgttacaaattcaaaaacctagtttttcttaaagcttttaacttacaaactttattttccaattttcaatttgttttttttaagacagggtattaccctgtcatccaggctggagtgcagtgacacaatcatagctcactgcagcctcgaaatcctggactaatgcaatcctcttgccttagcctcccccgagtagcagaagcatgataccacgcctagctaattttaaaatttcttagacagatgaggtctcactaatgcaggaaaacccccaaattgaggcttagctcaggaggtttcttagcttcactcaggaaagaattcaagagcaagctgacagtgaaagaaagcaagtttattagagcaacggggtgcagcaaaatggctgctccacagacagagcagggctatctcatagacagagtagcagccaatagcactcgtggattgctggctagctgtatttatacctacttttaatcatatgctaattaagggacaggttcttcatgaactttctggtctgggaaaggattaggtagctcccagaactgtataaggtaacttctgggtcattgccttggcatttgtaaactgtcatggcactggtgggaatgtcttaaatacattataattagtgtataatgagcaatgagggcaactagaggttgcctttgttgccatcctggttttggcccatttctttgctacatcctgttttgatcaatagagtcctgactgagggtcggaacacaagtactgctgatctcctacctcatccctatgttgcccaggctggtcttgaactcctggcttcaagcaatcctctcaccttggcctcccaaaacgctgggattacaggtgtgagcctctgtgcccagccgcaatttaaaatttttaggtgttaatagtcacaaggaatctgttggtcattgtttggcttcatttatttaataaaattatcctaattattttaaggcattaataattttaatattctgtcttttaaacttcatttgcctgcctagcaaacaaaatctaattctcataaatctagtaaattaaatatatgaacacagtgaaacttagattctcttaaacattccgattttgtaacaaatttagcaaaattctgtcatagcttttaacttgaactcacaagtctcagctactcaatcactcaatttacattagtcacaatgctcatttattagatactctaatgtgccaaactctcttaaatattataaacacttttaatatcagacattaaaatattgataagaaagattttatttataacagtattggagcgctccctggctcagtagacatttactcactgcagtgggagcatttccactatcaaccacagagctgttttgctggttcttgaggttagaggcttcaggtatccaggcagatttttcttacaactacaagcaatgcatagacccctcttccttacatgctgtatcagtgaggtttccatatatgcctgtgcccatagaatggtcttatagtccccctgctttggattctggttataccttgtctagtctgatttaagtctgtaatcatccacccagcttgcttccctactagattggatttaattaatctatttactgcttgattgtattctgtttctgttttttggccacaacatttaaataatgtcttactgtattgcgtatttctatagctctggagaaatggcctttagttctaatgacagttaataactgttttgctacatagggctcctttcattatcccctgccatggatgcatgttttgaagactaataaaaaagacagcatttaattaatgatgtttaatttgtgatcactttcttctggttaaccaaagacaaattcaactgtctatcagagcttcttatcagcatgagataatcagtactacaaatgggttgatataattccagtcaaaaggaaataactggtttctgtttgtgtgcagcttgatcagaggcaaatacataatttttgtgagtctcattggcaatctggaaactgttcatcagcttttcatcacttcctttgtggacatcagattcagaaccacaacttaatcttatcattagtctgtcttctctcctttctcaaaagctgggtcatcccttctcagtatctcctggggacctttcttattcattgcctttacttcctacatctctgatctccactcttcactatttctgtgacccatatgcatctcacatctttccgatgttaaagaaactcatgcctgactttgtttctccctcttacaatcatctaatctctatccttccaatgaccatacaagtttttgaatgtggcccatagaaagaacctattctttctctccttacgttttacttctgtacttccttcctacttggccctatctaaggtcacctgattatggttaaaaaccatggattcctcttggcatttcctagtctgctctcattattttgggtctacttatttggcttctgcatcattgcatttatctgcctctcttctttcccctctgccagtccttagtcactttctctaccttctttttttcatggaggcataatgaagagcataggttttagagtcaggcagacatagggttgaatctctgctttttcgtcaccagttgtgtgaccttgggcaatgctgaactttgcccagcttcagtttccttatctggaacatggggataataataccttacttgtaagttgctgtaaggattaaaagaacaatcagtgtgtagatatggtaactgatattttatagacttccttccctttgtagtttgtaatactaagggtattatccaaagtgtactgaggctttctctttcccacgaagcagtcagctttcattctgtatattaactccaaaatttgtatcaagctcacatatttcccaacttccagacacatatttctaccaggtgctaattttcttcacttggatgcttcattaatccaaaactcaacataattcaagcaatactcagcctgtgattactttcattgttaacagaatctgaatcctcacagtggctccgaggttggaggcttcttcctcccttccttccttccttctctcttctatctacccaacaactgtgtcttgagcactctgttatgggccatccagtgtgctttgcacctacggtacaatgaggagtatgacaaaggcgatctgattgaggaagtgtggtgggtgctgatggtaggaggacagactgcagtgggggcacttcagaggatccccagcagagttgggatgaggtaatggccaagtttacatttcttctcctattcctacccaccccattttcaatagatcttactttcaatttatgaaatatcttgtttccatccttctttttcattcctaccataactatttcattcaatccaagtattccaggtacctcgttttggctggacattcgtaagaccttcccaaatctgtctctagtcaatccatctcctttccaatttgttttctaagaagttgtcaagatcacttcctgaagcacaaatctgatcatttatttcccttgttaaaaatccttatcggttataccagtcaggattcagtataggaaagagaaggcactctaagtatttaatcaggaaaggatttaatgtggggtgtaggtttataaaatctaagggtggctagatgagcaggcacaagaaccatgtgccaaggatctgcaagtctagaggtcaggaatttgcagctttatctgctgttcttggatcgggaaggcaatgatattactagcccacaactgcgtttcttcacttcagaatggtgatgtaccctgggtgttgctgcagaaaaacctcacatctctgtgatcttacttgtcaaagtagaaaactgtccataaagatcaggaagatggtctccctctcatttccaccttccaaatctcagataagggcaactaattagtgggacctaacctaatttgtggaggccatggagtgtagtgtggaagaacacactccatggctccatctagccaggctgtctgctgcctacggcaagtgcaatctaatgttcaaagccgtgtgtggtttttcactgttgtattttgcttaaccccttgtcttccgccatctgtttctgtcactagcagttgctaaacagatacttgttgaatgcattaatgaacgaaggaatccactcctgacccaattctctcttaccttctggccataatgttagtaggaatgcccttcctggcctgtaccaacttcttctacctgccagaatcctcctactctttctctaagtcccaaccaaatcttccctcttgtagggatcttctaactacacccagaacaccccttgtccccttttggaacacagcgactgtttccttcattgatatggtactcttcctctacccttaccttggggtttattcagtatttccttctccttttctccaggcaaagcaactgcagttctcttctaaggatattcattttcctctctcttattgttgtaattgcagttgagagtcaataatttacagatgtagttaaatcttttgtagctgattctctcgtttttactcttgcgtagaaccccacatgcagtttttctcctctgctaacatagttcctgttttagccctagacagaaatacaaaataaatctaaaatgggaggatcctccaaaggaaaaaggaagaattcttgtttataggtttctttttactttttcagtggaattcacgatatgttcccagtgttctggtttgttaggccttgaccagggtaagtgtattacaagaatattccattcccctaacattcatgtttggattcagtgctgtaaaagcagggctatgccgtttgtctgtgtgcttgccccagtggattccttagaacttgactttgttttatgtggggtgtagggaatcctctcactattttttttttcatcttttctttcttcttctattctctctctctctttctctttttaaacaaagccctttgttttctagaggtatctacttcgtaagacaacttaaattagtaaaaaggctacctagtcttcagggaaattcagttttgttgtatttaaatagactttattttctaggtttacagcatagttgagatgaatgtacagagatttcccacacaccctctgcctcccacatatgcatagctcccccaactaccaacatcccccacaaggttagtatatttgttacaaccaatgaacttacatggacacattattatcacccaaagtccatagtttaccttagggctcactcttggtatggtatattctatgggtttggacaaatttataaagacatgcatccaccatcatggtttcatgcagagtagtttcactgccctaaaaatctcctgtgctctgcctgttcatccctccttcctccttccaccttggcaaccattgatatttttactgttttcctagttttgccttttctagactgtcatagagttggaattatatcatatgtagccttctcagattggcttcttacacttagtaatatgcatttaagattccctcatgttcttcatagcttgatagctcattttattttagtgctgaataatattccattgtctggatataccacagttttatttttcattcctctacagaaggacatcttggttgcttccaagttttggcaattatgaataaagcagctatagacattcatgtgcaggtttttacgtggacataagttttcagctcgtttgggaagataccaaggagtatgattgctggatcgtaaggtaagagtatgtttagttttgtaagaaactgctagtatcttccaaagtggctgtaccattttgcattccttccagcaatgcagatttaggaggttcaaaggacttcttaaaaatttataaaaggaaaaattcatccctataaaggtgtagaatgttcagtggatggcctagttttattttaccaaaatatgagcatgtcacagtcctttaaaatgctcattctgctttctcctctcagctcaagtaatagaacttgaaattggttgcagagaaatgaggggaaattctatagcaatggcacactagctaatcactcctgtagcactgatattagagttcattcttaattttctgcttatggatcagcaacactgaaggaatggggaaagcaagctgggtccctgcaattgcctaagtgggctttcttgcttgcttgaatttaacccgaccaaggggagtgtagttctttaggcgctgatggttattgcagttatgagcagaggcatttaatttattccacttctttggatgcactatagctaacttcctgtgaggtaggaaaaggtgggggggaattaaataatcctcaagctggtgtgaagggtcccttgtaagccccagtcttgccctacttcttcaagccacacctgttcttggaatggtacctctgcattggggcagggcactgggccaccaaggaacatcagcagcccattgggatagccccagtctctacactgaaattttgtgctcaggaagacagggtttttttccctccaaatttgaatgctggtgaaatctctccatcaagccccttctgcctggaagaatcaatacctatttctctgccaggcaattccaactagaaagtgtgtttggaatgctttactatccccaaggtgcctcaattacttgggttagcattaaaagccaaggatttcagaggatgaatctttgtgggataaattaatgcctgtggtgttttataatctcaaggagaaggagatgttttagatttaaattttaataaatgagctaattagaaatcagttcagagggatttttaaaattctttgtactgaagaattttttctttttagccaatcatactctaaataattctacagatatacactgaggatccatatgtaccaggcatcacaataagctgagaggttagaaagataggtaaaaacactctcccatccctgaggaaacatatagtctagtaagagagccagacacacagagacatccagtctttttataatcacgtatttgagtgtctccagagagagtttatctcttgggatacaaagatgaataaaactcagggtggggacttctctgaaggaaacacatagtaagacagttatgctactgtgtgatcggtgccaaaacttggagatgggttactccattggggacatgcagatggactgtcaaggaatgctttaaagaggagaaagatgcttgggtggtccttggagaataaataaggattcacaggaggagggcagggaaaagaaagtccaagcattggaaaaagcctgtgccaggaccctgaagttttcaacagcttggtgagttttgcaactctgagtatgaggatgtaagtgaatgagaggatgcaagtggggaatgatggcaagaagaaaggtaggagagcagtcatggggcttgtgacaggtctcatcctgcacacagtaagacgcagaggagagttttctgttggagaaggcacgatggcatcttcatttaaaaatcctcggggttggccagagtgaggctcaaggcagggaggctgcttctgagactatgatattcgctctggggaaaattaatagctagactggggcaatgacagcacagtgaggatagaaagaagaaagaaatgttcaggaggtgatatggacaaatgggttaaagtgaggatggcactgagatttctagctgccctgtaatgtggccaaaacagtcatccatataggattttgataaatgtcattttctttgggccacagagtagatagcgatgcatttacatggaaaaatggaaagtcagaggaagtgcaagcttggaggaaaaaaagcttggatttggtattgggtctagggcatttattcctttaaaaaacaaagctagctgtttcctgctgatgacaaatacattcatatgcctatttggtagatggacatgctgttgctaattgaaaatgctctaattgaaatgaccgttagaaaataaccttcatactttatccctgattgccatggttatttatttattaggcctcctctaaggctaggccaatgagaaaagagggatgatgtggtcaggcttgggaggattttgtgtatctcacctttgagacagctccctgggaggaaagaaaagttgcctagatttctgggctccctgaagtcatttgtgctagttgataattcagggatcaagtcttcccaggatagacttggaccagatcgattttaacataaaataagagaagaaaaatgtgaaatgggatctattgaacttcctgacttattaaataaatgtaatttaacgtttttactcagtaccttagttccagttatagaggtgaggatcagcttgccattcttggtcattcctgtttctgtagggtgcaagagttggcatattatttgtaggttttcctgtcactggatagcattttaatctttgttaatgggtgttacacgttattatgtatctatataaacttgaacgttgttatactaccctgagctccatactaagtgatctccttgatttcattcctactcaagagtcagagatagctggaattttgtacagatgtagagaacatgggaacagttgcataaacattggtcacgctgtaaatattcaagaaatccatcttgagtgtatattgagtgtgtattatgttctggacactttttaggccctgagggctcagtgaggagcacagaagaaacagtccttgcctgagtggagcgtacatgatagtgtagaggatagacattaaacaagcaatcaaatacagtggttacagatagagataaatgtaatgagaaaaaaaaaaagagtaacgagctggaaaatgattgaggtggggagtcagggaagcgtttctgataagaagccattccaggatctaaggaaaaggggttccaagcaaaagaaacagatatgcagaccctgggatgggaatgatcttggtgagttcaagaaacaggaggacagtgattagggcttgtagatgtgatagagctggggagaaatggctaccttcttcccaccactcatggaatgcttattagaggctcaaaaatataatggatgtatgcataccatatataaatatatataccccatctcatgctacatagtcaggcattgttattctcatttcctagatgagggaactgggtctcagagaccaggtctacatagttaggaagtcacagagtgaggcagagtcaaggccttcccactccactctttccacctcatcctaactgcagaccagcaggactgaagcaaggcacttggaatgacataagtgctgagtcactggcctcctaggctgcttgcatggaatacctatcttaacaaaatttgcaatggcttttttggtatattagcaacaataacaattataaagcaatgatgacaacggtgacaatagctatgcctactaccatatgcttttatagtttgtaaagttctttatcatacagcacctcatttgtagctcagaaaagttctcaaagataagcgggacaagttttatgcttctcatttaggttaagagattgcctgaggtgacacagcgcactgagctgggacatggctgttgtgattctaattcagtgctctttacttaaaccatagaaactcctggttgaaggaggagatatatatggttcataagcttgtaggcatgaattcctggaaaacaagtttgtcctttcttcaaagtgctttggactgtaaggaagaggcatgaaagatggattcattctttgtgtacttattgagctcctgttgtgtgtcagacactggaaataacaaagggtcccacttaaataggttaaaaggtactaatttagcacagtgttatctgctatttgtatttgataaaaagacgagaaaaaacactgcggaaacacagaggaagaagcgattaagtaagtcattttggggaatttgaggatggcctcaccgtgaagatggcattgaactgggccttgaaggatgattgatagtggtggggagggattctccagggagagaagcaggaaggctattctaggaaaaaaggattatggcaatagaagaatacactctctgtggggaatagcaacaggtgtaaccagggcatgagataatataggaagtaatggtgggaaattatgctggaaatgtagactgaagtcaggttgcagagggctttgaatgtcaggtgcagaagtgggtgtatttggcctgatcatcccagacctgttacaaggggatggcatgattatatttgttgtattttagaaagaaaattctaatggctaaggtaggtcagattggaaccaaggagagtttagaaaccattataatagtttaaaagaaagaattggttgcagcccctaattctgtgttgagaagaagtttagaggtaacattggtaagacttaagtactgattggatgtggagacactccagttagattttaaatgcacacgctaattttctaacattggtgcacacacacatacttcttattttggcttcaccagactcagcctaattctccctgactatttaagtcagccactgatttatttttctatcttcagaaaaaaaaaaagaaaaaattataggtctgtgatcttatggattctttctgtatgatttgattttgatgatcccataggattcttcaggctaaggaatgctgactgtgcaaacaaatttttgaagacttggatgctctcattatatttatgtgctgcagatacctactatttggaatggttgttgctatttgcaaacccgcctactaagcactttggggaaattattagcagccattgacctctgatagggaaacattagcagttcaacctatcctctctccatttcaggtctcctgctgaatgctgaaggataattaggattttagaatttagtgagggaccatactttaatgtgtatgtcagtcccatacttttctagaatattctttccctctatagtattattctagtaagtaaggactattcctcttggccttaaaatgtaattcaaggctgggtgtggtggttcatgcctgtaatcctagcactttgggaggctgaggcaggcggattgcctgagctcaggagttcgagactagcctgggcaacacggtgaaaccctgtctctactacaatacagaaaattagccgggtgtggtggcatgcagctgtggtcccattgggtatggtggcatgcacctgtggtcccagttacttgggaggctgaggcaggagaattgcttaaacccgggaggcagaggttgcagtgagccgagatcgcaccactgcactccaggctggatggcagagcgagactctgtctccaaaaaacaacaacaacaacaaaaatggtaattatagggtcagagttgagaaacaaaaatcaacaaatacaaatcattttctctttaatttataagcattaggaattcattttttgttgcataaaagatttacatttaatctctgaggtaaaagaagtttcggcttcaacttggacttgtgtcattcccacctcatccaaattcatgtaacatggtgggaagggtcctctattgtctcatacatttagtctaaaagcattcttgggggaccccctcctatgttcaaatcagtgtctccatataaaaggaagctctgaggctgttccagttgttcctacattgtctttgccacttgggtgagcgttttcagcctccctgagccccaggtgccccagtgtacataatacttacactatgggtgctgcaaaggcctggaaagataggtggagccattggagtcaactctggcacatggtggggtttagttattttagacactggctttcagaagttagatggaagagacacagacttttccatatgcagattataacttagttttcaaaaccattaattggcagaaagttatttaaaagtcccaattctcatacctccattaaaatattctgatgtcaaaaatggaattatgtggccgcctaccctctcggtggtctggaaaatagtcatattttcactttttctccttaggctagttacagaacacagaacccacttcccatgaactgtgtctaccctggtgttgaaagactgagcttgaagaatacttgtcttttagcctttagaaagctctgtcaacaagcttctgtgaaacaaagttcctgaaaaagctatcttatttctttttaaataagtggcagatacaggtacataattcagtttatcttgtagtcaggaaaaaggcattaaatcgtgctgttgtagaattttagccacattcttttggccattcaaatggccatcgatccaacaaatactgattgagaacctattatatgttaagtactacaccagttcaacaccagtgaacaagacacaatcgctgatatcatcccaagtttaattgacttgtataaacaatctgtacattacaaaaattaatgttgttgctatctgaaatgggaggcattttctgtcatttttttagtagagaggaataaagagaccgaactttaaaaattaatggcgtttgagttaataactggaatacctatttttattgatcaattgtcatatagatgtgcagttacttaatccactagataatttgtatttctgcagtattttccatttcatgcatcattataatgctgtgtattcaaggtatgaacccgtttcatcaacagtattaatctcaattcatttaggagctttaaataatattcccttattaagtatattcttgatatgctgcccatgcttttacagtgtcagaagccgttaatgcagataaaaacaaacattcagttaaagaaccttctcatatattaattcgatttcagaaattatttgtgcatttatatttcctgaatggcttcggttatgacaaacatctaactaggctaattcagagctttgaggctaaagtccagcctcatggattggtttaatctgaagaacattaaaatagtagaacattttctgtcttggcaagaatcatagtgttgaaatttcaagaagaagatttaaatttgtccatgagactgtaaacttcttgaaggcaaggactcatctctgtagccctgatgcataattgatgttcttcaaatgtttgctgatttgagttgaactgaggagaataacaaaacagcatttgagaatcaaagtctcccaggttttccttatataatttacaaggacttccctggcaaactatcctttcttcttcgtttaaaaaatttcactttattatgttcatctttgatgtggaacattttttatggccttctgctgtgactcattttggtgctgagttatctgcttccttggagctcagcccttccttttaagctgtggtattcaggctccccaaagtcagcttgcctacgggtagagatcacagcaaaatgtgcaaatggtattccaacttctaggtaaaaacagacaactaaaattaaaaactctacatcatgtaagtcacctggaaaaaaaaaacagaaaacaaaacccgagggcatttgtatattcctgttaactcttgactgactaaagggagttatcttttctgcagtgataaaaaggtggcccaagacaatctccccatcttacaaaaagttctgaagttttactgtggagtccaattaaactggcatttaacttcagaaactacatccctatataatgtaatcatcacaaccaaatacaaattaattaatatatatggacaaagtttataagttcaatattagaataggggaaaagggaagtaggaaaagtttagagtcctccacgcatccttcatttatcaccaagagatttgctcctttgctccttctgttagtgtaagtcagaatttctcaattttcagtgtgtttatgaattgttattattgtttatcccaaacacatattttgtcttataggtgatttaagagctctaaaagggacatgttaactatcttcagaagctcacctctaacaatatttctatacctatattatacaagaaaactaatgaagattgacagtcaaattcctggagagacctttgacccttctctgtcttaaatttttcacttctgaaatagaaagccgggtcactggtcatcttatcctgcactttgggcataaagaagcttaggtccaaagcgccattactgtactcatgatgaccccttgaaggcacatcagtagggctgtctggactgtgacatgccatcagacatcatttaggggacttcaagtctggcttcttgcagagatgctgtgggatgcctcaaaaacttcctgcatggctagtgtaactatggggctttagatctttgttaaatacaagcaaacattaacagcagcagtggagaggataagttgccaatcctcccaaatttcttttccaggcagggggttgtcctgccgctctcagaactggctgtcatctgctgctctcttgtcacactgacacggccccctggctgggctgattggtcgctggcaataactgatatggaatactgatgttctctccggcagttccttccactctaaagagactccttttcatccctcttctcgcctttcctagcccagcctagtgcccaccctcccccgaccatgcctcccctgcacctggggagggggaggaccagtcctgggcgtgatgctctgagacggtggtgaaatccaccaggctgctttcactccggctcgctctccggagagtcctgttccagacttctcagggtttttacagcacaaacaactgcatacggcccgaggggaggctgaaaaggacttgtgtgtggtggttttattgcctgtcatcactttgctggcctcctcccgactggagcctggaggttcacagtggatttctttctgccgaagacaccaaggcactgaggaaggatcccttctccttctgttgactctttctatttttatggtaagtgcttacgttgaatgagctgctctgttgctgcagtgaactgaaccgttcgttccccctcttcccagctaagcttagtgaccttccttctgcatttcctctgttttcatggatcttgtctgggatgatccagcttcaaaaatgccaggggtcatttgcctggagtgtttgtctttttatcttttttccataaacgtgagctcttctgctgtgatacgaatataagtgctctgtctttgtccttgaagcagcagccggggaaatgtgttcacgatggtaaactgcagcagcgtgcagggaatctgtggaggatgactgacaaatttgggcaggatgaatcctcagtgtgccaggggcactcactcaggatcagaagggccgggggtgacctgcccacatagcaaactcttccatctttgtggataaagatgagcacacacgtgtgagttatgttgagtctgctgtgggcagctgtgttttctgcacctgcccgtgtgggtctgggatgaccctatatcttgtggggtttacaacttgggcaggaacattctcagcaggaggaatcctgagctggcagacggagtagactgcatgacctcattgcttctttcccttctgagtctcagggtacccagttctgcaaaccatattttacaggctcttcagagagtggtagggcagtgatgacaggaacatttttgagttgacaacatagttttgtcctcctgctaggagataaaatactttgaggttattagaatggttagacttttctaggagaacataagcaggtttctgacgaagactatggatgtggcagattgtttattccagggacattactcttacaatagtgctctaatttttcacctggtctcctgaggtttgctgcaaagagcatcacaacttcaagtctattactggcagcttcttgacgcccaaaggaaaccaagaacattttattagtttcactcctgtgcgttgcaggagtctctcttaacagggattttttttttttttttttggtagcaggtgtgtcgaactattttggtcaaagcatcattccaaagaatagcttcgcagttgtaattctatttagttattttcaagtcttggaccggaggtgggttatcttatttgtgtaggtttttccattctggtccatttcactctagagagggttcttgccaaatgtaattcagtctctgattcataaggtactgaactaatacaatgtgattttttgtgataagtgaggggagagaatgtggggtgaaatttccagtctctcctcctgctctttgggagtttggaatgtaaagttccctaactgcttgctcattttcactacttttatgtcccctgttcatgtggatttttcttgaaatagtggtgatgacatcagacatatgcctttaccttcttctctgggtccaaagtagatgcgtttgttgttgttctgtttttgtttgttttttatttcagtgaagggttccttgcatttgtaaaagcatacgtttaaataaaaaacaagaatttgtagatgtttacatgttagccctgttcaagagtaaaaccagcacagaggttaacagcaaaaaaaaaaaaaattcaaaacaatttttaaaatattatcagcattgcttggcttagctgttctaatatccactcttccctacactcgattgtggttcgcggcaatactgtattgtaatttgactgtcagactgctctgcttcctctttaattctttaatgtttagctgtttactttcatccttaatggtgtgttcttactttgcttaatctttttttctctttttctaattgaaaggatgttatatagtgcctggtaactcaactgaggatactcattaagatggaaagtgttagaatcagcttgggtgtcatggaaatagactcagtatttctcactgcaggcaatttcagaatcatttagaacatatttcattttaattagtagcaactttagccttgagaaaaaacattatttaggtttcctttattttgctaaacagattgtgtacctatgcaatcagaattgtatatatatgtgcaattgtttatatatatgtgtgtgtatatatatatatatacacacatatacaagcgtgtacacaaatgtactgttgtttgtactgtgtcaattgtatatacttaaaaaattgttgtagcatgcccatttggagaacagaaggaaaattcctcagatattgctttaactggcttttttttttttttggtaaggatttccccacttcctagaccccacttccagataatgcctttaagaatttctttgaattgggagagtgcatttttcagcatttccttgtctcacagcatggtgtcatgttaattcctttgcagggtctctgaaagcagcatagaaaactactgcaggaaaaattgataaaagctgtgctgagcggagcctgtagcctcttggtgtgatgaagtcactgcaacattttgtgtgtatttattttgctgctatgccttgcaactgattttgcttgcagacttagcaaattgaagttatttaaaatgggtctggaaacacctagattggtgtagatgcagttgatgcagttattctttttttttttacactctttaattacaactatcatcaaaactgtgctttcactgtttcttttggtggtggtttaatttgaaacttgcagcttaaattataaaccaagtctcccttttaaagtcctcttgccttctgctttctctcttcttcacttttgccattttatatatgtgaacatgcctacatgtacacagacaaactcagacagtgaaaaatgtacaacaattaatgaagagatgattacagcttttcttttagtaaccaaactccaaatgttgaaaccataatcatgtaactgagggaagaaattgtttctgttagtataaatataacctcatacttctgcaggcattcttatcattgaaactgttttccatagttgattaccaggaccagaaatagaattgattttgcattttaattaatgacattctggatctgtctaggttggactgccctcaaaccttgatatgtttactgtctaaaaggtctttgtgttaagagggggagtttatgggtgttataaagtaaaatcatttgattatgtgatacagcttttctttggtaactgaatgaaccatatcattagaatgttggctgaatttttatgttgcttttcccaatattatttagccaatataatcccttttaccatctctttgagccccttttacagagtacaaagagttatgtgcgactcccacatgaggcttcttagagggaagactgttcttcagcagagattcagaactacttctagcaccagctctggtaatctacttggaaaggaacttgcaattcaattggcaactcaggcagattgtataaaataggagaaatgcttcatgagctgtgttgaatactgtatttttgatctgtgcctccctactaaattcatttaggactgtctttactagatcagttttgcagggaaaaaaacatgtcctcagtagcataataatctatccagactgtcataaatgtttatattgcaagttatacttcttaggagttggagggagatggcagaattttggaggagaaccaaatcacagccccaaaataatgcaagacgaaaggggaacattcttcctatgtttagcatttaattctccagtcaggctgtttgctcttaagtctgaagagcgaagaaatgtaaaaacacataatgacaggttttgtgggctttttctctaatagaaatctttaacccttaattaggcatctgctgactgaccttttggtgtgtgtgagccagcagccattcttatagaaagcagacataatgtaatacagtaggaattcagttacttacatctttcctgttggtcccccacaggggacctcctctgagtgtcagagagggagtgagtgtctggagaccatcagagaccacagccagtcacagagagatatcttcaagccccttggattccagttcagcccccaccactaactggctgtgtgactcaaattctgtatctgctacatgaagcttggaccagataatcccagaggactgtaacccagccattaaaaattgtgaagtattaattcacttctatttgctactagatgaacgattatttctaagacaattgacccatattagacattcctggagggagtaggctgtaacttcctttgaccctgcaaagcccccagaactgtgacagtgacgtgagcatcagtgttactcagaaaagtgtgatcatggtacccttcatgaacagggcgaatatgtatatgatgactatctgcttatcctggcacattttggaaagtctcttgtgattatcaaaaaggaccttggccaggggcggtggcccatgcctgtaaatcccagcactttggtaggccgaggtgggcagatcatgaggtcaagagatcgagaccatcctggccaacatggtgaaactccatcttacgaaaaatacaaaaattagctgggcatggtggggcgcgcctgtaatcccagctactcaggaggctgaggtaagagaatcacttgaacccaggaggcggaggttgcagtgagccgagattgcgccattgcactccagcctggcaacagagcaagactccgtctcaaaaaaaaccaaaaggaaccttaaagagcaatttacctaatcctctcattccacagaagttaaggaagtgatatgacttccccaaggctggagactcacatagcacctgggccggatgactttagtgtaaggtgcattcatttactcagaaccctgctccattcccagtgtggggccccttccatgatacacagctgacactgtgccattcattgttcacaaatctgctttgtggcatctgtctcactggtgtccattatttctgggttcatttcatgcagattacgtggctgtaccagtcagagtgagtcatatcaagcaaatgtttatggtaatttgtttatgcttgtgtggaaatgcatttttatgttgaaattctgcttttcctataaacatttaaagaattttacaaaaactatgcatagtttttcccctttgcttaaactatttaaatgatcattgatttctatgtagagggggtgatgtttgtgaattaattccttcaccattcactcatttacctgttacttactgagcacctattgtgtccaccctactgccaagcagcagagatctagtggtgagacagccagacacatccactcctcttgaggagttcagagtctacttatacttcatggagttggttgtcttttcattgtcagccagtgttctatttactgattcacaatttctcaaagaatctggttgaaaaatagtttgcttgggcagatttttttccctgtggttattccattgagaaattcttttcgtagaagggcacctttgctgtcgtggtgacatatatcttccaattttcgaagatattatttttagcttctgattttgtgacctgactgaacagaagagacaaattagctaaacttatttgcactattgttgtgattcatgaaatgacaattcgtgtctttgataaaacttacctgtttcctagaatcttaaactgacagcctggatagcacagtgtccatggaacaaatcacagattaaataccacactcctttgccttgcatatcaggcccataacagtgtacagcccttgcttccttgttctatgtctggttccgaagttccatggaatgctctaggagtaccaaaaccatttgcaatactcagaaatttacagtgctctcacttgcctcagtgcctttgcacatgctatttcctcttctctcttcagactaaactttcaaagcaaatttgatgtcatctcccttggaagtgttttgacacttgccatccttattgacttcttttgcccagagctgagctaggtatactatctctgttgttctgtatccctcaggaccttacagactgtttgtctacttgtctctctctctctctctctctctctctctctcaaacagactttttgtttcttgagggcagggactatatgttctgtacctcaaatcttggtttagtgactgctgtagagcagataaccaataatccttgaacaaacagatgggaatcaccatctaaaacctatggtgctgtcattggcagcttctgctctatgtggagagtttaatttttcaaaccaatgtgactatgaattatactgagaaggataaagagattggcagacatcctgatgtagttcattagaaattctattcaaaaccccaggaaatgtttctgctttcaaatgagtttcagcaaagtaaacaatgaaaatttattaagtgccttctataagcaaagcattgcattaagtaccaaggaatgaaagatttttttttttttttaaaagcacaattcctatcctccagaaagccacaaactagtgagggtttgtcccatgtgtcaatgactggtaatgaggctgactgctataaacagagactgtagtcagctgtatacttgcagataaggcagggggtagaaagggcattctagacagaggggctggcttgagaaggaacttaaagttatgatggtcgtgccagcaatcaggtgactttgatggagcaggggctggggggtggggtggagggaaggtggaaaatgcaaggaaagatgaggaacgttgtgtggggagatgggaatggtatcaggaactctaaatgctgtttattatttttgaaagttggaggatagttaatagggtctggaaaatgccaaatagaaatttgtttggaatctcttctcaggtttaattaaatcaaaagtctgtattctgcagggaaggagagcagttgcgcagtacataactgcataacacgtttttttctcacccatcccttttgcccttgagggtacactttgccattcaaagtcatcacaaggaagtgaagccgggaagtctaacttaaatcaatcagtttagacctgaagggagtttagcattgagatcactgaggtgcctgttaacaaactgtccagggtgtggaaaaccccctgggtctttggtgctgtatttctactgtaaaaatttagttatttttttatttgacaattaactttgtgctatttacaaggaatacagttgttttatgaaccagtgagatatgcatgtgtaagtttgtttcatgtaggtgaaaaagtggcttggaaaattctgtctgtgatagattcaattcatcatcaaaatatgatttctgcttgccttgtccctcctttctttttcctaaaagaatgagtgaacatattcttagggaatggtaagttggtaggttttctgcatctcataattagatctgaccagatgactctccaccttgaaattagtctaaaaagattgaagaatttggaggaagatctctagatatcttgaccagagcatgaaagcaaataaatattgcttgtggagtgagagatgatgtggtagaaaagaagctgcattcattcattcatttattcattcatttgctcactccacaagtacttaatcgagcacgtactatgtttcagcttcctgccttcatggagctaacattctggtcagagtgggagggggagacagaaaaacacattagcaaatacgaagcaagtcagatggtgatcagtgctatggagggaaaaaaaatgaagaatgctttggctgctattatcttcacatttggttctctttaaagttatttaacttatgcattatggttaggttattttcttctctccactcattgtttttagctgcctatttttatattcactttctgacaattctatgataaaccaccatcttgagggtttttttcctcctagataaaagcagcttttgaaataattggagtactgtgaacaaaagttataatgaagcatttacttctggaattgatttaaagaaaagtactacggacatcaaagcccattagtatttttctcaagactaaagttgtcagaatttagaggaacatgggatggaaatggatctgtccctcacttaactctgagaggagcagtttggggtgttctgagaggatgggagcttggagtatagggaactccaaccccgggagcagagaaatggtgggatcacccatgagcagagctcattcagagaagagacgggagtgaattagaaagtgaacatgcaaaaattgagcaaggaatttctctttgggaggaagggaggtagggaggataaaaccagtgagataaatgtcagtgaataaacaacatttacaagaacaaattctgcccaatatagaacatctgagtgagctggttagtggaaatggtgcctcgagataaaaaacaatatttagggatttcccaatattcccatcctatattttgtgggatctttaattcagcatcaatgttccattttactgcaagcaagcctttagtcaatactttctaccttgcttctaaaataattaggatttaaaggaaaatgtctcctagcggtggagtgcctgggctctggggcagacattgtacccatccttactctgccacttactcacctttggaccttgggcaagtgagctggtctccttgtgcatcattgtcctcaattataaaaatgagattaactaattacccctacctcagagttgttatgagtgataaatgaaatagtccatggagagcccttagcacagtgcctgcaagatgattgcattatctaacaattgttaacctgttattaccatgacttgtctctctggtgttagtggtttagagaagttctcacatgtatatatgtattttcccccttagcagagctttttttttttcttcttcaacttttaagttctgcggtaatgtgcaggatgtgcaggtttgttacataggtaaacgtgtgccagggtggtttgctgcccagatcaacccaccacctgggtattaagcccagcatccattagctattcttcctgatactttccctgcccacactgacaggccccagtgtgtgttgttccccacagtgtgtccatgttttctcatcattgagctcccacttataagtgagaacacatggtgtttggttttctgttcctgtgttagtttgctgaggataatggcttccagctccattcatgtccttgagaaggacatgatcttgttcctttttatggctgcatagcattccatggtatatatatacgacatttcctttagccagtctatctttgatgggcatttaggttggttccatgtctttgctattgtgaacagtgctgcagtgaacaaatgcatgcatgtatctttataataaaatgatttatatttctttgggtatatacccggtaatgggattggtgggtcaaatggtatttctggttctaggtctctgaggaattgctacagtgtcttctgcaatggctgaagtaatttacactcccaccaacaatgtaaaagcagtccattttctccacaactttgacagcatctgtcgtttcttgactttttagtaatcacccttctgactggcgtgagatggtatttcattgtggttttgatttgcatttatctaatgatcagcgatgctgagtttttttcatgtttattggccgcatgtatgtcttcttttgagaagtatctgttcatgtcctttgcccactttttaatggagtggtttgtttctttttcttgtaaatttgtttaagttccttgtagactctggagatcagacctttgtcagatggatagattgaaaaaattttctcccattctgtaggttgtctgtttgctctgatgatagtttattttgctcctcagaagttatttagtttaattagatcccatttgtccgtttttgctttcattacaattgctgttggcattttcatgtgaagtctttgcccatgcctgtgtcctgaatggtattgcctaggttttcttctagggtttttatagttgggttttgcatttaagtctttaacctatcttgagttaatttttgtataagatgtaaagaaggagtccattttctattttatgcatatggctagccagttctcccagcaccatttattaaataggacattctttccccattgctagtgtttgtcaggttttttcaaagatcaggtggttgtaggggtgtggtcttatttctgagttctctattctgttccattggtctgtgtgtctgtttttgtaccagtaccatgctgttttggttactgtagccttgtagtatagtttgaagtccggtagtgtgatgtctccagctttattctttttgcttaggattgtcttggctatttgggttcttttttggttccatatgaatttaaaaaatagttttttctaattttgtgaagaatgtcaatggtagtttaatggtaatagtattgaatccgtaaattactttgggcagtattgccattttcatgatactggttcttcctatccatgagcatgagcattgattatacctatccatttgtttgtgtcctctcttatttccttgagcagtggcttgtagttctccttgaagtggtccttcacttcccttgctagctctattcctaggtattttattctctttgtagcaatcactttcttcttcctgtttgtgattaatgattttagggtaaatctttttggagggatctcactttttttttattcagtctcttagatagttattataatttggaatttacttagattttaagtctgtatcatagaacctaaacagtggaattggaggaccatgtggccacaaggtccctgggaggaggacccactagtcacagtaagtgatgttgtggcaggaaaagagaagagtagagtggatgagaaaaggagcaacctaacagcaaatatgatcaatgttctttttctctgttgccattcgggaggatttagggatgaaggctccttaggtggtgtgtagtgtagacaggctacagcttgcagtttcctggagggaatagccaggagagtgtgatttgtataaacaggggcaggtggctaaggaagtatagttaggtgccagtaagtttgtaggaaagaattctaaaagtggaatgcctggttcacagggtatgtgagtttaaaaattctgatggctcttactgaatcaccattaacagaagtgcgccagtttatactcccatcagcaatgaatgagaatgcctgtttcctcacacctatgcccactagcaagcattttgatctttgctaatctgctgggtgaaaagtagcatcttatagtttaatttgagcatcttttcatgtgtttactttgtattttcttcttctatgagctaactctttgttcatgccctttgcaggcccactttcaactattgagttttgattttgatttttaggaggttttttttttgtttcgttttttttttttttttttttttttttttttttttttgtgagacagagtctcgctctgtcacccaggctggagtgccgtggcgtgatctcggctcactgcaacctccgcctcctgggttcaagcaattctcctgcctcagcctcctgagtagctgagattacaggtgcccaccaccatgcccagctaatttttgtatttttagtagagacggggtttcaccatgttggtcaggctggtctcgaactgctgacctcttatctgcctgccttggcctcccaaagtgctgggattacaggtgtaagccactgcgctgtccaggagctctttatatactagaaaaattcacatttccttatgattttttttaccaagtgtttctgcttattttgttatttgtctttgatattgtttatggtatttgaggcataataaatttttatataaagttgtcacatgtttcttttgtactttctgggttttgtgtaataatcagaaaagcctaacccactctgaaaagtcatgcttctacaatttccttttgtatttttatgtaaataaaatcatacttatttgattcataattattttggattagtaatgaaatagaaattccattttattttcccccaacaactacctagttctctccaaacatttcaggcacgatgtgtcttttccttgctggctaggtggtgattcttgagaaagatgatttttacttgggccaaggcaggggtgacatggaagggtatcatcatctatgaaatccccttatgtagttagaactatttttggagagtctgctccattttcttgacttccagtttgttgcagttccacactgtgttaatcactctagttttatgaattttaatatatgatatggctagcctcacccctattacccttttgttccaggattttttttgatcttcctacatgtttatttttctgaataaactttagaaattgtctcattctaaaaaacaatcatgttttggagaaagggttaaattaaatttatagcttaatctagggagagtgttttttaacttttaagctcaggggtacaagtgtgggtttgttgcataggtaaacgtgtgccagggtggtttgtgacacagatcaacctatcacctgggtattaagcccagcatttattagctattcttcctgatgctttccctccgcccctgacaggccccagtgtgtgttgttcctcatagtgtgtccatgagttctcatcattcagctcccacttataagtgagaacacatgatgtttggttttctgttcctgcattagtttgctgaggataatggcttccagctccatccatgtccatccatgtccctgcaaaggacatgatcttgttcctttttatggctgcataatattccacggtatatatgtaccacatcttctttagccagtctgtcattgataagcatttaggttgatttcatatctttactattgtgaatagtgatgcagtgaacattcacatgcatgtatctttatggtagaatgatttatattcctctgggtatatacccagtaataggattgctgggttgaatggtatttctgtctttaggtctttgaggaatcgccacactgacttccataatgtctgaactaattgacactcccatcaacagtgtataagcgttcctttttctccacaacctcaccagtatcctttattttttgacttcttaataatagccattctgactggtgtgagatggtgtctcatttgatttgcatttatctaatgatcaatgatgtcaagctttttttcatattatcgttgccacatgtatatcttttgaaaagtgtctgttcatgccctttgcccactttttaatgggggtgttttacttgtaatttgtttaagtttcttacagaagctagatatagacccttgccagatgtatagtttgcaaaaatttgggagaattttttatgatactgacccaacctgtcgtcacacagggtatatgttcccatttattcagatcttcttttatgaatctccttagttaatgttttaagatattcttcctatatattttggcacgtattttttaaaacattatttgacatggtttataagtatttgtttagtcttcacatatttgcagaggtattgaggagtgaaaaaggaatggaagtgtttctttgacaccgtaaaatagattacctggggaaaaatattgaaactttgcataagtaaatgtaattgattcattttttcttttatctcttctgaccctatatttcgaattgttgatctaactataaaaacgtatttgttttaaatttgcaattgaatttagtaagtgtttttcacacccacaaattcaaagcaccaattgctgagattcttttgcaaagtgttccatatcattgtcttatattaattcattgactattaattaattagcttagtaagcacttaatgaacacttactatagaccaaatgttagaaatatgaagactaataagacatgatccctttcattgaaagatttgctgtttactcagagatggaatgaaatgatgaaaacaaagaattataataatataaggtaatgtgctttacactctgggaggccaaggtgggtggatctggatcacttgagaccaggagttccagacccacctggccaacatggcaaaaccccatctctactaaagatacaagaattagccagatgtggtggcatgcacctgtaatcccagctgctctggaggctgagggaggagaattgcttgaacccaggaggctgagattgcagtcagcagagatcgccccactgcactccaacctgggcgacagagcaagattctgtctcaaaaaaaaaaaaaagggtaatgtgctttcatgaaaatatgtgcaaggcagagttggaacatggagtgggagagcctcaagctgtcctggggcaatcaaagaaggctttactgagcaaccagcatctgaactgagaccattcggatgagttgctgccaggtgggcagatcaggggaggcttctccagacagagaaactagcaagtgcaaaggcactggggcatgaatcagttacaagttattcagtctatggggcttaggagattaggcttagccagtaggcagctgccagatctcaaaggctttatatgacatgcgcaagaggttgtgctatattctgtaggcactggagcaaattgtgagcaagaaaaggtcagattgtagactacataactctggtagccatatggagagcaaagtagaagggtatgggtataaaatcaggaatacaagtatggagattataacagtgggcccagttagagactgttttctcttaaactaggacagtgacattaggaatgacagagagcccctatggaagatttattcattcaacaatcatttattagaatcacctgtatgctaggctctgtgctggatgctaggcatgcagcagtgtgccagacagatatgctccccactcccaaagccatcccattcaaatgggaagagcctgataaggtgatatgtaagttgatatgttaagcagtggtatatgatgaagcagaatgcagcaggatgaaagggaaagggaacatggttaggagtatgctgatcaggatagtcctctgggcaaggtgatgtttgatcaggacatgagctggggagggagggagggtatgagccagggaaatggtgtccaagcacagggaaatggtatccaaaagagaaatggtgtccaagcagagggaacagccagtgcagaggccctgagaaggaactgtgcttggcatggttaaggaataatgaggaggccaaaagggctagagcagagtggtggaggaggtggcttaagtatttagattttatccagaatgagatggggagccagggcattatttttcatacggcagtagcatgatttgactggcagcctttaagaggatctcacctgctgctgtgtggagaatagagggagtcagggtgtaagtaggtcagttacaaggctggtgcagaggtccagaaagggaggtgatgatggaccaggatagtgattctggaggtggtgagaggtggtagaactatggatctgtcttgaacttggtactagaaggatacaggaaagtgtgcataggaagtaaaatgggcaagtgtagattagataactgctaagtgtagattagataactgctaagtgtagacatacaatattttaaagggagatgagggaagtatagccagggagggtcactttagcaagagcagtccatatggtcaataggtcaatatgatgagtacactatcatgaactcttgcaggctaaacttttattatttgtatacttatgagccacactggattgtgtgacatgactaaatagagaattcctgaaattgcctctgggaggatgtattaaatagggtcaatcagaagtacgtaaatggtgtctactcttgagcaataaaatttatagaagccacatctaaatttagctttaagcaatttcggagcctgagaattttcaggaaatagtaatcaaagccctgataatacaagaaattgacatcctttttggactgacatgggagaggaataatttgggcggtcacagaaacggactcatagatcatagatcttgggaatgtggggtcaatgaattaaatatggctgaaaattataaattacctcacatatccaattgcttttagctaaaatcaagagaaagggctttctaaagccgagatactttttttccattagcaaagggttataagatgttctggagacttgagtcaggctagttcccttatctttggaagatattcttgagtgatgcagtgctatcagtttcaaataagtatatttttgtaaatcaggtgatgttatataatgaaactgacatttgtaaaagttttttatggctcccagccaggtgccccttttgtcagaccctgacttttgaaggattttgggctgcttataaggattcagagttcccctgcaaaattgatgttggaaaccatacccacagtctgcgccagtcactgtggactggatacatttccacagtgtgagatgaaatcagaactgaatgagagtggccactgttctcttggccatacctgaccaaaggttctagtttgatgcagattattattctttagttaactgtacagtaaaccatgcacagtcctcattgtaattaggtgggttcattctttcttaattttacctgctgttgtcgtcatgagtcacaaagttgaataactcttcagttattattgtagccagagtgatggataagatagactcccctaaaccatggtagtcgatataaagcttttcttctcttgcccccatagttagcactaactggcccctgttttgtataaccttatacagacttatgtcatagtgctaatgatataccacatgtgtgtacacatatgcacatacctactcacatatacacatgcacacacatatatgtgtacacacacacacacgcgtaattcctcttctctccccccacagactgtagtaggcactttgaatcatgaatcgttcttattttccttttaactattaacacttagctcagcatctggcataaagtaggagctcaaaacatggttgtcgattgaaatctagaactgggttttgcattttcttgttattgctttgttgttgttctgttgattaagtaattctatacctagtttaggtttgaattgctttagagaccctgatgatggtgccttgtgttcttggccacttgattttatgtgacagtcttcagcatattcataactccaagctttacaaaacaggcaatattttatagggaagtagctctgttgcctttctggatgtagaggcagcatgagattataggataaaactccaatatgtttgtatttatgtatatatatattaccttattcatacataataatgtgtatacatacataataatatgaagtaaaagtaggtcagaagtaaagaagaggtgggaacaaaatgaaagcaggaatacaattaaattgcatgtcagaatgacttacatgtaagatacagaggccacctttaaaggctttaagctttcaatcagccagagggaaaagaacaggcttatgggggtaaagataaaccatttgctcaggttgattttaaccatactcttagcaccaacatcagataagaatttctcccaggagtccctatgaagagtacattgtgtttcgttatgaaaatcatcaagctttgcaaggctgattctcataagacaattttgtgttaatagcattgcctcaaggcaaaattttgtaaaagcagtcggcaaggttctgtttaggaatcagttctctgctggtcagtttgactcagggatatgaaaagtgggtggactacttgtctttaagcaatctttcctgtgtattgtttatctcaaataaagctttgaaaattgttttttaacattgaacttgaagtggcactattctccagcaagtaagggcctacagtgtagctactattctgtgtagctagttaaggagagacctggcgtcctagcagtgtcaaatgaaagctggtattagcatccatatgaggaagctgacttgcctagcaaagacatttacctgaatagcaggttgccctccttatttccaggggaagcatgggagaaccaagcagctcagccaggattatgcatagaaaattgtttggacccacgttattgctcagacaaatgggtgatcctctccaagggctttaaataggtccttttggggcagggaacccaaacacttagcaaagtacagaaggtttgaagggaatgaattcccagagtctggattggatgctcagtctcatttctcaccttcccgtttacaatccctctttttccattttagcaaagcaaggcatccttcttatccatctcagatcttactatagtgcattgtgcaggggtgtaaaaacagcctgggcaccaaacagagcagcaattggaaatatttctttgcagagaagtatggtagtgtgaacaataaaagactttccaatataaacatatgctacattgggataaaactctgtggggaagtgggctggatatgagttaaaggagaaaaactagcgatgtaaattttccaactgataaaaaggagcttgagcttggtcagatatcttaaaaatggttgaatgtgggatatgacagttgtgttttaaaacctcaatgtttatgtatgccataaattatattctttgtaatcctataagcttatgatgaagtcaacttaaaacttcactgagttggggcagatcttcagaaggggatacatagctttttgttttgttttgttttgaatctttgggccatgcgtgagcaaacatgtttgaagaccactcatctactgcatgtaatatggctctcaatcagtcctctagctcttgcatcgacctcaagtgttaggtcagcctctagctgtaactcccctccctgttcttaccactactttatatttactttaatataagtctaacagattgcatccatgattcctctaccaaataggaagatctttaattctcgaaaacggtatactatatactctgtagtttccaggaatttttttgtggtgccttatgtaaaggcaaactttaaaaaaattattgagatataatttacatatcatataattcacccatttcaagtatagaattcaataagttatagtaagtttaccaagttgtgaagtcatcatcataaatcagttttagaacatttttgtcaccccaatacgatttatcatgcccatttacgtgaatgttcctatgtttttctaatatttaaggggctacaagttcatatgacaacatgcgtagagagcagtaaggatggaggaaaacaagaggggcagggccagaattttatcatttatggaagcatgagtgctagcatcttctatttttatttttaaaaaaccactctgatgttcttctagtccttatatgtttttattgatacaaatataaccacatgttaaggcaggactctgtctatctcagttttggctaagatcccaatggccaagaatactagattaggttcccccatatcagttacctatttagaacatacaaaacattgtatgggagttagttattgtctgctccataatatgtatgaggttgatgttggggccctggtgaatgtgagggtgggagaagggtactccatcttcacttcaaaccaagtgagaggaatccttattgaacttgacattatctcctgatgggagtttggggacatgaggttcacctgaacctgtggaaggctgtgatgagagctgccgctaagaacaaagtgggagagggggctgcagggagatggccgcaagttggtgggacgaagatgtgtgagattttatcatggatcaggtggatgctctgggatcattttaactttggaatgcactcaagagggatgcctggagggaatgggggagaaacagagagagagagagggcatgagcaagtgcataagtgatggtggggggaatggttatcagttacctaactattctggatacgtaagaatgtagtgcttagagattagacagaaaaatgaaccatttgccatttgaccatctgggagacattattgtatggtctttaaatctgataaacctgaatttaaatctctccctgaccctcagcaagttactgtatttttctgagctttcagagttgtcatggccagtatttgtcgtaatgatataatcattgactttgacaagtcctggaacttgcctttcaaagtatttttgatatttgacactgattgatgagtagataaatatgaatattctgtatagacaacatctatgatctagctagagatctaaaagtcattgttaggtaccataagcgtgtaacatataacattcaatattttgcaaaatccatggtatttcatttactatactgccatttactttcttatttggattacgtaggtgataaatttgtacaagcctgttttcatatactttgaaagtgtgtgaaaataattgtatataaatggtaattctgattttctctagaatacaattcagatttaccagccttcaaataatattattttagatactattgttaataaataatattttttatttagcaaataactttacatatatatgtgtgtgtgtgtgtgtttgtgtgtgtgaatttatgcatatgtatttttccagccaacatgaaagtcttttgaggacaaaattgagtatttgccatcacaaaactataaataacttaaaaatttggcatatttaaatattgcagtaagcaataatacttttatccatttatgcaacttttgtacagaaacagatcttgtagattatcaggtaggatctatggagtgaagtttgataaacttttaaagacaatgaagttaatttttaaaacctcttaaactcaactcttaattattcttaattgtgttctttaatttcttaaattgtgttcccaaagcatttaaaatatataactatcgtagtactgaatgcatggcatagtattatttcattaattcattaatttatttaaaatgactgtagtgaactcgtatggtacaatctctgtccttatggagtctagagttcagtgggatagacgcatgaaacagacacatgagtaatatataattacaaattatgatcactgttatgagttacaggcaaatggcatgagagaataactgtggaagcataatttaattggagggaatgattctctgatgaaagatctgaaagatgagtggtccattatcagttgagaatgggtcaaagaatatttcagatagtgggaacagcatattacaaaggccctgtggtaggaaggagtatgaaatatttaaggaagaggcaaggagtggatatagatgcctcatttaggaggcaatgggaataattcattctggaaatgaggtaaactagacactagattagactagaataagttagtggcagtacagttagaagtgaatggattttaagaaatagtagaaattagagtcaataggacttcaactgtttataaaggagaaaggagaaggtgttgataaataaggctatttgtaaaggtggatggtttggattctagcacattgtactgtgattgttataccataatttatcttctgtgaacattgcaaggaagtttctgcacttattttcaagttttgatgtgtatatttttacaatactgttcacttttctaaacttttcaattgtaagtttcttataattgagaattgttttctctttctttggtatatgtccagagttcttagccctctaaattcagttgttgttgagtaaattttatttttttaaaaaatagagattagaacatctgatttcagatatttaaaaaaacttagatatttatcttgtggggaatgacttaggaacagttttcttgaatgtagagatttgaaataccaatttgcctttgggtcattattttgtaggaatgtgggaagatataaaattcaatgagcaatatgattaggcatttatataattccttaagtatatgctatgtagatctttcaacatatatattaaaagattaaaaaatgcttgattatctggctctggggtatacttgtaaaacttgcctatttgctaaggtcaaaacaggcatgcatgtattttatattctagctttatctatggtatattaataatataactggtttccagcagacacaacctagagtaatccctgcctaggcttagcctagttagagcctagttaggtcttcttgggtttggacatgatttgagatattgaaaagaaaataattgaggagattcaaagcagtattctaatgaagctatatgcaggtttactaaacagccaacttagccatttatctaaaaaaataatatatgtaaaatgtgggttttactgtaatataattaccgagtctccttaccaaaggatgggaaaactttatagccacgagtgacagaaagaaactattgttcagttgttggattccatgtttatgtctgctaaactggtcattgattttcatactgtgaactttcttaacattgccaggtatacagttagaagacctcttatcctaaatgcttaggactaatttcgttggtcagtggaaaaagatggttaaatgagggaatagttaaaacaatatgatacatgcatttcttgaacaatttattttaacctaaaacaaaaattaatttgctaatattttggtgggggctaagggttttacttcaagtaataattcattaatttttttgttttacagtttcttttttgcataatcatgcctggaattcattacctataaggacatagacacttgtgaagacaatcctagtgcagaattcatctaactttaatgaatcatttcattaaagatttcatgatttcccttattattattattacttattattgaatgtatgactcagccttataaagtgtttcctaaacttttagcttattttaaaaatagaaacaccaactttctttttacatttacatttcatttgtttacatggtacttaattaaaattatatagttataataataagtatgaatgacataaaaagttttggaaatgagcacaagtaattcttgttaaacactatagttttaaaaaagtgaagggaaatggaccattgttctaaagattagacaacttaagctatgaggcttggtgagctgtgggtatcagtctttatgtttaataaagggaatggagattgttggctaagttgaggtcaagtaacagagccccctttttgtgctggtttcagcccattacccttcaactttattcactaaatcagatagttacagtgctgcttagaatagctcctgatattaaatagtgtcaataataatactttagcagtcatctctgagcttcatcattataaactagataaataattaaaacaaataataatagaatgtttaatgggagaaataggcactgttgagagaacagtctaagattcagatcatttagctctatgcccagggatgccttactctaggtttgtgacattgaataaattgctaaacctttctggattcagcttccaaatctacaggctggtagttctcaacaaatcgtgattttgcctcccagagaacatttgacaatatctggagatatttttgattgtcataatctggggaatgttcctgatatttagtggctagaggccagcactactgctaagatcctgcaatacacaggacaggtcctaacaagaaagaattatcagttcaaaatttttgtagtgctaaaactgaggatccttgggctagctaatttatgatggtttcttcctcttccctatgtatctatcattctcaaacttaggctgatcatatatatatgtgtatatatatatgtatgtgtgtatatatatatgtgtatatatatatgtatgtgtgtatatatatatttctattttaaataacctgagtaatgacattagatgaattttttttgtctagtaggtgtttaaatgatgcaatagtaattttcaatgtcttatataacataaacagagaagaataaatatagccaaaatttactactctgtactttttctaattcagcattcccaaatgtaagttaaatataactgtagaaaacccacagtagattaaaatatttattctttcagtaaagggacagtttaccaatgctgtcaggtagataggtaccagcaatatagataggaaaggggaaaagctatgtaatgttggagagtttaaatactgtaattcagttgaaaactatatttcagctaatagcaactttgggatttatatatgtatatccctatgatttaaagtaagattcatcagtggtataaaaatgatattttagtgtgctcaattttatgacttgagaccagttcaaaacaagcatcactgctagtataattctaaattattttggaggaaatgtatattttaaaattcttggtggtaattagtgatgataggttcgctgctctatacttttttatgaaataaagtttgacttaaagaacctgagaacaggtttcaaaagtaacagcatagataccaatcacattttttctgagtttttaatttgttgacaaaattttttttaaaaaactgtgatgaaagcatgcgagacttgagatggctgtagaaggagaaactgagtaagttcctcttcttgtcttgtttcctctccctatttctccttctctgttttgcttactccaactccatgcacacttgaatcaccatgaatggtgcccaagttgaagcccaaatcaagttccttagttgttggggccgtgtcttatttgtcttttgatccctggtatctggcatgtagagtctctaagtaaactctctgcccttgacctttctgcatattataggctctgtctttgggttcctccctccctctatttcccttttttctgcttctctctcccttccttccagtttagtttggcatttatagttttcgtggttgtgtggctcttttcatctaacatttctagatgtttagagcagaagggggggccctcccacctgacctcagcctaccacattgttggaatccattcattcttcaacctattaaaatcttactccattttattaccaagtaaactctttcaaacagttaatttatgattctcctggttttattcttaccccattcaccccagcaagaaagtcggtttctcaaaaaaaaaaaaaaaatgcccttctttccctacctgattattatgtagcatgagaattgacagagcacaagcagggaatgattacacaacatttttaaaaactctgtgttgaaatgtatttgtggcattactgtctcaaggaaagccaaatgcatgcctcagaattgagaaaaatgtaagtcggcaagcttatctctaactccccatgataaaataaattgagtgttttagagctgtcagtagtacttgcgcagttctatctctactgctatgtcagttaatatttcctccctcaaaacaaaacgagtgcataggcaaaatgtaagccagcagttgagattctgaactacctccaccagtgggtttcaccccaaagtgtctcctgaaggcctattcatcctgggtttgcaatgctgggttgcaatgttaatcattttttcatgtgctgatgaggaaaatgataaagtgatggatgctgctcttccttctgctttgtcatcctgaccctgattgtgctgggtggactttctcattaacgatgcaaagtccggtgatttgcactgtgctcagctgggcatcatttcttgtatcttatttttgttggtcagcattatagctagttgttggaactgatttcccttgcactctctgtttgactatgccatggccagcacacttttgaatgaaaccgctgatggttgtcgaaactaaagggacattcctatattttggattggctcacgaattcacctgttgatgccctggaggtaattttcactggctttatttatagaaatggcttacacagtgtagttgtgtctagtcagttgccatatggtaccctaatatgccaccaaatggtaatcaaaacttagtagtaaattttcaggaactaataaaacaactgtgatggaggagcttcatttgggatggtagatatcagtggctggagcaatgaggaaggccttgcctttctcttagtgctatttgttagacagaagtttttaaacaggtatgtccagaatagtacttaatttcttaaactataaaagcaatatatggttattattaaaaatcgatttggaatggaagaataaaaataaaatgactcagttcatttttctgctatcccaataccagccttggagaatatgctttcaggtaatcatagagtcagagaaagaatagagatgaagacagagtcacatatgtgaagttaaaaaaatgtaaatttatcacaatatatatgattttccaacttactgttctcaatgagtttgtcttgaagagtgttacgtgtcaggatatataggtccacctcattcttcatagcagcagtgtggtactccagaccacagatgcaaaacgccataatttaggtaagccttccattatcgataaacataaggttattgccaatgttttacagttataaacagcaagttaatgaacatttttgtacatatatcttacagtatgtaggctgacattgccgtagtattaacacttagaaatggaactgatcattccatagttaggcatattttaaattttgatggatattctcaaattgcccctccccaaagacactatatgaaagtgctcatttcctccacatccccatcaatgcccagtcctttgcttgatggaaaaacagttttgggcatctttagtgttctggtccacagctcccatcctgaccacactcaccaaatagaatcttactttactcttggacagaacagaacaaattaaaacaaaataaaaataacaagaaacagctcaagagatgtggatcttttgagcagcttaaccaaaacctaaacaaggcaaataaagtgaccctttgttatcagcaaaggcctgtgcttcctctgtgctgctgagccacagtcagctaggctggatcatgtggagaactactcaacaaagctggatttccttgaccagtcagcaggtagaaggtttttcttcacttctttccccaaagtcccaactcgagtctaactacgattcgaagaaaatcaagagctccagtgtacaagtgacagagaccatttgttttaagacttagcagtcaccctgttcaggtcttcttaagggagacggcagctcctggacctggccacagagtgtgagaaagatggtggaagagagaaagctgtacatacacacgcacatacacacacgcacagggcgagacagaaaggcaggaggcaaattttttccaaagaaatccaaaacaataggtaaagaggatggaaaaaagagaatggtaactgggcattaccttaaccactgggaggagaacaaaagtaagtcttaaatctgatcagccatggcttattacttgataaggtgaggtgaggaggggaagatggtagaagaaacttgatcttccagtaggaatcaataaaaattgtattagatgttccccttatctttggggctcttgtcttactcgtacttcctttgtggtaactttaggattctcatgtttctcttccttgacgttgcaaaatttgatatatttccatttgttttgttatttcttttcagatctcaccgtttgctgtattttgctttgcgtaatattttcttttccttctctttctgcattatttgctttaaaacaacatatacactaaagaaatgtaacctcaaccttttcattcaagtgtgtatttctgaaaaaaaatcagatatttacagataatgaataacaccacaaaagttgttttatgctgcaactgtacttaggttcaatgtcatctttgccaccttctccctgtgttatgtaaatattccatttattgcaggcataaaaataccacctttcactgtactttatgaggaaatggaagccaaatgactttttttttatagtttaaaattcatttacttatatatgtggcaaattctaaggcaagccagctcaaatctgtgccaaattcaggaagaaaaggattatcacaagaaataataagtggattatcacaagaaagaaaaggattggtaaaatatctgttatttcacttacaggtggaaggccacccctttttgtcatttaaatgctaaattttcttctcctttttcatacctttcattttccctcttgctttgtttttgcatacaagcgagttgggacatatattgcttctatctatcacttttacataaaagatagaaatccgggaaattgcaaaaggtttacagtctttccatagactaaaatcacgagccagatgttttaaaacaattttatattaaacaattttaaaactagtatttgtataagccagtaaatctatttttttcataaatgtcctatcatgtttttccccccattgggcacttggattggaactacaaaccacaatcttcaaataattattaaatctgaaaaacctatgtcttgtagtttgtggtgactctgtaggtagccactgcaataaaatctatttggagaaggagctattatctatgcacaatgtgtatttgatgaaatgggtaggcaattacagttcacaaaaacacatactgtattagaatagttcacatatagcaaagataattagatttttcatacagtaaccagtcagccaataggagtaaaaatgctacaaatcttatttataaaaagtgccattaaaagataatcccttctaatgttgcttgagcatttttctggatatgagtgggcagatgagtaatagaaaaataacactgacataaaaattaagcctgggagattcctgagtttgttttgtgcaacttggagttttgaggctctgtcaggagaccgctggagacaagagtactggattagaagcaggaagatctggtgcttgacctgactgtactgtcagtcagtcatgtgactcatcccccaagtctcacacttctcattttcaaagagaagaaccctgtactgcagagtaagagatcaataaatgtttgttgaatgagtaaaagaatgaacaaagattttaaagattcctttccaagattctgaaattccactaggaacttgaacaagcaataaaaagacagcattgcaaattaagaacaaacaaacaaacaaaaaaaaactttagccaaacattctatttagtttaaatttgtagatatacagattttctaaatatcagttttcctcaaatggacttaagatgacttccagactcagggtacagtgtcacattagctggtttagcgagagtgttgtattctacagaaatgtgactctgaataatgccagtttgtcacagatggggatgaaatcagattttctccaaaacacccaaatgtgtgatgcataaagcaacattggcagccagtggggaagatcttatcaatgaagtacacaaagctctgaatgtttacttcgcagaggaaatggcttcacagaccggaaaatttaagttgtcatagaaacccccatgccatatattttgttttaatttgagtattggcagattaagaggactcagtgacaaaggagctatattaaaaatgttgaaattgagtgtgctggttttattttttaacttaattgatatctgttttcaaaaggacttttaatatctagaagggcaaaagtatttcatgcaaattgtgcatagatttctgttgaaaaacaatatggcattggaactttttgttataaaatggtgtgttttctcctgtttatttcttatcataaattatctttttaccgtggtatcatcaaaataacttcactggtatcaattagtaacataggaagctatatatcccaactgtctacatttttattccaactcttttacttaaggaatctgatagtagctgctattggtttaggaaggaaaattaataattagtttgacaatctacttgaagtcaaacatttaggaaaacaaacaaatactgaatcccttaactatctggagagctaatatttattgagggactgctctgggcctcgctgtgctagattctctatgtacatgatttcatttggtccttcaactactctgaaatataaattatttcatttcttgatatgtaaggtgagactaagaaacattacgtgatgctcagtaaaaaggaaaatctggaatttaaactttttcaacatccaaaatggcaccacactgcctcatgtcatataattaactagacacaaatgtctaaggagcagaacagacattttgtgatagataagacataactgattctgtagtaagaagaactaggaagatgtccaggcctcacatatgacggccccttctggaccaagttagaccttgagttagtcttcagtaactagcatcccagcttggtgtgaaaatttggaacacttaattatggacattaacatatttacacataattaacactaataccattttgataaatgattaaaaatattcctgcatatatcttcagcttttacaaagggaattatgtgattttgggttttcaattatgtgcaacctattgactggacattttctgatgtttccatggaggatttaagtgttattatgtataatatgttagctattaatttttaaataacaagtttaaattgcacaaaattactttattatagaagctgttgccaaaatcaactggcttgggaatgcacatcactgaggaatttgaaccaatcaaatcattagccagagaaatgtaattatttataactcagccaagctcttattatgggcaagttagttgcacttttctccgctcttttgtggttgatgtggtattttataatgaacgtagattagtgggaaaggagcaatatttataagcaaaagacagtgtaacagagtgaaaaattgaaatatgaaaaattatgaaagacggaaacattcagaaagcagattttctgaaattgtgtttaaagacagataaataaatatgtttgaagatggaattgagaaaaaaagatggaaaatggtcattgctcacagaaaaagattcactaagcttattcttttgatgtgatataatagtgatttgatggatgcagctaacaaaatgtctacaaaaagcccagtggtatccattaatattgatgcattgagtttcactaaccgtattcatggatgtattatttctagcaccttctgtgtttttctttttgtatttggtccataccagcgtgttgggtgctgtccatggtactggaccagcgttgcttgctagggcctgctgtttgggagattctagggatggtttcctcctcccaaccgcaatggccctgttcctttatcttacactgtgcttgaattgtaaatacaacttgtgaatttattagtaacatttctagttattgtagtttctaagtatgagatctcagtggagatctccaaacttaacctggctaaaactgagcttttatttttctccaaaccagttcctcctgcagtctcttccatctccgtcaatggcaactacatcctttgttactgaggctgaaatcttcttataatccttgactccactctttttttcacatcccacatctgtcaggtctgcctttaaaatatattcagaatccgaccagttttcaccacctcactgtggccatccttgtgtgagcccccatcatctctccctgtaatggacttctaactggccgtcctacttatgtccttctacttccccaggccaacttttaaagcctgttctctatatagtaaccagagtagtcttgtaaaacatgtcaggtcctattactcccttgctgaaaatcctctgatggctttctgctttagtcagatagtaaaagacaaagtccttataatggctcttacatcatctggccttcttgactcttcctcatgtaccctatttcagccacacaggcccttttgatgatccttgaacacacccaattatgtttttgctttaagacctttgtactcgcgattccctgtgccaatacagatcttccatcattatatgcatagctaatgtccttactttcttcaggtttttatttaaaaatatctttttcattgatatttttcctggtctttctatttaaacttgttaaaaagaaagaaatacccccccataacagcttatattttaaattaaatgtatctttgttgtttttttatccctctaagatgttggctcaatgaaagtaggaattttttctgttttgtctactgctatgcctagaataatgcctgcatagtaggagctcaataaatatctgtcagctgactaaatgaatggaattatgttaacagatgaatgattttagcggaaataaatgtcaatatttgatgatataaatatatatattagattataatcatttatcagattattattttagataataaaagcatttttagcattgcttgatttatggttaggattctgtatttggaggtgctaaaatgggtaagaagtccagccattgcagatgcagaggcctttagctgaagctctagagctgttggggtccccaggaaaaagctcacatgagatctcctgatgctacgcttctggccttcattattcacccccatttctaacatatatatgttggggggaagcttaaggttttcagtggtgtggggctacgacgggtgtcccttcacaccatttcaaatggataggggtaagttatatctagagtcttagttccagaaacaaggttgtgatacatactcctgttaaaaaatttttttttgattaatgtgcaccagccactaggggatgctagacactcatattcagagtagggtccactgtctcattgggcttggcaagaagtctggtctacctaccttcagaccatttcattatttgtattctttttagccttttgtgtaaaactaacatttatttaatatttcctccattcctccttttttcagcacattccccaattggagaggggtattttggatgcatctgggttcttgcttttaggaactgtgtttaatcatggaaacctcattcctattttccaagtggcagtgactcatgcggggagagtcaaggccctgggtctctgctagtgctttccccatcctttagcatttcttcactttgctaaaaagcgtaaaagtcttttcagtgattctgtctgtgggtgttggaaaaagattttaagaaaaatgattttcaaaatgactagtatttacacgtatgagtccctatcttttcaagtttttagtttcatgccactttaggaaaataatagcccatgcggtgccaccttattctttatatcttttacacgtgattgattgtaaaggcgatgaggataccagtatccattgccaggaggtaagcaggaatcagataaaagcaaagggtggaaggtggagatagaaatacatatatgaataacattcttcttctctccaacttcatatagcttatcaaatccttaatttagctttgggaggctggtggatcacttgaggtcaggagtttgagaccagcctggccaacatggtaaaaccccatctctactaaaaatacaaaaaatttagctgggcatggtggcatgtgcctgtaattccagctacttgggaagctgaggcatgagaatcacttaaacccaggaggtggaggttgcagtgagtcgagattgtgccactgcactccagcctgggcaacagagtgagactctgtcttaaaaaaaaaaaaaagcttaatttaaactttgatcttaggatgaaataccctcatagtgtgctctgctgttagagattcatgtgggaaaaacatatatcttggtttctttaaataaattagtagagggaaaagctgaatcgacatatgttatcatataaaggagttaaaatcatgttctttggtgtgaatagaccttggtttgaaactaaactctgctgcttattaggtgggtaacttcagagaaattactttttatctctcaatcctcagttttcttatcattaaatgagtttaataacttctatcccataaagttattgtgaagattcctgggaaatatgtatatacatatttaataaccatcagcacaaagaatggcatgcaatagttgctctatagaagttaattcctttccactttcatgtcaatatttttaacctagctgttagatgatctcagatctcagtcctagtggaggaatttgaactggactttttcctcccttaacatagtacaatgtgtatgtaaatcactagtaggaattctgtcattagaatttttaaagtgtaagttaaagttaatattttgctttatgaataagatatttttgttacttctgggtggatgtcaaggaagaaatcagtacaaggtaatcccttaatatttccttgaaatgtatgtttgtagtattatgcctgattgtaatagcatgggcaaaatcagttaaaatatagtgagctgcacacaaaaccttatatgaaattctttctttggcttgataaatgccaagacctaattctttgtgaagtgggtgccatagctttcagtgacgttaatatcattcatgtaaaatcattgttcctccagcatatttttatgggtctcagaggtcacgtgttcacagtttgtgtaagaaccagcattgtggtggagtggtgacagaattgcattgaaatcgtggctcttctactcaataattgtgtgatcttgaacaagtctgttaatctgtgtgagatacagctcttagacatataaagagtaggactatagtcattatgcctattgcatatcattgtattgatgcttaagtgaaagaatatacatgaaagcagtttatgagctctcaagtgttctccaaatgggagatggtttctcattgccacatttctggctgctgctttcacttgtcaaaccacattcctgaagcaacacagtttgctgttaaagggagaatatttaaggggcccgagatgctgtaggaaagccatctttctcttctttcttttctaaatggcagcagtaagaggtctgtgagatgggaaaataggggattaattagaagatgattctacatttgcctgagaagatgaatgatgtttaatgcgctttgagaattaggcagtgctcgggagtccattttatttttctacttgagtgttccagtgtattcgttgagtaagacctagacagattattttaccttatcccaacatgcctttctctttactttgggtaagcccaaagtgtaggttctgtcatcacagaccatcagccctctgttcttacagcagatgaactgccccgggactgcttcttgggtaataatggacatcacatgggccatccagccactctctgttggttcttatgtcatccttcctgctcagacagggatttcataccagatacttctcctgccatcattgtgatccagctgctgagataacgtttcttacattttatttcattactctagcatatttataagaaatggttaatttgacttgagtttatcagtgactgtactgtgagctcacttttagcttaagtatccactttgagcacaaaagtgtggatttttttaagttatttttttcacttttaatgagtataccataagctcttataaatattatatagaaatctgtctcttatggaaagtaagctagacccattcctcagtgactagcgtaaaaatctatttctgcctcactaagagtttaacatatgtgtaccttttataatgccttgtaacttggctaaatatgccattttgaactgatatttaaaactgtataaagatcctgtggttattgataaaagtacttgatagaaaatgctgtgacatttaaaattgtcaggctgtactggatgacttttccttgaggttgttgcagacactccacagtcgacatttagtttagttgctatttctggtggcacgtgtcttgcatgggcctcatgagtatgttgacacttgcgtattgtgcatttaagaagtacctggagaggactcctcccctgtcaaaaagttttctccatcagttttcctatagacatttgctacaattccaggttaatttcttttgattttctgtttttgaacaggttattttatgagtgaagtcactcaatgagtatttcttgtgttcctattatataacaagtcccgtgtagggtctatagtcaatcacttccacctgtggaaaaataattagcttgtttggatggggatagggagaaagaaaacaatttggggagggcactgggctcctcagtgtggtaacacaaggctgatggagaggaaaagagtgtatgaaactttgactgtaggagatgcttaatatgtatttattacataaaatgtattaaaataaacttgtggttctagcttcattaggttgtgataaggtggaagggccagtgtcctgagtgtcagaaaacatgggttttgcatggctagccctgccacccagccacttagctgtgaccctttgaacaagccatttcacttttctgggctgtgacttctttattagtagagtgatagagtgggactagatgatttctaaaattccagactcttctgatttttttcctgaagcatgccacttgcattttaatgaaaatattgattgttaatatttattgagaagtataaatgtagcgggctggtaccgtctttattcccatattacaaatgattccatttgtaagttaacaatccttaaatctgttctggtgtcagagccagggtttgaactgagatccaccagtttcaggtatgcacatgtttatgcaacacagcctccagaatgaaggctgatgaagacagggacgctcattccccaccccccaatcctctgtgtaagctttgaagatcactctggaagagtctacctgtcatgaaagaacgcagatgactttttaagaatatttatgtagtcttatatttcagggtacctgagaggccctttaaggtcctaaattattttttgttctatacaggaatcctttctgtaaaacccttgactaaaactgtctctgctaaaggatgggtattggcaggtgttggggtgagttgacgaaaaagcaaaacaatagtttctgtgaaaatgcatgttaaagagaattagcagtaaatgaacgtgtgtttccttaaataacccaacaccccaatccacctagaaccgatgacttttgctagtttttacccatcacctcaggagtcattctggtttcttggaaacgtgtaaagtatctgcttagggaaatattattttatgttgctgatgttgggaggtagcatctactttagttgaggaatagtcagctaatagttcttttctttgctgtgcttttgcttatgtatttgttcagacctgctgcttaatgatttcagctggccacctgccatgtcaaaatcactttcctctcaagatctgtggaaccaattttatctgaacacaatggaaaggaactcaccattttgagctacatatggtcttaaagataccatcttaaataaagagaaagtgaagaaaacatggtttcaatcattagtttctttcccagagccactttctccacctctaatatattgtttattttctgctaacactttaaacacttatactcagttaatatttcaactcttgtgtgaggaattggtttttatgctttctagcagacagattgcctgagactgacacttctgaccaagtaaaataagcatatttaaaatgctctgtagcttattttcgcaacgtatttgtgaacactagaacttccatatggaagggactgggggagaggatgcacacagtttgaaaaactattcaggaactggagagggtaatgaaaatgaaaaaatgtaacttatggcctccaatctatcttttcaaaaagtaattaaaaactgaaaagcaaaagaataattacttcttagtttaatacccccattctaacacctgatgtaatcattagggtttgatgcagctcaagataaacattgtataaaaagagtaatatacaaatggaatatattgtcattcacatgcataaatagattagcttactattttagagcactgattcactaatttatattcaaatttgtgtttcttacccaattcatgtttctagcctcacttccattcctgagtcatagtcaggatgaatagtcatagcctgaagatttaaatttagatgttctaccatttactacctcataattaatctcaagttttattcaccacccctccaattaagaggttcttctattagtcatttgatcttctatctcagtcttgcttacactcccttgaaaccacactttgatcttgtctcaaatctaagctccacctttgtcttactagttgtgggttcttgaggaaggtgtctagcagagtgtctggctcatagtaggagattttaaagtattgtttcttttttccttgtctcagagcctcatccttccccacccatccagatgatcctgttcattattcaaagactagatctgatcacttctcttacatggaccccatgggacttgcattcttctctgagccaaataaggaaacgtatttgtcccttaataaatactctgatttattattttctttttcatgttgtatcattggagtttttggatacaagcaatagaaaggatttggctgacatgggtaaagagaggaccttttgggagggctaaggtagctcactcgattcaccagtctagagaaccaagcttgggaatggatgggaagcaaagaggtatcacatgggtgagagacgaggaatctggtgaacagtctcataacaggagcagttgttgagcaagccaccaccaccgaggtgaatgagctctgactgcttcttccactgttgtggcaattgcttagggtgcaaataagaagagactgtgtgatgggttcagcccagctacaccagggcagttagtggaaggatctgccctttcgactgccctagtacgaggccaggcacctgaacttattatcaccaaagacttcacacagcaggagacacagaagtccctgaaaggaagtctggatgctgttaggaaggagaaactgaattgcagtgaccagaccaccaaaacgttccctaccatttttacccttcaaactctggaaattttcatttcctgaagagcatagattgtaattatgctaggttttggagttcctaaagtttgtatattcatgacatatttattaaccctttaatatacatgtaccaacatttatctgaggtgccgtgtatatagcagtgtatacataaacattcctgtcttcctggagcttgtattttggtggcaaggtgaggcagtcaatgagcaagattagaaaaatgcagcttgtattagtgatgtgtgatggaggaaaagatgacatggcagggcaatagaaaatgctatggtatatgacttgaagttttaaaaagtgattggagaaggtctcactaactaaggaggggacatttgaacaaaaactgatggatgtgaggaagctagcaatgcagatatatgagggaagagtgatccaggcaaagggaatggcaagtgcaaacacaggtgcatgtgttcccctggcacgttaaggaccagcctagaggtcattgcagctggagtggaatgaaggagaaggaaagtagtgggagatgagatcagaaatgtaggagggaaccagactaccatagatgcgacacatgaacaagatgtggcctctgcttccaatggccttgtggtctaagaggaggcacagatgtgaaaggacgtacttcagtacattgcagcaagcaccaaaattaggcagagggtgcaggctaactgcacccaggcaggaggatgggcctggttagatctctgcttgtctgtgagctctttgagggagtgatgtatcttattcattttgcatcctgggtggcttgtagagtgcctgacaaataccttttgtatatatttttgaattcattttgagtggttgaattacagatacaatgggcataatgtgtgagaaggagcaggattttccttaatcacagacagaggaggcttagggaaagagattaaggaaaataggaaagccacagacggttgaagagccaagagttgaatctctgcagtcttctctctactcggtactttttctgtccttggcatcattgctttgatgttgtaaagtattgaccacataaactactataaaagttttttgagaggtaagcataatgtctatattagttgcatgatctgcaacatcaaggtagttgattattttactgcaatttaggggtttgatttactggcttatttgtgctgttttttccccatgtggacggttttgtgcttgtctttatactttttctctacagggcactcaaggaacaccaaaatgtaaaatagaaccacaccattgtatagcagctgtagacagatatcagtgaggctgataatttggatttttctattgcaactgctactgccatctagtattatctaatactgagtggcttcttccatgatgacttcttgaattgtgaagtggaaatttggtagccttatgtaaccaagcacttacattatttaattaagcaaggtgctacatgaatcaacaaagcaacacaagctgaatatcaggaaaacacatttcaattagtgacagcaggaccagtgcctgaaggccctattcattgggtagaaaatatgacaatgccagggaaaaatgcaaattcatttcttataatattctgtgtgctgaactgctaaactaatatttattagtaatcttagagtcagtagtctttgcatatacgttttacttcctttcctttatatttcatttatcaataagtttttggagtccccgtgggtgaaaatgttgatctgttagggatttagaaaatctagtaaaagtttgcctgggctcagaagcttattaatctatttgaaaaatatgtgtctgccactgtactaggcattaagcatacaaaaatgaataaaatatgaagtctttttatatatatatttttattatactgtaagttctagggtacatgtgcacaacatgcaggtttgttacatatgtatacatgtgccatgttggtctgctgcacccattaactcgtcatttacattaggtatatctcctaatgctatccctcccccctccccccatcccacaacaggccctggtatgtgatgttccccttcctgtgtctttaagctctttctgaacaggagagaagccacaaactatcatatagtgtgatacgggctgtgatatagaatatctgggagtgctttgagaacctacaggaaagaggaggtcttctaatgaggtcataggcaatgcttccaagggagtttttcttcaaatggaggaaaaggaaaagggattctaggtgaagggaataggatgacccaaggtctaggagtttgaaaatgatggcacttgaagagatgcatacaagaatgctgggctgagggatttgcatttgccccataggtagtgaggagccaggagagatatgtgatattccaggttcctgtggatgaaccatccaggtgaagacatcagaatacagtaagagtcttaactttgactgcaggtctagaactcacaagggaagctggcttgataacatccccaaaggagagaatttacattgaaagaggaaggctgatgacaagacattagagaaaagcaatattttaataggtaggttgaagaaatgatatcagagaagccaggctttgccttgtgtttggaacaggcctgccagtagatgcctttatagtaaaagataaataacaataaatgaaatgcttttattgttaataaaaatgttgatgatgatgacaatgatagtagtagctaatacctattgagcacctactctgtactgggcacagctctaagaatttttcatttaatcctacaacaaccatatgagataaatagtactgttataatatcattttcgtttggcagataaggaaaccaagatgcagaggctttaaagtcagttgtccaaggtcacacggctaataagcaatgggtttaggacttcaacagtcttgcttcagagtttacactccctatctgctatcgtatcttttaaatagtctaacaactgtttgggagatgtcttatcaaaattgctctctcgaccgggtgcagtggttcacacctgtaatcccagcacgttgggaggccgaggcaggaggattgcttgagcccaggaatttgagaccagcctgggcaacatagtgagaccacttctgttaaaacaaattaaataaaaaagtgctctctccctgggagttcaagatttcagtgagctatgattggaccactgcactccagtctgggtggctgagggagaccttgtctctaaaaaaaaaaaaaaaaaaagctcgctcatacccaaagtcagggcaataaaggtttgagtggtcaaataaagggttgagtggtcaaagtcacataaaggtagagcttcaacagattatttttctttagattttcaagtcagcatgaggttgtctgatacaaacatcatagatgccatggttaaatggttctgtttctcagaaagccccctttcttcttataactgccccttcctttttaacagaccagcttagcctgctcagcatgagtgagccttgactattcaatattccacaggcccctatagggcctgttggtggccatggtagggggcatagtggacttgctgatccttgtgattattgagtatgaatttaagatgcacatggctgaggctggtggtggtgaaggtgcgaagatacagcagcatgaatccaggaggtggaggatgcagtgagccgagatcgcttcattacactccagcctggatgacagagtgagactccgtctcaaaaaaaaaaaaaaaaaaaaaagatttgcaagagttaccacctgctgctataagactgtaaagagcatggactaaaactgaatgggggtatggggtgccaccttggcaggagttgactgagcctcaaggtttgtttggtttttgatgattctaagctgacaatcatagggaaaaagaataagagtgcacattcagtttaaaaccaaaatatactcactatcagcatagcaggaatacagaataagaagtccacagggcctggaaaagtcagaaaagactttgtcaagggaaagagattacagctgaataggtggaggagaaggtagcttgatcaaaaatgtgctgttgggaatacatatggtaaaaacaaaagataaagagactggcccaagcatcaggtcagatgtgtggagaggaaggtggaaaataaagtttcataaataaagtgaggtcagattttatggggccttcaaaggagttcgatgttttagccatgggaaaaatggggcaggtgggaatgcttgaactaggaattaatgatgaaagaggtatttgaaggtcattaatcctaatatgttggattgcagagagactgcaggtaggaagggcagttagaaaactgtaattatcaagtgtttgagatgggttaaagcctgaaggaagatgtggatggaggactgagaagcaaggagcaagtccaatgggcagtatagttagatgaaacagaagggagactaaaagcaggttccctatcttgccttgaggattagaagactgaggacatcaccaatgaggtacttaggaagataagcctattttcattattagttagaaaactattttttttttctgaattgattctcctaagaattttatactgtattgttttcaagatggacatcattctgtctttgggatgtgtcttatacttctgctggccaggccgtaattgtgatatcattgcttttgattgtggatttgtaccagaacttgcagaatgggggccagtggctcagaagaaaatctcggagataatatgtgatctctctttgaggagatgctgtagtacctccctcttgatggcagagagaatgattttgtgtggagaagcacagaaactgaaaacaccaagtcacaatttatttagtagattccaactgcaaataaagaaagtttagggataccttaaccagtttatttctttgtaatgtaggtacaagaatatatattacaaaaaacaatctgggcaagtttaaaagcacattttaataaagataaaaaaattttaagtgataaagtattctttcatagtttaattggcctttttttcattcccagtacatatggcaatggggtatcttacaatcagtggcattttcaaataaataaggtaaaatatccaggacccactgcttgtttgaaatttgcttgctggagttaagagaagtgaacattttaaagattttttttttcctttagacagaaccttatttcatttgtgaaggctgactggacttggatgctgcccactagttaatttagtgtggcaaaaaataagaattctgtgtctgggcttcactgtctgcaaaaatgaatgcattattgtaaaatgtgcactaatctaaaaagtgtattgccttcctagaagtctgagtaatgtcttacacacataatcacactgcccgtcttcatatggacatgagtcctatagtgcttgagaaatggaaattatttgactgcatcagctagtgcatcgtacttctggttattttgaatttttgtaatcagatgctgctgaggctgtggccttttccccacctcctctctcatacatatatatgagtggtgtgttcagtgaaattttctgacatgaaaaagaagtccttaaaccaaaaataataataataataataacaataaagggaccactgtcttagaaaacattagttacccgttctctttccttctcaaggaggaatgacttcagtgcaattaacaatccgtgtctttgtgtcccagtttgatcttgcccagtttgaaacagcttgcactactagattggttcttgtaagtgttgaaagttcttaattacaaattaaatcttgatcctgtaacttggtagtaatcctaccatctatatataactttacgattttcagaggactttctttattgaaggcagtatgaagcaggaagggcaggcattgtgccactttacggttggggaaactgagacacagagagagtaaatgacttgtttgggtcatagcagttagtagtaaatgtcagaggagggatggaacctagattgggtgactccttgttcagtgctcttttatttttacttctcctgttcatattgaattgtttcagaggttggaattaggaacaaaataaacctatatcccattttctgagtcacagtccctcagacatgtgaaggcagcaatcatgagttgttgtttgttttccagccaaacatatctcttttccagactgtagtaacatagagaccccctcaaagatccctgatgtgacagaggtaaagacatttactagagtcagaggtcagctttcttacctgtgaattggccaaaggcatctattaggctatggaatgttaattatttcctgcatttgtctttggctagccttctctaaatgcaccataactcacctgaaaaactaccagatcatgttgtttttgagttaggtcaccagccctcatcaggatcttttaggcatgcctggaacgttggttgacaaaatccaatgaaatgaccacctatttttctctagccagtgagtcttaataggaggtgagcaatgggaacacctttaaaaaaaagatgcctgtgcctcatcatatagttactgaaccagaaatgaggggagaagatctcaaagatggatattatgatggtaaatacacttgggaaattctaatgtatccctgagataccactgtcatactactaaagcctaaaatgacatttaaaaaaatgctaccacctatttttattggctcatacaaatcttgtcatcatttgatattgtcatgacatccgccaaaattataactgacccaggtctccctactcatgtacatattcattcattcaacaagtattcattgagtacctggtacggtggataaggtagtgaataagacaaagtctatatcccacagagctcgtattctaatgggtaagaaggcagcaaataaataagcagaaacatctcttaggtagtggtaaatgctacaaagaaagatgaagctgggtgaggagatatagaataatgaatagggggttgcaagctaccaaaacagaatggtcaggaaggctgaggtggtgacatttgacagtcctaaataaagtgagggagcataggaagatccagggtgaacggtagtccaggcagagggaacagcaagtgtcaaagtcctgaggacaaatttggactgctagccttcatattagtttaaaatcattgtttgattttataagacatactagcctttcagaaatataggatataattgatcagggcctgaaggatgaactcattttcttctgttagctccaggtacttcttaacaatacttaatctacttttgctgtttgctctttgtagacaacaatgcagaagttggatgcatcttctatgacatttttggacttgtgttttaagagaggtacattgcctctttggggatctggaatcttcctgatagcgagtcagcaagattggtgggcccaacactggcacatgtctcagccaaattctctgtgtagcttctgacaaatgccaaactactggtaaatatccaccccccccccccccccactgaaagccaaggacaataatattctttattcattttctggctctgagtatcttttctttttgtttttgcagcctaacctttttgtcatctttggcatttttcacaggctccagctcattcctggctttagttgaacttttctgacattcttcatataggtcagtgctactcttatatttcattctttgttatatgattctccttccatcttttatgtggttgttttgaagcctgaacccctcagaaagtttcctctgtgaccacattattttctctggaagcctgctcttttatctcccctccgcagctgtttgcaagtgtgtgtatgtgtatgtgtgtgtgtgtgtgtgcctgtctgaaatgttttttagaggctcattcctttctgaggtaggtaggttcctatttagaacttctgagcctaacatcatgcttagtttacttctaattttaatgaacacttttattaagatcctgtcttagttcatgtgcactgctataacaaaataccttagactgggtaatataaagataatagaaatttgtttctcccagttctcaaggctcagaagttcaagatcaagatatgagcagattcagtgtctggtgagggctgttctctgcttccaaaatggtgccttgttgttttgtccttacatggtagaaggtggaagggtaaaggggcctacctcgatccctttagcccttttataaggcacgaattccatccaaaagagtagagcccccatggcttaaccacctcctaaaggccccacctcttaatactgttgcacggaggattaagtttcaacaagacttttggaggggacacaaactttcaaaccatggtatattctaaatttgtgtcttagttcatcctttctctttcacaaactccaggatgacataatttatttcctccaaaatttctgtcacaccagcatcaccttccagtgacttcttcttcttagaattatgatagaggagctgttaatcttcttttatagcatagcaattgagaccatgggaaaatctgggttcaagtccaacaccaccgcttactctctgggttggctgtaggcaaattgttatgaagactgaaatagtgcacaccaagtgctttaggaatgtgcttggtatatttttagtcctcaataattgctagtggttaccataatcattatcagcatcaatatcatgattctgagataagaaattattgtcaagctaagtcaagaatgaatagattcactaaacaagtatctggactgtcgacattcccctaactataatattgtaactctgtaaaaatatttctaatctatactcagaaaatatccttcacaccttctgttcctgagagcttcaatgtctttttatacagcagtttaactgtcctcaacttctcgccccaaacttacatattcaaacattcatcaagatgttcaacagaataaagggccttaccaatatcaaacaagcaccctttaaaagtgctctgtaaaattatcctgtaatttagaagacaggtagacgacgacatgaccacataaaatcctgttattgttaggaatgattactactccttcaaatacatacaaagtcacttttaagttggttaggcttttgaataaggagagaggaatggctcaaccagtcattttagaataaataattatcccatgctgatagagtggaatggaataatctgagagtgattgtgggagtttggacttcaatttgaaatatacaatgagttgttcatgttgaaaaactgaccaggatgaaagactgttggagttattagataattctcttccgatagaagctgagctaaaaataaacttcctgtttacttcctttcctttcatctaaagtcaagacgatgcatgtcaaagatggctgtgcttcattcattcattcattcattcattcattcagcagttatttattgagtatccactgtatatcaggtactgttctgggcattagaattacagaggtaaatgcaaggtgcctgccttcatggagtgtacactgtacaggaggggattagatttaagcaagagaataagccagaaagataatttcagatagtgttaaggcctgtgaagaaaagagaacaggccaatggaatgggtagtgcaaagagggaggaaatgagatacttagagacaagaatgatgataagtttcagatctggggagcattctctgaggggaaactggattttatattctatccagtgtggattgagaagccatttagaggttgcaagcaggagagtaacatgttctggatttcatctcacagcaattcccctgtgttcttaggataatgtattggaaataaatctgactggatgtgaggatgccagttaagagtctggtccaggagaaaaagggtggtggattggatgagagttggggaagtggggatggagaagagtgactagagtcaagatttattttgggttctgaagtgacaggaactcccaacagacacagctctgtggggtggtaaggtagagggatgtttctgacctgcctgtctggtggagggtggaaccctttgttgaaattagaaaggtagaggagctggctttttggagaggatagatatagagagtgaggaatgaaaaattaaagtcagggctttaaaagcctatgaggcatccacgtggaggtataaaatagtcagccggagggatagtcaaagcaagagggaaattggggaacattagcatgttcataatattaatactatgggaataggggagatcaacaaggaagaacgtagagagagaagaaaagaggacccaggacaaagccctggagaaattaattagtgggtagagaaagaggatgttgaagactgaaaaggaacagcagaggagttgggaaaaccaggcagatattttattgctaaatccaagagaagagctttcagaagttctgaaagttgtccaccatgtgaagttctactgggagattaagaaccggagagcaggaaaggcccatcatagtggccagatggaagtcattgtgctgtaagcaaaagtgttttgagtggggtgtaggtgggtggagaaaagattacagggagtgagagagtgaatgggacgtgaggaagcagatggagatggtgagtgcacatagtttttcaaagaagctgtgaatgggcggaacctggaggggatatgagtcatcacagaaatattagacatttctgagatggcacctgaaagaaaagttgacctgggagaggactggctggcatatagtaattactctggggtttaaagggtaggaatggcttgaggttaaggtctctgacctctttttagcttaggacaatctctcttcctcttttgttcctcccaagaggacgttgtttgagcatccatccatgactgaaacttgcctgtccttgtacattttagtaacatgagccaataaatttgcttatatttttatagcttaagatgtttgcaatagagtctttttattgtctatatggtacatatgtctgtatctatgtgatacatggctacataatcatataaatatattgtctacatggagtttctcagaattaagaaaaagcacaattactctgtagttcaccctaatagttatctaaactaaggaaagggggaataaatgaaaaaaagtaacattttatcataatgttgtttttagatagcatatatagcatttactttaccagttcattgtaagttggcaaacatttagaacttgaaatgaaatcagagctcatctggtttagtttcattgagtagaggaaatggaagcctaaagggagtgaatgacccatggaaggaaagaacctaggacctggctttcaacctaggaaccagagctttggagtaacacagacctgggtttgagttctgcctctgccacccatacccttgaaactctgggtgaattatttagctgctctgtgtttattttctaatccataaaatgaaattataagacattgatcttgtagttatgaggcatatatgagattgcaaattaactagcaaggcgtctagcacatagaaatcccttgatcagtgttaaatctgtagtgtcccaaaaccttgaatgaattagtagtaagctgaaaaacatgaagatcatcctagtatataaaaatcatactttcctctcttgtcttcttactgttagtttttgggtaaaccagtaattccatttttcaacaaattatttggataattattgattcatataaagttataagaaataacagaaagaacttgtgtacagtttcccccaatggtaacattttgaaaaacttaataaaatatcactcaataatttgatgttatgaacaacaaatattttactggtgctaatatctattaaaacatcagaaaattcaattttatgtaatttgggactaaagcaatatcctgaatttcagtatctgttggaaccattagacaaatggatctagtgccacagacagctgactttgctctgacttggtgaccttggccaaggcacttaatttttatgctctagagctaattataaattgggacaaaagtactcatctctgcttaattcaggggagtgttccagattaattcgatactgtgcataggtatcccctggctatctctcctgccacctttctttatatactgtctatgttttccttttccttctttgccaacccataatgattttctcagttttcaaagcacaccatgttttatctcgtttctatacattttctaatgctgttcctccatgtctatcttattcccttcctaccctgcctcccaatctatacatacacttattcttcctcctcttctttccttccacacccccccccaacttctacttaatttttgaaatcacaacttttacaaaatcttcaggggaagctctgcataacccccagaccagattaggtcccagtggtgtgttcccttagcatcctgggcctccattcacagcactttaccccatgtccttattgtgctttgtctagtgtttgtttttaccagtatgtgaagtgagggcagggagaagattgccttattcaccacttcattgtacttatcacagtgtctgccacagagtggatgcccagtaaatactcattgaatgagtgaatgaatacatttaataaacatacacttgcttttttggaaggaaacgctgtgcagatcaggtggaactgtgggtggtatttctatttagtatgtgactcatctatattgaaggctgttaaatgtttaaagtgtatctttgtatggtagtttggttttccttatttctttcttttgttttcatgtcagaattactgtgtaattatgtcttgcaaaacacctcaaatggtggccaagataattttttttttttttgaggtggagtctcactctgtcactcaggctggagcgcagtggtgcaatctcggctcactgcaagctccgcctcccgggttcacgccattctcctgactcagcctcccgagtagctgggactacaggtgcccaccaccacgcctggctaattttttgtatttttagtagagacggggtttcaccgtgttagccaggatggtctcgatctcctgacctcatgatccgcctgcctcggcctcccaaagtgctgggattacaggcgtgagccaagatgaattttaatagggaagacaaacccaaaatagagatgaatgtttactgtggtgcattaaagcattaaagagttgtgaatgtgaagctctccccagtctttagtaacatcaagttatcttggtacaggaagcaaatagccacttctcattttgcctcaggtggtgaaaaacttcccattttaggccagttgagattgtatgtgctgtatggctatgaatgccaaatatgagtcttaaactccaaatatgtggctgagctaaaagtaatgttaaattgtactgtctgctttggtgtcttataatgacttaaaataatcaaagtaagaagaaatttttgtacctatgtcaactgagatttcatttgttttttttctttttcttcctgtagattaggacttataaatgttccccttcagagtactagccttgatttatcccattgttcctgccttttgctttctctgtctctggtgttgggatagcccaataaaaccaactttcttctatactcagcaattgcattgggagggaggagcagagacttttccttgtttcatttctagtcactaagagggtattttgagccttgaggtgtatatatcagagatcctagatacctagatcctatagttggtttactatcagaatcaccaggcaaacttttaaaaaaagtgcagattctgggacccatgcccaaaaattcttattcaataagtttagggtgggactgaaaatcaaactcttttgatgatactgatgtataaccaagtttggaaactactgtttgggaatcccaaatgcttgaaaccctttgtgagtctttggtgtctttgggctaaaattccaaaccttgagcatggtcctttgtggtctgacttctcctggtccattgctccagcttcttttctgcacgcgaccccctcacactcttctactgagccatggtaactacctgtaggttactgattgctcaatggattttcttaacttttggacatggtggaacatgttttgccccctccatgtcctgggtaattcctgttgtcttttggacttctctcacctactctgatagagctgggcttgtctgggctctcctggtgccttatctcttccctttcttttcctacttatcacactgtattgatttgtcctgcacatagtgggaataaatagatagttatgaatggaataagttgcttgctcagttttctgtctttcctactgtattatgagctcctttaaataagacctgcatcttttccactttgtaggcctcgtgcacgtgttagcatgtggagagcacttaacaaatcatagttaaacatgtaaattaataactgatattgaaaataaaagaatcctgtcctttgggtaaaagatcctgcagtagttaatgttctgagctggaaaacatttgcctattacaatagacatgtattttactagaatagaaaagaacctgggccataaacagtaattgagattgggaatattaatagaaaaacagagaaacatacagttaaattgttctgtatgtattttcaagtgttttattttattttcatataggtaataccatcgtatgttacaaattttaaagataaaatagtatacagggaagaaagagtctccttcctgcctcatttctcagccaccaatttctccaacccagaggcagtcaacgttttagttttatacctttcacaagacgaatggtaacataggctgcaggctgtctgtttgcttttttacttactggtttgtcttactggcaaacatctatataaatgagtgagtacacaaggagattctttttatctctttcattgtttcaaagtattccactctatggatatattccaattcattttactagtccattattgatggatttttaggtgaccgttttaaattccatatctgtgaattcattttttcacccatgtcattttgcgcatgcacatgtatatgtaggaaaatttttagagctatattttctaggtcattgaatgtgtgctttgtaatattaccaaactgccaaaatggggattatatcaattgttctgttaattgtcaccaccaacctcaaatacctgggaccttgtgggctccggatcaattgttctgttaattgtcaccaccagcctcaaatacctgggaccttgtgggctcgggccatcaagcagatggtctttcagactgtgcaatgtattctgtaatgtgtacatttggttgagatgagttgaaagtatttgagagtacctggaactctgaagctacctcagctacctgaagcaaccattgaggctgaattttcagaatgttagtgtttatctattaaattaatcgtttatttagggatatttagttaataaataaaataataaaatgtaaacattttctcattggagttttatcagtatttctgccattgatccttggaaaggggacttatatatgattagagtcaggaatttggaaatcataggaagtaacagcaaagttgacagttgactgaaataattaaaagaaggtctaggaggacatggttcttccttgtacacctactggtcatgcccaatgaggagagtcattcctcctatgctttccattttgttgaaggatcataacaggctgcactttctgatagaatttcacatagtgctggagccaggttcaccatcattttctttattttggtttgcatttctgtcttgaggatctaaatttttttcttaggtaacttttctggcatcagaaaattttctcaggcatacattttacctgaaatacttattatgaacaatgaatattaatcattctattgagactggcagaacctaggatcatgaacaccacactttaaatgtgcttttattttaagtaagagtcatttttttctgggatttttaaaattgttgataaaaatttaggaaattcagaactatattttgaaaaggaaagaaaatgtttctacctttatcatatgaatgcagaaattattgatatttggtatgttttctttgatcttgattatatagatttcttcacattcttaaacacttatactgtgcaatgtatgtagcatcctgaattttcaactatatgaaaattacatattttttcaggttaaaaattattttaaatgattttaatgagatattaatattctatattatgcatataacataacatatttaaccattctcatattgtgggatatttgtgtttctatttttagctcttttaaaatgtgctgcagctaataacttttctgtgaatgttagtctatgactatcttgctatgcatattgcaagtggaaataccagatcaaagggtatcaatattttttaaactctagatacaaaaatgccaagatgcttccagagtaagactctaatttatacctccatcatcaatttatgaagttgtccatatcatatattcttttaactttgtcccccattttttaaaaacatgcacaattatatcttcttgtttacattttaaacattattattagtgaagtagagtattttaaaagtttgttactcatttttctttccctttttgttaaatatctatccctgcctatccttttgtatttctgtctttaggagacttgctgctttttcccagagattttaatgttctttctatataaactatatttcaatggtcacagatattttctccaggaaattccagcttttttgccttttaattttctcagactgggtaaatttaagaatttatttatatgaagtctactaatcttttactttgtgaattctttctttgcttttgtgttgggaaatcctttctatattcaaagtgatgacaaatattcatccatattttctcctattttaaaaataatttcattaaaggataagttcttaaaggagtaattctataatgtatcaggtggtgggaaatgcagagaagcaaagtgaatcaagtagggggtatgtgaagtgtgggctgtgaaggaaggcctcgcttaccagatgcacctgaccagagacctgtggggggaggggagggagacaagccaacgtacctgatgctccaagcagagggatcagcaaatgtaaaggtccttagtgggagtatgctcagctcaagggctatcaggaaggcctgtgttgggggagcagaatgagtgcttgggagagagcaggtggaaatgaggcctgaatttcagaataggccgggggcaggagcattctagcctctcataaaccattttgggtgcttgggtttttactcttaatgacacaggaatcattgcaaagacttaaataggggagtgacctgacatgacttacttttaaaaaggattactttaactgcttgagaaagcatagatatctaaaagaaaatgtccaggcacagggatcctatgtataccctccttccttttgaaatttgtgctttcttgcttataaacttgctataatctatacctaatctattaaaaacatatttcaaataaataagaaagagatggatgtagcagttcagttgtgttcagatgtatgtaacaaaccctgctgcagaggttgaatccagtggggctttatttttctctcatcacaggaaacctggaggaagacaattcaggactagttcagcagctcaaggaaggcctccaggatacaggcttcttctactgtcctaaacatgtatgtggctatcatcctcatgttgacaagattgatgctttcctccagacaccacattctgcatcctaggcaggaggaaggagatggtcagaagacagctgaaactgtcttttcactaggaaacaaaccattttcctggatcctcagtagtaggcttctgattacttcatggccagaactgggtcataccactattccttgtgggcacgttgctgccttgaataccagctataccttcttactaaggaagatggaactaacagtgtttgtgataatggatagcctgtagaaaaatggatatagatgagtctcaaaataaaaatatacaaatatacatgtcctagtcaatatacataaaaattacaaaatctgtaatattccaaaacgcaaactaaaactgtcagttaccactttgtccgtcatgttggcaatttaaataaatcgataacactcaaagttagcaagaataggtaaaatgggaatgttttatggcgccagaggtataaccttcctgggaacaatttaatcattcatgtggtgtgtatgtaagtgtatcttattgagggtttgctttgcatttccctgatgactaatgaagtagaggacctttgtacaactttctaaccatttgaatttcccctttgatgagctgcctgttcaagtctcttgaccatttttctacttaattataatctttttatataaatatgaagaggttgtttatattttctagatacaagccatttgtctggaatatgcacggcaaacatcttctcctaataagtagcttgccttttcaaagctctcttaataatttattttgtgaacagaagtttttaatattatataatttaccattcttttattgttaagtacattgtatgtcctgtttaagaaatatttccttactccaacttcatgaagatattttctaatataatgttctagagatttgtttttaccttcatatttattaaaaagactgtcctctacaattacttagtaatattacctttgccctaatttgaatgttttcatatgcattggtttctttttgagcttttgcttctgttctattggtctatttgtcaatcactgcacctgtaccactctctcttagttaccatagtttttaaataacttttggtatccaaaatttagcaggttcttccccatttttttcctgttcagaacctataaagtctttcatttacctttactttagaaattacagcatacttccgtgacctattaacttccaatgttgactgaagtatgcataaatgttttacgtgtatatttatcaaaggctaaaggtagtatctctgtcctcttcccaaataacgcaaggatctaaataccatttaactacaatcttcccattcttacatataatattacaattgttcagtattttacttatacctgctttttgatactccccaaataaaccattattactattttgttgttgtttttgtagccagtcagtagttctaggtagacttaccaacatgacaaccagtttatttatgtattattgtttttgcattttccatgttccttccggattctgtctggcttctaagaaggagcatcttttatggacagttctgagtgataaaatctctctggcttactttctgaaaaatatctttattttgcttcattcatgaatatagtgttgctaagtatagaattctaaagtgatagttattttttcttagttcttagaagataatctttttggatgtccttaggagatattttttcatcgctttctgtcatcttctgtagctgatgaaagaagtctgtcaatgtaattatggtttccttgtcaataattgttttctctgtttgctttagctgtttcctcttttctttggaagagtgcagttttacttgttgtgttagctgtggtatgtttagaaatactagagacccgtgttttccttctattatggaaagttttcaaccattactttgaatattctctcccttattctctcctcttttatttttagaatttatgtatacacagcattgagtattctgtgcctcatgtttcttaatgaatctttcatattttttatttcttcatttctccatgctgcattctgcatgattttcccaggtgtatcacctcccttattacctccctctttagttggtgtcttttttgttccttttcaaagcaaccttttattcccacagagttataaactagtcctttctactcattcactgtatttatctaatagtccattttagattttcctttcttcagttgtggggatacaaattattgtctatttttatctgcttaatcttcctcatcatgttccatttccttttgtgtttcatagcttttctttgtgagttcctcttctgcagaagttttgatagttgttgtttgtatgtacatttttgaggaggggattccatgtgtcctggcttctcatggactgggtggcattttgaggtctgtggcttcgtgtagggagactgaatgctagctttcacctcatgtggtcccaagttcatttttttttctcctcatacgctttatggcccaaacccctaagttctaaagtctaaatctaaagtccatttgaagtgcatcaattcctgcctcttggtcaggaatcaaatgccttctttgtttctatagctggggcattccatttcttagtttcaagcttggctttgtaatgctttctttgttgtatttgcatgcatcatttaagtgtgttagtaatgtcattttggtccatcgtatccttttttctcccctttatttgttttattgtcaataacttctactttctgcctttagctttaattattagttactaaaacaactttatgctaacatcagaggcttataaaaaatagaaaaatttccccataatcccatattgagtcaaaatgatctatttttattctctagatatccttcaaatctttattcatagggtgctgttgttacaatcatgccatatatttaattttgtgttataactctcttctggtttacattttgcccgtatttctttgtaatcttcaaattaccattttaatggctctatgatagcctcttgaattggtgtactctatcatacttacagagtttgttttctgtttttccttgtttatacaaatttccccagaatatttttgcatttgtagtgtttgcattattttctgcggctaaaatctcagaagagaggatgttaaattaaaaattcttaaccatgcattgccaatttgacctttgaatggcttttctcattttacagtgacattaggaataaattcacataccgacataaatttaatacctactgtgtgggaagttctgtgcattttgagtggcatagtgacaaataggacctgcttcaagtttcaaggaatttacagtgaaatcaaggatatagatatactatcaacttttataatattaggataaatggagcaagtggtacagtcaaaatctaatcaaagaaggaattttatagaagaacttgtatttcagccagggatagaggaaggggtggagtttccctgtacaaagggaggctggataatattccaggctgagagaacttaacggagaaacagccagaggtatgaaaaagtctacagtgcatttggaaactattgaaatcgatggtgtggctggaacaatgggtgagagaaaggagcttgtaggagacttgaagtactttgccgaaggattttggttataatcagccagaattttcatttctgccactaattgcaaatgctggtttgagaaaagcatgcactgtagattcatggtagcctgtgattggcagaacccaccagtctcctattttatagatgaaaacaatttctacggaaattaagaaaattttccaagtttacactaggagtgtatctgaaggcacacttgctccctttttcaagaaaaatttgtttagcatctgtttgtaactcagtagtaagtgcttggaggatagaaagtaaatacagtatagggtcaacttctgtagccagctgggggaaaaacaaatcaatatttgtaaaatggcaggataagacaatgatagaaatgagtaaagggtattttgagaacacagaagaggggaagctatttcagcttggcaagaaggatgaagagtggaagatggtggctctattaaatcataaaggatggataggaagaagcttgccaggtatacctcacccatggtgagggaagggagtttcagcctgagcaaaggcacggggtaggaatcagcatggtggatgtgggaatcagagcagcttcgcattgtggaagaatcacatgtgaggcagagagtggcaggatataaaaccagggctagatggtgtttgctatggtaagtagtatgggcttgatttttttagggctgctgaggatcttaaaatatttaagagggaaacttggcaggactttctgattgactggatgtgggagtaaggatgtgagggagagaagagcaaaatatgattctctggtagacttcttctttcttctctagttagtgagtttatcaagatttaagatggtagtggttttgtttcagcagaagccatgcagtgtggtgtcatgtggcagtggaaaaaccatcatggggcgtatggagactcaaatgttcctgaaatgcctgagagaacatccagggacatttggaggtcactgccagaggccatgcacattgtccagttttcagtggtttctcttcgttgctaagaagcttgaacatatacagaatgcatttaataatgttcagaaaaccttcttaagtggacaatctcaaatgtacaacagacaaagcagaatcagatatttttttggatggtatacctcattagtacagaataattacaacattaggtgataataatagcaactgatatttatggagtactcactgttttccatgtaggatgttaaatgctttacattcgtgatctgacttaatccttaccataatccctactcaaggaaacaaaggcacagagcatgtaattacttgcacacggtcactaactccaatgcaaaccctgaggcatgccaactccaaagccctcatttataaactccaggccatattgcctccccatgaagctgatacgcagacaagtgtggtgccactttgagattctctgggttcagctgtcaaacaatgacatcattaaattatccatgtaaaataagaagttgagtcctctatatccgctgtgtttgaggagtggcaggatgtgggatgaaagaaagaaattggattgcctctgaagccctctgaatttgtaatagaactacagcctcctcaaaccaaaattataaaataacctacatcactctgaaagaattttcttactaaatacgttaatgtgagaagacaaaaccaaaccaccaaagataatatttgaatattgataatattcaaacctcatttgaaatcaaaccactagaaccagaaaagaaaatgaaatgtgactatttaattcctcagcagagatatatgtatgaaaacataatttctatcactggtgataggagaatttgatattgaggacttcatgagttgggaagagcgatttcttaaatgaaggtgataaaagcctgtataaataatacagtcatgtattgcttaatgatggtgatatgtctgagaaatgcattgttagctgatttcatcactgtgggtacatgaaagactgcacttacacaagcttagctagtatagcccactacatagctagggtacatggtatggcctgttgctcctaggctgtaaacctgtacatgttactgtattgaatactgtaaaaaactttaacacagtggtatttttgtgtctaaacctagaaaatgtacagtaaaaatatgatattataattttatgggaccgccatcatatatgtggtccgtcattatgaggctcatgactgtctaagataaaactgtaggcctcataccaaatagagaagattggcaatatctatatgtatatgggtgtggattgtataattaatttctacttagtatcctttgcttcttagaaactttaagttccctcaatttaaaaaaatccttcttgatttcttttgctttttaaagatattttgatgtaaaagagcttttgtttttattttctttgcctggttctccactcaaaaatttaatgcctgtgtgacttagaattctcataagatttagctttctgtctttttacagatatgaagtggcatagtaggatttggggtccattttccctcagcttcctatttcttgccagtagcttcattgcaaaaccactctaccatctgccctgcttctttttctgcttccacccccagttccctcattttctaattactcccaacaggagtgactcaaacatatattggaagcaagattcccacagttgccaaataggagcagggaagtgccacgtactaggttttcacaaaagaagtcattatgtatctggatttttatctgccagagaagaagaggaatgcttgaggaagtcaagtctcagggcaaaaaagtaacataataaacaaattagagaatggcactttcacattaccatttctgttacattttgtggtagtctttcaggctgttcacaagtatatggctcccttccttttttgggctatagtacagtatcgttccgtgctagtatagttcggtccaggctcttctgcactccactgaactcggatatggccatatgacttgacttgttttagccagttaaatgtgagtggcagtgacaggtgtcacttctgagaagaagctttaaaagccagtggctttaagagcatattttgatgtcttatttttgacagtagttgctctatcaacttgagtctttaagtgacagtgtgaacagagcaccctccccataccagctgactcataatggccaggtgacatgggcaagaaagaagcctttgttgttttaagtcactgagatttggggagtaatgttatggtggcagaatctagtctgtcctgactaatacactgaaacagttttagcatgtataatctcatgtagttaagagattcaaatcataattcctccgatacatggatcaaagataatagaagacaaacatttaaagtgtttttaaagcattcactcaaaaagaatgtattttgtttgcatccatatagtagcatctaacctatcgcacaatagttttgtgttatataatagatctgccactgcttcagagcctctgtgagggcagagataaggtctcgttcttttttaatcctggcacctggcactaggtgtggcatttagtgggtacttaatactattagattagtgaagaggactgaaaactgcctggcacatgagaggtactgaataaatatttgtacagatattaatgttgttaatatctgtaccaaatattcagcacctgtcattaaaattcatccatcacctatcataaaattaattagcattggaaattctctttgtacaatcacaaataattgtacaaagtgcattttcaacatttcaaccccttggtagctactgggctaatttttcaggcacaaagaagcagtttaatgtggaccctcaagttgtattttttcctgccaccagggcctttaaagccttacttaaggaagtaccattatttcaactttggcaggagggatgatacatttgcatgtaaactggtttggagtttgatgctgagcttgcatcgtgaccacctttccactggacattataattagggggaaattctgatgctaaagcttggccagtgtatagttattaattcaaagttgattatctcaccagggattgtgaagagtttcatttggttttaaaactgcctaatacatgttattctaaggtgttgggaaattatcagtgtggctgctttgtgtgctctccttggtccagtgaaagcttcaccttactccttggcccctgccagctcctattttatctgtttcttcccaggaaggatttcaggcatctgggaacatacatgtacacaaggttgttgtcatcaggtccctgcttgcctacttccttcttcctaaatttagattctctaaatggagcttactttcctatgtctctgtcctgtctaagcagtttctccattacccaaaatgcaattccccaggttcattaattcattctcaaatatctcttaagagcctcctctataccaggcattgttcaaagccttgtgagtacagctttcctggaacttctatttcattggaagagacagatgataaataaaaaagtaaatacagtcatgcatcacttaacgatgagaatattttctgagaaatgcattgttaagtgattttatcattgtatgactatcacagtgtgtccagagttcgttccttctggtgcatttgtgttctcgctgacttcaagaatggggccgcggaccttcgcggtgagtgttacagctcttaaagatggcacagacccaaagagtgagcaacagcaagatttattgtgaagagcgaaagaacaaagcttccacagcatggaaggggacctgagagagttgccgctgctggcttgggtggccagcttttattcccttatttatcaccacccatgtcctgctgattggtccgttttagagagcactgattggttgattttacagagcattgattggcccattttacaaacctctagctagctacagagcactgattggtgcattttacaaacctcttgtaagacaggaaagttctccaagtccccattcgaccaggatgtccagctggcttcacctctcaacagtgtgtacttaaacctagatggtatagcctactatgcaccttgggtatgtgatatggtctattgctcctaggctgcaaacctgtacagcatgttactgtactgaatagtgtaggcaattgtaacacagtgataagtatttgtgtatctaaacatatctaaacatagaaaaggtacagtaaaaatacagtataaaagataaaaaatggtacacttgtataggacatttaccatgaatgaagcctgcggaactggaaattgctcttgatgaatcagtttgtgagtagtaaatgaatatgaaggcctaggacattaccatatactactgtagactttataaacatcctacatttagtctacactaaggttaaatttttttgtttcttcactgttaaattaaccttagcttactctttttgctgtataaacttatttaaaaaatgtttttgactcttttgtaataatatttcacttaaacacacattgcacaggtgtacaaaagtatttcctttcattgcattcttattctataagtttttttctattttgaatttttgttctttaaactttctttgttaagaactaagatacaaactcacacattagcgtaggcctacacagggtgaggaacattagtatcactgtcttccatctccacatcttgtcccactggaaggtcttcaggggcaataacatgcatggagctgtcatccatgataacaatgccttctggaatacttcttgaaggacctgcctgaagctgctttctagttaacttttaaatttaatttaattttaatttttaaatttgtattcttttagagccacggggtctcattatgttgcccaagctggcctcaaacacctgggctcaagcgatcctctcacctcagcctctggagtagcagctggaactataggcatgtgccactgcacccagttaaatttttaaataaatagaaggagtatactctaaaataacaataaaaagtgtagtacagtaaatacataaaccagtaacatagttttttattatccttattattattatttgagacggattttgctttgttgcccaggctggagtgcagtggtgcaatctcagctcactgcaatctccgcctcccaggttcaagtgattctcttgcctcagcctcataagtagctaggattacaggcgcctgccaccatgcccagctaatttttgtatttttagtagagatgggatttcgccatgttgaccaggctggtctcaaactcctgacctcaggtgatttgcccacctcagcctcccaaagtgctgggattacaggcgtgagccactgtgcctggcctttattatcattattaagtattatatactggacataattgtgtgtgctacacttttatgcaactggcagcacagtaggtttgttcacatcagtatcactgcaaacatgtgagtaatgcattgccctatgacattataatggctatgacatcactaggtaataggaattttccacttcggtataatgtcatgggatcaccatcatatatgttgtccatcattgactgaaacgtcattatgcagtgcatgactgtatacggtaagtcaggcagctgtaagtgctacagtgaataataaagagggaagaggtattatgtttgtggaagtagggtgggacagtgttactaatcatttcaggacaggaaaagcctaactgataaggtgttaggtaaacagctgaaaccttaaggaagtgatgaagaaagccacgagcacatggggtgaagaggagctagaaaggttcccaacagaggggacagcaggagctgaggcaggagcatgcttggcaacttcaaagaagaggaagcaggccagagtaattggggatcagagcaggatgggctgaagtggattatacagatcttgtagggctttttggtcagtgttatttagtctttagcctgagtaaggtaggaagctgttgtgagtttttgagcagagggtgccttaagaggatctggctgatacggtaagaactggtcaccagaacagaaaaagggtgaccagttagacatctgttagataataattcaggcatgaaatgaaggcattgactttcaatactcagctcaagtgttaactctaactaggaagcctctcctaactcccctaggctgagttgagtctacctcttttgagtttctgtaacaatcttactcttgaaatgaaggctttcggctgagttcacttatatttggaagctgactatatagttgagaggtctctgaattaatttacaattagaataaagtttatttatagataagtaaaagggctaacttagtatattatgtattatatattcattatgtacaaatatacgtgcattatattattaaaacttaacaataattgtggcaattacttaaaactttgtccattacaaagatttttgggacaggattattttgataaggtttaaaattgccagaaatggtaaaataaaaagcagagtgactcatgatgggttttattattgttttcaaattctttataaactaccccgtaatgcctatacccacagtggactgatctcactgccttgtcttgatatatcactgatggtaagatcttttattcaaagtgccttgagcaaaagaaaattccttcaggcacggtttgatccagggagctcgaacagtgtcatcagagctcctccaaattattccaatctgttttccatctgttttcctctgggttggcttccttctacagcaggctgtctacttttagttgcaagatgactgacagtgactccagccatccaaatgcctttctccaggtcactgcagcagaagtcccaaaatatgactctaacaatgtcgtatgcccgtacttgaaccaatcacagtggccacaggaatgcaatattctaattggcctttgaaagtcaatattctaattctgacaggcttgggtcacttgcccccatttggagctgggtatggggtaggtccattttacacgaattacatggaagtagaggaggaaaggcaggcccccaagaaaaattaagattgctgttagcagaaaaagaggagatagatatgggatattcaagctacatccatgtactacaagcaattatttctgattcctatccagaattctgtcctaaaagtgttcccacttggtaaatcaggtacatagatatgaagttctcacccccgcattgattgccactgtagcttcctcttcctttcgtaggattctcagcaggaatcccctcttcagcctctcactcacacacccacacacagacacctttcatcataagccctgcttttgcctcaaggagctttcatattgtgtgcgttcagtaaagcaaaaaataattcctcacaaaatcggcattttttattatactttaagttctgagatacatgtgcagaacgtgcaggtttgttacatagatatacatgcgccatggtggtttgctgcacccatcaacccgtcatctacattttaggtatttctcctaatgctatccctcccctaacccccgacaccctgacaggccccagtgtgtgatgttcccctccttgtgtccatgtgtcctcattgttcaactcccacttatgagtgagaacatgcagtgtttggttttctgttcctgtgttagtttgctgagaatggttttcagcttcatccatggtgtatatgtgccacattttctttatccaggctatcattgatgggcatttgggttagttccaagtctttgctatcgtgaatagtgctgcaataaacatatgtgtgcatgtgtctttatagtagaatgatttataatcctttaggtacatacccagtaatgggattgctgggtcaaatggtatttctgattctagatccttgaggaatcgccacactgtcttccacaatggttgaactaatttacactcctgccaacagtgtaaaagtgtctatatttctccgaaaagcaatgacaacaaaagccaaagttgacaaatgggatctaattaaaccaaagaacttctgcacagctaaagaaactatcatcagagtgagcaggcaacctacagaatggaagaaaatttttgcaatctatccatctgacaaagggctaatatctataatctacaagaaacttaaacaaatttatgagaaaaaaacaaccccatcaaaaagtgggcgaaggatatgaacagacacatctcaaaaggacatttatgcggccaacaaacatatgaaaaaaagctcatcatcactggtcattagagaaatgcaaatcaaaagcacaatgagatatcatctcatgccagttagaatggtgatcattaaaaagtcaggaaacaaaatttgcattttattttaccctgttgatgctgtataaatccaggtctcagcaggaaacagatggaacactcaaattaggataattcaagaagagtataataaagggactatttgcaaaggtgtgggtatcgtgtaagaaaagcacagggacattacagcgctgtgggactagtaaatgaagctctgtttatctcccccaggtctgaaaaaggttgggggaggagatagccattgccagagctaccagacttggtggggagacacagccagctgtggatgatttcataggaaagccactggggtagtaatactctgacatctctctcccttagctttcctgtcttctacaagtgcctttcattggcagaagccacacggcaggggagcccattgacagagtccattccagtcagcctctagagtggagggcagggttgacaagagaggagagaggatacggaggggaagtggatgttatccagaagagtccatctctttgtcctctcagtatatgtgcttatctttaagtgaaaagttcctgttcccttcacagaggacacaggaagtctcatcgctatggctctatgttggataattttactttaatcatactgcctcttcaaagcagtggcaggggaataaaggaataatggaaggcatagcacctgcagttcttgattctgaagcataaggtgtctactctcaccatgactccacgttccccttaccttctccagctcctcagctggatgtggctggatggcggtgacccaaaccttcgttctgcagaatctcagtgccacccctgcccccacctttttggatagcttcagtgttatttggttccaagcatggtcctcaatgttgtatcagcaacccagctgctccctggtagttgggcttactctgtaagtccttttctctgtgttagttcagtaggatgatgaatccaaactacctaggggctgtctttgcttccaacttaatggaattgtggctgtgtttcctgatagaagcatttctacattaaacatgaggacttccaaggtcatgtggtcaagctcaaggtcatagagatgagaagcaaaaattctgtaagtggatagttagtgattagggttagagttaggataagaacactgatacctctccttgttcctggtcctgtgcattctggctgaggaggagatacgttatacaaaatactgtttatgtaaaatgctttttgaatgcatatactaaattctgtgggacagcagcccaactttgtagaagttgtctcctctcctagctcccactgtaattgagcctttgctctagacactaacaagacagagaggcctgatacagtaaaggtgtactgttatccgcagtaagcaaatggatcccgattttctttactgatggggctggaggtgggaggtgagggcatgagtacattagtctggtcagtagctacataccaggcaccacactctgtgttgattgctgcaataaaaatatcacttctggagccatagttgtgattggcaatatcacttggttcagtttatgactcttgcttaacggtcttcatgtcttcagaccatcttgtatcagtcaaggttctccagagaaccagaatcagtatattgcccagatgagcattaagcaaactggagacccaggagagccaccagtggtatattttcagttcatgtccaaaggcctgagcagtaggcgagccaatggaataaggtctagcctgagtctgagtccaaaggcaggagaaaactgatgccccagctcaaagacagtcgggtgtagagagttagttcttcattattcagtccctttggtctattcagtgtttcagtgggttaaagaaggcctgtagaggacaaactgctttactcggtctacccattccaatgttagtctcatccagaaaaactctctctctgtctctctctctctcacacacacacacacacacacactcagaatgacgtttaaccaaatatatggacaccccatggcccagtcaggttgacacataaaattaaccagcacacatctgtctgactgttgctgaattaaatgaagataacataggaattatgcctacattctttgagtcctggatagtagcaccaagctctgcaattcctccaggtgtgtggctttgttcttagtttattctacagggaggggcagttttaggagtgtcattttgcactctttcattgccctcatgcaatgaatcagtaaaccaatgtagtgttttgccagttgataaatatatctgcttctactatacaatatggtactggggaaataacatcaggatggatctctggtgccgttggacccactctgagatggactcaggccaagactctgtcacctgtctccacaagcctcccatttgaatggtgtaccacagcaatatttcagagagcaacttaagtctagacccacagctaacctggggaaagcctgagcctttctttcttcagtgcacagtcaccctggaaacagccataggatgctatgtgggaggcttgaagggcgagtcacagcatgcacctgaggcagcattgttgggtccctctcaaagacacccagccactttctctattgagaggctctaggtcagtggaacttggtgagaggctaaaatccttactatggtgactgcattaggtcccagcccacgagagtagaattttgtctcttctatatgccaagtagcaccttagtaggtggtccatctatttttgtttctatttctgagattatttagtcaccaccacagatccctgtggaataagattttgattaccactcatccctgtggtttgtttcatttaccttatttctgatagttaaatgccgccaaccagttggtctcccttactcttgggttcctttatctccattgataacaaagacactgattccatttcagccacccccatcccattttccaggctgcagaagaaagccaccacacccagggcagccaccacaagctttccaagaatactcctcctcccccttgtgggagttgtggttagagaatggctgttgctcatcctaggtccacttcaccactcccatttctgagacttcagatttcttcctctccagcagggatcagctcaggaccagatcataaatattttaggctttgtgagccaagaggcaaaattcaacaggtattcttgccaaaggctgatagttttgtttgtttgtttaacatttaaaaattgtaaaaaccattcttacctttcaggccatacagaaacagacagcaggccagatgtggcccacagtctgtagtttgccaacccccttctccacaggatgccacagaagttcagttgaaccacataaacacagactacccttgagtccaggctttaattgtccaattaggtagattactgatgccactccctggtactcaacctgaaacactgaatcctaaatccggggtgagtatatcccatgagtgaatttaatgagatcaagccttatgttttgtcctcattgatccaatgcctttcgaaactcataccttctctcctggctcctgccaatatagactggtgtgaggttctataaatcttatgaaagatttcttatgtaagggatgtaggctgtctcatatttctccctctgagctgtgcttggacctgagtcttagatcaagaggcagtgagaggtgataggaatgagtcctgagggaatgaccagcaggttattatgcatggaaaagctgttcttcttagacagggaggacaaatctgtccccatgggcaagaagattttgtgggttcgaagttttcatatttgtccgtgtctgcccaaatgatcgcaatccagttatcagggtcacattcccttgatatgagacccctcgtatgagctgatcatgtacttggtgctgcagctctgcaacttttgttaggctctgagctttgtcctcagccatatctgccgtgggactctggaaaatgaggggttgctgcagttataccatctgaatagctacagggactttctgattttttctatgcgtgctctcaattgtacattcagagatttcagtttctcattttccttttgtacaccttctaaggctgtgagaagaagccaagagactcaacagtctttatagtcactgctgtaaccatagcaattaagtgcctctgccactgacctcccagcatctccccttccacctgcatttcatctcctaccactgctagagacaacttgaataactgatgtcaccacttgtcctggattatttgttttctgttttttcctggcaaagtggttctacctgtgtttctcaacaacatgatcaatctaatcctggaatcccacttcaggatctcaatagaaaacagaatgctcaaattgggatagttgaggaaaaattcatgaagggttatagaggcctaacccagtgatgatgaggagcagttactgggacttggagacaggcataactgtggaaagggttgctggaaagaagctgggatcctaagttaagcaacacagtcatcacttttgacattttcctctaatattttgtgcagttatgcagcaaattgtatttcaaaggtaaaccttatttaaaaccccatagcatcatatgactcctatttttaaaagtctgcaaaataattacatccctttctttagttatccttatcatattctacagctgatggaattcagttaagcagcattggttgtctattcaaaactaaattaatatagtgaggatttattttaagttttcattatttttttttacatcatagcccttgaaacatgacagtttgtcattccatgtatttgcaggatttttttttaagaaaaccatcctgattctctattttcttactttcaaataccatcacagtataatttattttaatcccttatcctgtgggtcacttttatctgatgattgctttcatttaaattttaattggggtttgaaaactctttttatggactggaggacaataagtaaacttttgtagtatggcagggtgatctatagtccaggaaatcaatatctaggcttctatatgcaggagctgttcaaggcaggaactattttcttatttatttttgaagtcacattagagttccaaatgtataattatacaggattccataagttaatagtataggcttattggttttaaagaagtcttcttcttcacagtgatattttttcaggtattattgagatgtgtccttatttatctggagaatagatatacttattctctgccttcatttcgttattgctacctagtggtaggagatgacaaaaaacctcatctaataggtgtcacttatacctcttaacatcactatttccaaatattaattgttccttggaaatccttttactagggctgttcttgatggtctgtctgcattcatcactttgtgattactgagttttcatatcaccttaaatctttgatgagctgttcctcaaagaaagaaggtcatttatcatgtctgttttactgaaagaaggacaagatgagacaaagaggtattacataattcagtgtgcctatgaagctttctaggccgtattccaaaatagatagcagtttcttcaatcaaactctgtataagataaatgagatattgtttggtaagaaccccccaccccactttgtgccaaacttgttggcaccctgcagtttacagcatgaaagtcagcttctctgcacagtgatttttaagactgctaaaggcaatcagctgttcttagagctgtgccccaatgcactttatatgcccttctgttatagcactgagcacctggtggtttgtaaccttttacaagtctttttccttctgtagactgaatgccctgacagcaaggactgttaattattcaccattctgcatacactctgattgggtggcttacaaacaacagaaatttatctcttgcagttttggaggctgggaggtccaatatccaagcactgacagatttggtgtctggtgagggccagcttcctggttcatacatagccatcttctcactgcattctcacatggtgcaaaggatgagggagctctctggagtctcttttataagagcactaattccattcttggtttggggtgggggctctgcactcatgacctaatcacctcccaaaggtcctacctcctaatgtcatcacattgaggattaaactttcaacatatgaattttggagggtcataaacatttagtttataaaaaagggctgcttggtgtatcatggccactgaataaattttgagtagcaatcttacctggtatgccattgcatttatatatgattgccactaataactcaaattactgaatttatgttgtatcgatgatgctgttttcctagtcttagtattagtagccaaatggccttggattaactttctcaatattattcattcattcattcattcaacatttattgaataccttactaaatggcaagctctgaattaagctttgagaatccaagaagactaagactttgttcccacctttcccttcagcttccctttcctaagatagacataataaaacaattgcatcacaacatgatggatcctgtcatagtcagagtggaaatagaaggagattgagtgggacaggggagttgaaagatgcccagcagcccccagggagagtgaaaacgtgatctcaagatcagctttattttctgaccaattctcatataccaagtgtggtcaggaacatatatttatgtgtctaggtagccagttgcatttcattttatgaagctaagtgattatgatgattagctatgggattaacatacgttttcagctaagcaagtcattaaaaacaaatgcaagtacaattatctcctcctttagcttcagtaaattaacatgttatagtaagaaccttgttcatttgtatgatgctaggaaaaagccacacaaatgacctgctttttactttatatttcggcagctataattttgtaaaaatgggacatgttggccatctgaaaagcacttagttgtataacttctacaagtcattgaaagtaattatcacatcataatccaatgttttcctgaggttcccatgggaagtaaagtatattctatcctgatgtggtttggatgtatgtccctgtccaaatctcatgtagaattgtaatcccagtgttggaggaggggcctagtgggaggtgatttgatcatgggggcggatttcctccttgctgttcttgtgatagtgagttctcacaagatctggttgtttaaaagtgtgcagcacctccctcttgtctttcttcctccttctttggccacataagaccatgcctgcttcccttttgccttctgccatggttttaagtttcttgaggcctccccagccatgcttcctgtacaacctgtggaattgtgagtcaattaaaccttttttctttataaagtacctagtctcagttagttctttatagcaatgtgagaatagactaatacagcaaattggtactgggagtgggcatttctgcaaagatacctgaaaatgtggaagtgcctttggaactgggtaatgggcagaagttgaaagagtatggagggctcagaggaagacaactgggggaaagtttggaatttcctagaaacttgttaagttgttgtaaccaaaatgctgatagcaatatggtcaatgaggtccaggctggggaggtctcagatggaaatgagtaacttattgggaactggagcaaaggtcacttttgttatacactaggaaagaggttggaggtatcatgcccctgccctagagatctgtggaactttgaatttaagagtggtgatttagggtttctggttaaagaaatgtctaagcagcaaaacattgaagatgtggtgtggctgcttctagcagcccatatttatatttgtgagccaagaaatgacctggtactggaacttatatttaaaagggaagtagagtgtaaaaattttgaaaatatgccagcccagctatgtggtagagaagaaaaatccattttctggggaagaattcaagctggctgcagaaatttgcataagtgaaaaggagctgaatgttaatagccaagacaatggggaaaatgcctcaaaggcatttcagagcagctcctcccatcatagggtcagaggcctaggagggaagagtggttttgcggactgggcccagggccccgctgacctgcgctacctcaggacactgctccctgtgtcctagctgctccagctccagctgtggctaaaagggccctagatacatcttaggccactgctacggaaggtgccagccataagcgttggtagcttccacatggtgttaagccttcttgtgcacagagggcaagagttgaggcttgggaacctctgcctagatttcagaggatgtatggaaatggctggatgtccagccagcagtctgctgcaggggtggagtcctcatggagaacctctactagggcagtgtggagggaaaatgtgaggttggagtcccccacacagagtccttcactggggcactgccttgtggagctgtgagaagagggccactgtcctctggaacccagaatggtagatccactggcaacttgtaccatgtgcctggaaaagctgcaggcaatctataccaatccttggtagcagccatgggagctgatccctgtatagccacaggggcagagctgcctaaggccttgggagcctagcccttgcatcaggtggccaggatatgagacatgaagtcaaaggagattattttggagttttaagtttttttattttttatttttatttttttgagacagagtctcactctgctgcccaggctggaatgcagtggcatgatcttggctcactgcaacctctacctcctgggttcaagtgatgctcctgcctcaacctcccaagtagatggaattacaggtatgcaccaacctgcctggctaattttcatatttttagtagagacagggttttgccatgttggtcaggctggtctcaaactcctggcctcaagtcatctgcccgcctcagcctcccaaagttctgggattccatgcgtgagccaccacacccagccaggagttttaagctgccctgcttggttttgaacttgtatgggtcctgtagccccttagttttggctgatttctccttttgattgggtgtatttccccaatgcctgtaccctcattgtatcttgaaagtaactaacttgtttttgattttacaggctcctaggcagaagggacttgccttgtctcagatgagactttggaccatggagttttgaattaatgatgaaatgagtcaaggctttgaggaactgttgagaagggatgattgtattttgcaatgtgagaaggacatgagatttgggaggggccagaggtggaatatgtggtttgggttttgtgcctgcccacctcatgtcgaattgtaatcctcagtgttggaggagggacctggtgggaggtgactggatcatggcggtggattttccccttactgttcttgtgatagtgagtgagttctcgtgagatctggttgtttaaaagtgaaacccggggtacaccatccagacaggaagccatgaagagaaagggtaggtgatttcacgcaggaatgttctatgagccagggcagcatacatcacttctgaccagaactcagacacgtactacaagggagcctagaaatgtcgtctagctgtgtgtccagaggaaaagaaggaactgggtttggtgaataactaaccacaatgatgataaacttttaaaaattaatcacattatctataactgcccctaaactgcttcaaaattttcacaacagcctcattcacccaatttcctattgacaaatatttattgttctcctgtaatgtgtcagagacattgagccagagtggagacagtagacgtggtaaaaagttgatcagattactgatatattttaaaggtaaagtcaataggatttgctgatggactgaatctgggatataagagcaacagaggattcaagaatgactttcagattttgggcatgagcaactgggaggataaaggatgccatttattgaaatcagagcactgaggtagagaggtcattttgtgggttggggggtggggataacttaacagtttgctctggccatgtcaagtttgaaatacctcttagacatcctagtggagatgccaaagagtcagttgaataaacaaatcttaatttttaaacaaagtacaaccagagccagcttcatgagtgggcaacccatgcagtcccacagggctctcctacatggaaaggtcccatacttgatgtaatggtttactgttgcagtcttgaaatttttaataaattacttagtaagtgctccgtatttttatttttcgccaggccctacaaattatgtagcttgtcctgggaggaattctttttgaggcagtggaaacttgtaagtgtggggttctgaaggcaaggaaaagaaaaccttttgagaagaaagagattgtgagagatcaaggaatataaagaccaaaaaaaaaaaaaaaaaacagtgggaattatcaagatggaattgctagtgatgtcgacaagagccatgtccaagggtggagtgggggaggataaaaatcctgttggaatgagctgaaaagaggagagctgcctatggccacagtttccccctgcagggagcagggaaatgggatgatagctggaaggttgtgctgagtcaaagcatgtttttgaaaaatgagagaaattaaaaatgtttgtctgctgatgtgagggattcaggagagagggagaaactgatgatgcagtggagaaagggaagaattacagggaaagtacgtaagtcaaggacaatggaggacatgtggaggagctggctgtaagaatagtcatgtgattccatttcaaaagcagagaaggcagatttctcaagaccatgtattgaagagactatcctttctccacatatgttcttggaacctttgttggaaatcagttgaccataaatgcatgggtttatcactggattttctattcccttccattggttgatgtgcctgtttttatgccagtaccatactattttgattactttagctatgtaatatgttttgaaatcaaataatgtgatgcttctagctttgttctttttgcgcaagattgccttggttgttcgggatctaaaaaagtaagaaattttgtcatttgtgacaaaatggatgaacctggaggatattatgctaaatgaaataagccaggtactgaaagacaaatactgcatgatctcacttatatgtggaatattaaaaaataaaactcatagaagcagagagtagaatgatgattgccaggggctgagggtaggggacggataaaggagagctgttgttcaacgggcacaaagttttggtgagacaggaaggctaagttctggagatctattgtacagcatgatgactatagttaataataatatatggtatatttgaaaattgccaagagattagattttaaatgttataatcacaaaaaaagataagtgtatgaggtgctggatatactaattagcttgatttaatcattctataatatatgatattatatatatatatcaaatcatcacattttatagcataaatatatataatttttattttccaaatataccttaatttttaagaaacagagaaagcagagtctatgggttccagaaggttggcaatttggggttggttctagaccacgtgcttttttttttttcttaatggaatatgaggtgaggtcagcagctgaggtggtgggaggagtcatgagtttggtaagagtaacttcagagaactgaaaggttaatttactagaagatggtaagattgctgggcaatcctgtgctgagttgccatttgagattttgtgaatatccatttgctgtcaacatcgtcgagtgatgtttttttctccagcatctttcagctgctcaggtgcaagtacagagtagagggatagttgagtttagacatgattggttctgttatggctcttattttacagatgaagggactagggttcagagaagaaagtaacttgctagtaatggacagagtttgcacataaatcttctctgaccctcgactccaggctcttaagcagtatgtcatatttcagagctgttcttaatatcatggaataaaaagtgtagattctgcaaacttctatcccttcccctagtggcgagcaggtgaataagcaatactgtaatttgtatctcaactttttttttcctactagcattatctaaaaagggtatctcagctagttaccaaatcccagccttgggaatcacaaagcaatattgtgcattgaagatatgctcatgggatagaaaaagtatcactgagtttgatcaccatctctcctgcctgctggccatgtgacttgcagcatggttgtaagaatctgttcagcattaactgagcacctatggtatgccaagcagtaaggaagatactgagaagatattgatgaaactgaattttgtcctcctaagaattatagtccagggaattcagtgagatagtatatgcacaatgttgtgtccaacacagggtgggcacttaataggtgttaattctctttgccttctctatccatttgtcctcaagtacctgatgacacctcttggtgaaaatatcaacactcactgagatactaaatgagggccccactcatgtgtaaatatccaatgatgttaatatttaaaaattagttcccatccactgaatcagaatctcagcaactttgagtgaaggcaggacccttaactgagttgagtcttcctctacccataaaaatatactgtatataactttttcctgaagctattggaatgaatacaagttagcatgattgtctactggcaatactagaataatctccctaaggcgtgctgttttctggctggaagttattttattctgttgaaatgtatttttttaaatgaaaggggcatttccttttcctatattatttgctttcaaaaagcgaagagaattctttaaacatggcaaattaaccactggtgaatcttaaattttaccttctcaatgatgcatgttctgattcaccagtcaatatttatttctaagccttcagatctcaaaaaggtctatatggtacctgagttagtgcatctcaagtaaccaacccctgggaaggtgttttatttctgtaacacaaatgaggcaggattttatgcccctggaggggagatgtttgtcttttatctctatattggggtacctaatacaggaaagagtgttaaatgaataaaggaatggacccacagtggggaaaaggagcttgcttgatatcagtgtgtttgaatttattaccatgaatctcactttctaaaattgctagcactattaaagtttctgacagtgaagcaagccattggaacatgtttgtggtgtgaatattaggtgtattattatgcactcaatttagcttttttattttatataatttctctccaagtggaaatcatgttctaggtaaaggaacaagaaattaagcagtgtggaggttagattcaacttccactaatggagaagatgactttggataactattggctccagtttcatttggggattagggattggattagaatttgtaaatctaattgttgtttctctgtaaaattgggagaccctcagggttgagagcagatcttcctcttttgcatctatttcagcacctagcccagtgcattgtaaatgcttaataaatactagatgaattaaaagtgaagtattctatttattctttagagaaagatacacagacgtttttgccaaccagcagaaatgaaggcagcaaccacttctagtttatcttgtattcctagcatcaggcaaaatgatagggacatggtaggcatccaacaactgttaattggctcctccaatcacccttttttgtcatccttccacaggaatttattgaatgccttctaagtgtcagaaacttggtttatattaatgaaagaacacattccagaggagtagttttatttgtataggcaattacaaagtaatgggatacaggttataatagaagtatgtaaaatttcactgaagttcacagggaggagaacctcatctgctcgggagttggggaagacactccaggatgatgagggttgagctattgaaagaggaatgggatttgttaaagtggaccagggtttgagggtattagaacacactccagttagagaagatggcacacacatgttcttggagctgtgatatagcacagtacacattgtaggggtagtttagcatggctataggaagaagtgggtaacataggggaaggaggtatggacagaattgagaaacagggatgattctgggaggttattagaggtcagagtttgaagaacatctcaaaacaggaaatactgactggtatctgagcttctctagaaggctgaagttaaattctataggtcatgtctcagtaatagcagtggtagtaatagcaatggctaatatttattgagcatttgttagagacaggtgcctttctaagcatttcatcttcttaataacttataaggtagatattgtctttatcctcatttgacagatgaggagattgaagcgtagaggtgcctcattcaaggtcaccgagcaagtccagactttaactcagagggtctggctgcagaatctgttcttaatcactatattatattacaacgcagaaaatatagtgttgtaatgctccaaagttaatttatacaataatacaatcacaaggattagaacttcattctcactttaaatccaaacagcagcatgaatcactgcttctgcctttcatatgttttttaatggcttgatcattgtcttcctgatgatttgattatgtgaggagggcaagttaaggtcactgccactaggtgctcactgttgttgcccatatgcaagacctcagtaaaagatgtctatatggcgaatgtaacttttagccaggtctttgcgctatgagagtatttagtctgtctgatctttgaagatatctatgcatggaccattggctctaaaatccccctctttgtatccccacaacaatgcatattttcatctagtgtactcttaaaaggggccagattttgtgaacatagatgcctgtccttcagagtttatttatagaatatgctccaagctcaattcccacctatgagtgagaacatgcggtgtttggttttttgtccttgcgatagtttgctgagtatgatggtttccagtttcatccatgtccctacatggacacaggaaggggaacatcacacaccagggactgttttggggtggggggaggcgggagggatagcattaggagatatacctaatgctaaatgacgagttaatgggtacagcacaccaacatggcacatgtatacatatgtaacaaacctgcacgttgtgcacatgtaccctaaaacttaaagtataataataataaaataaaataaaaaaagaagaaaggcaggaagaaatggaagaagaaaaaaacccattcctttatattataatacaaatgcatattcatattctgaattttaacattaacattataataaaactgtttttatctttaggaaaaaaaaaaaaaagaatatgctccaagcatttgcttctcaaattctccactattggataacaaataagccataatgtaacaggattttcatttaggtttttccattaagccttagccatggattgtgatggtatctggttgaggccagatctgagtttagtttttactctgctgccgaaattgttgtgtgatcttgagccagtcattgcactgttctcaacctcagtttcctcatctggaaaatgagggtgttggagcagacgatcagtgagctttctcccaactcttaacattctctacttgtagagtttttataatcaaacacaattatgtaaaagagagaaaagcagttgtcatggaaactgttatttaatacataacactgtttcttaatcagcctgttttccttgaagaaatttgcttctcttgtgatacaggcccaaaggtctcctaattctgcctttagaaaggctcagatttcagttccatcacttaagaattcaatgcatggaaccagttacttaaccaccctgtgcctaaattgctttattctaaaagtggtattgacaagaatactgacctcatagtgtggagcatcaggcctgatgcacaacaacaaaaatgttaatgataataataccaatacagataatattaaaaatatctaatgtttattgagttacttattgctactctgtgctaggcattagtaaatgtattaactcatggaatcttcaaaccaaccctgtggggtaaatgttactattaatctcataattagatcaagttacgtacttgtcccaagtcacacaacttgaacggggtggaaccagaatacttgtcgagctacataggccaatttcagagcctacactctgaaccattaacgtttctcaataataacactgttaatacataattgtgaataaccagcatcttttatggcctttgctatatgcccaaatctgttctatcctatgaggtagatgatatcatcatctctatttcgtagataagaaaactgagacctctagaggttaattaaaaacacatagttggtagtagtggaggcaggacttgaactcttgcagtctggctcctgagttcatatttttaacgatgatatctcagtatgagctattattaccctacatccagttcagttttgtgtccatgaatgatgtaagatgattatagctccacccactagatgatgtgagcctttggcagtcttctggaactctgttttttttgtttgttttttgtttttttgtttgtttgtttttgagacagagtctctctctgttccccaggctggagtgcagtggcatgatcttggctctctgcaacctctgcctcccgggttcaagcagttctcccttcctcagcctcctgagtagctaggattataggcacccgccactgtgcctggctaagttttgtattttttagtagagacgaggtttctccatgttggccaggctggtcttgaactcctgacctcaggtgatctgtccgtcttggcctcccaaattgctgggattacaggtgtgagccaccgcacccagctggagctctgtttatgctctttgttgattccctattgtgctcctaactaccacaatcgtttatggaaaagccaagctgcgacacaagtatcttgccatgtcttataaaataaaacaagaggagataagtacaaaagtctatgaatttcaggccagtaagctctaaaatttcaaacagcaaatacagtccgtaaaacatttgagagagagtttacttcagtagctccaattatctgagcaatgttttccaaataccttagcacctattgatctaagagtgaagtaggagaacttctttaaagatcagatagtaaatattttcagccttaagggccataaggtctctgtcatgactgtttaactctgttaaagtgcaaaagcagccatagatgatagtaaacaaatgtatctgtgtttcaataaaactttatttacaaaaacagatggtaggccagatggcccagaagccattgcttactgacctctaatctaagagagagatagcctactgataaagtatttaatgccaatgggttttgggataagtggcctcttgtacgtgcataaaagcaatagtaatgacatgtttattttttccttccctcctcatttttaatgagtcctgatcttgctgttccacatttactaaattaggtactggcaaaatgtgatagtgtaggcttacactattcacattactatctgctacttgactcaatatattgaaatttgactttaaggacagactttcagcagtaggaagcaatgttgacaaaacaacttttaaaaaagatcatatagaatgaaaacgtggatatgtgccttgttttgagctatctcaaatccttttgctaaataagtagggggtaaattattttaaatggggaaaatggaacacaatttttaaatattttaaggcatttcaaatgggccttaaaatacaacggttgtcctctggagggattttcattaattattaaccatatcagaaatgtaattaagtcagtgctgaaattagtcaagatcagctttataactcaaatcacataaataacatatatgggttctatgaattaatcattgtagatttgattaaaaagttccatttcaaagttcatgcaatttaatgtcatgttgtttctgtttttcaaacatttgttaaaccaactgtctatagaggcacattatatggctaaagatctaattgcaccattgttagcatagaactgtagtcagtaaataattagtggcttgcattgtgaagttttgataaatttttaggcttctctgaattaacatttgtcttatggtcagttaaggaaattaaatatcgattaaggaaattcagacagggcagcttcacagtctccctcctccacagggccccccatgaccactgccttggaggctgtgctgactttggggaaggcctatcagtggctgtgacctgggttaagctgatggaccaggggcatttttgagaatattgattagattaaggagaggtggggacctgtattagttttttattgcttctgtaacaaattaccacacactcagtgccttaaaatgtcaccaatttatcttacatttctgtgagttagatgtctggtgcaggtctcactgggccaaaatcaaagtattagctgggctgtgttccttctgtctttctggagactctaggggagaatctgttttatggcctttgttttttgggatggaatctcgctctatcacccaggctggagtgcagtggtgcgatctcagctcactgtaatctctgcctcccgcattcaagcgattctcccgcctcagccccccgagtagctgggattacaggcatgcgcaaccatgcccagctatttttagtatttgtagtagaggtggggtttcaccatgttgtccaggctggtcttgaactcctgacctcaggtgatccgcccgccttggcctcccagaatactgggattacaggcatgagccaccatacccagcctcggtgccttttccagctcctagggctgccacatccctagactcatggtccctctttcatgtttgaagccagcaacataatgtctctctgatccaagccaccaaaggttctctgtttttgaggtcttatgtgattagattgccccccttccttttggatatcccaggataacccctccatttcaaagtccttaaatctgcaaagtccctgttagtcccatgtaaggtgacatattcacaggttccagagatgaagagttgggcattttagcagagccatcattctgtctaccacacaaccgacattcagtgtattggattcactgtcggcgcttcctctgtttaccagcccatcttcttatgtttcagcttcttgtgtcctgacacccatttttgtctcagtccactttaaaccttgttcttctcagttctcaatttctctgaccttcctttagcatgcagtccagtggaccttcttctgctgagagcagtattgctggccaggctgtctgggttcaaagctaggctgtgcctcataaacatgacctttggtaagttatgcaatatctctgtaactcagttttctcatctgtaaaaggaggataaagaatgtgcctggactacatatgattgatgtggtgattacatgcattaatatattcatcactcttagaacaatgcctgagacatagtaaaccatcaatacatgctaaccattgttgctgtgaatttggttactctccttttgggtgctggtagaaattccctcaagattttatctgtgatttcttgtattttcttcggaagttgcagcttctctcaaagctttagcattcatccctaggcaaagaactccagctggacgcatttccaagctctatacctttatttctggcagtactaggtgaacatttttgtttggatgtcccaggggagccacaaagctgaacttaacatcttgcctaccgaaatattccatccgtgttcttatttctattactgtctttagatccgaagtcaatttttattctttccctctcatttaccactaaacatcaaaaaagttatcaaatactaaagactctactttcaaactatcttttaatctatttgtgtccccacttccactgctctgatccaggcttctatgaccgttaccctgatttgttgccccagttgaagtagaacagtattcttaaacctttgctctgattatgcaacccccacccccagacccgcccctcccttccaccttgctccagcatcttaagtgattccccgctgtcttagcatggagactacatccagtgtagcatataagtgagttttcttcaggaattccctaaaaatttaaaaatttcatacaaaagtatgttgtgaagatcgttgctttcagtctcaacaaccagtcactgctcacgcatcttaaacatgcttgaaacaggacatcttttcctttcatgaatgagccttgttctttcatacctgaaccttcaccatggggggcgtgctcttctcctccatctctgcctatgagaaatctacccagcaatgaggcttagtgacaatacccaccactctctttgtgaagccttccctggtagcctttccctgaaccgtgtaagtcagaggtcagcaaactacagcccacaggccaaatccagcctattgcttagttttataagttttattagaactcagtcacactcattcgtttatgtattgtctgtggctgcttttgggtctacagtagcagagttgagtagctgcaacagagaccatatggcccacaaagcccaaaataaattatgctctggctctttacagaaaaaaacatgctgacccctttctcccctcagagattacatagtctaccttgtgcatctttgacatctccttctgttagagtcacttctgcacaacttttttcctggcaagaacgatctcctcttgtagacatagattctgcctttttcatccttgtttctatccttgggcctagcaggggtagggctcagtagttgttggggacaatagattgcctgtaaaaaaattttttaaactacattttgctcacttggctaagtgacaaaaatcttatataaagcagtgttccctttagggggttagtgcttatcatttgatgtttctggtagtaaaccatttcatgtttcacttcgagaagcgcttttttgactgccaagataagctgcaaaattgagtccaaggatcttaagaaataatattcctaagccatttaagcagctcacttggtgatctcatttaataagtggtccactgaaatttaggattgcagagtatactttttcattatgcatgggtttcaccatgtgaggtagatatctagttcctactcagctatttttgttgactgcctagggtatgataatatttgaccatgctactctcttatgaaaaatgccaaatagttaaatttgttttaggaaaaccagagattcctctcttgctcctaaaggagaaaccaaatgaccctgggtttctttcttttttttttttctttctaaaacccaagaagtattgatgtcatgtcctcctgcgaagtgcattagctgtccttgcctttgctgctttagtactggggaatgcctctgtcagacagtgagctcatgagtgcaaggactctgtcttttaatttctgaatcctcagtgtttggcacagagaaagctcttgacaaatatttattaaatgaataagtcaataaataattgaagatctcagaaagaaccttttccccaaggtattacttttaaactataaacttacaattgcctacttctatctagttcacatccttaaatatcacttgggagaatttcctgttgtgatgatatagagtttatgtctagctgtgggaggtcaagggtgggctacgttgtgcctaagtccacagaacacaaggaaaacccttaaacttttgtgaggtgaccggaaataaatatctgcttcctaagtatttccctgagtgagaatgtaaaggtttaagataaattaagtatcacagggtgagacaaagtgagaaattcaggatttagattggcattcagagcagggagggaaaaaaagatgacccaaattgacacaaaatgagaaaatcttgggaaataaaagtaaacggtagcaaatgtgatgtatttgagaaccttacaaggaggttttcagtatgttccagttgatttataggatgtagaaacattaagtgttaaaatggaaaggggtggattttcaagactctcacagtgagggttcagttaggaatcagaattccaacaaacaaacagattttaataaagatgttacaaaggagaggctgggttatggaaattgacaagagatggtgaagcacccagggtctagcaagggtgaggagcctttataaaacatgcctcaagaggcaagggcaatattggagccgcgcaagagcaggagccctgggaaaggggctacccaataggagtagaccttgcagagggctttccaaatggctagggccctcacaagtattcacacaggaagggagcagggaagaagtaactcagcctgtttttcctcccaacctttagctccttcttgtgcctccattggctgaggccaactggaggcctgtgagggagcccaggtgatgaaggagtcaccttcccaggacacagaacaggtggagaatggatttgaagtaggtggaggcccacaaaacgtcaccagcacagggaccatctccagcctttcagtttacaaatgaggaaaacgaggcccagactgggggaaatgaacaccttggaaattcatccctttcagccttaacacttaatgttcttttttttctttttataggtagtctcttatttttattattattattattatacttcaagttttagggtacatgtgcacaatgtgcaggtttgttacatatgtatgcatgtgccatgctgctgtgctgcacccattaactcgtcatttagcattaggtatatctcctaatgctatccctcccccctccccccaccccacaacagtccccagagtgtgatgttccccttcctgtgtccatgtgttctcattgttcaattctcatctatgagtgagaacatgtggtgtttggttttttgtccttgcgatagtttactgagaatgatgatttccgatttcatccatgtccctacaaaggacatgatctcatcattttttatggctgcatagtattccatggtgtatatgtgccacattttcttaatccagtatatcattgtcggacatttaggttggttccaagtctttgctattgtgaatagtgccgcagtaaacatatgtgtgcatgtgtctttatagcagcatgatttatagtcctttgggtatatacccagtaatgggatggctgggtcaagtggtatttctagttctagatccctgaggaatcgccacactgacttccacaatggttgaactagtttactactcatctgacaaagggctaatatccagaatctacaatgaactcaaacaaatttacaagaaaaaaacaaccccctcgaatagtggacaaaggatatgagcagacacttctcaaaagaagacatttatgcagccaacagacacatgaaaaaatgctcatcatcactggccatcagagaaatgcaaatcaaaaccacaatgagataccatctcacaccagttagaatggcaatcattaaaaagtcaggaaacaacaggtgctggagaggatgtggagaaataggaacacttttacactgttggtgggatgtaaactagttcaacacttaatgttctatatcctcataaatcagtgttcaaatgagaaagacaataaggactgactgaataaataaatggaagaataaattaatttgaagaataaatgaatttttcatatcataaatccatttttcaccaacatgtttgctaggtggcattctaacctatcagtggaccataatatatttaactattgccctattaacagttatttttctagtttctaatattactataatcataattattatagttatgtcagtattaattataattatgatactaagtactatttattgagtatgtcaggcaccatgctgtgtgaaaacatatactttttttagcccttattatgaatatttgaagtatgaatttaaactcccattttgtaaaagaggaaattgaagctcacgtagtaactcaatcataactcatcagaagttccacagctactacaagatagacccagaatatgcacgaatatccattcaacacaaaagtccatctctctattgcttccctatttaataaaaattttgaatggaacattttcttacgtaactgttagtatgtcttatcattttcttgagataacttcctagaagtagaattcttgggtccaaagagatgatcctatttttaagtagtaagaaataacatttagttgcaatttgaaacatattaaatatctgtgagagaaaccttatatgggtatgaaatttttagttttgtcaaatgatctgattgcgaatggtgagatagccatgtctgagagcccccattttcttatgttaccagcagtgaagagcatcttttttaatagcctgtattttttagagcagttttaggttcacagcaaaattgactgcaaaatacagacattccttgtgtatctcctgcccctacatgtgcatagcctcctctattatgaccttcccacaccagagtggtacaattattacaattgatgaacctacattgacacatcatcacccagagtccatagtgtgtattagcgttcactgttggtgttgtacattctgtgggttttgacaaatttattacaatatgtatgcaccattatagcattaaacagagtagttttattgccctaaaaatcccttgtgctctgcctatttctccctcctttcttctttcctcgtggcaaccactgatctttttactgtctccatagttttgccttttctagaatgccatgtagttggaactatgtaatatgtagccttttcagactggcttctttcacttagtaatggttcttgaacatttaaggtaagtaaatggacagttaaggttcccacatgtcttttcatggcttgacagtttgttttgttttaatgcttaataatattccattgtctgaatgtatcacagtttatttgtcagtttacctactgaaggacatcttggttgtttccaagttttggcaattatgaataaaactgctgtaaacattcatgcgcaggtttctgtgggaacataagttttcatctcacttgggtaaataccaaggtgcatgattgctggattgtatggtgagagtaagttgagttttgtgagaaactgccaaactgtcttccaaagtggccataccattttgtatttccaccagcagtgaatgaaggttcctgtcgcactgtattcttgccatcatttgatgttgttggtgtttttgactttcactattctaatagatgtggagtggtatctcgttgttttaatttgcaattaattacccaatgacatctacattattttttaagatttatttttattttaatattttatttatgtacttattttcaattaacaaataaaaattgtatatgtttatcatttataacataaagttttgaaatgtgtatacattgtgggatagctaaatcaatgcaattaatacatatgttatatcacatacttgtcaatttttatggtgagaatgcttaaaattactctgttagtgatttttaagaatacaatacattattattaagtatacccactattttgtataatagatccccagaacttatttctcctgtctaaatgaaattttgtatcctttgaccaacatctccacaactgagctccaccccccagcttttggtaaccgccattctactctctggtacttatgagttcaaaattccacaaataactgagatcatgtggagtttgtcttcctgtgcctggcttattttacttaatgtcctccaggttcatccatattattgcaaatgacaggattttccttgtttttctttttaaggttgaatagaatgtctttgaatatatccaccacacattttctctgtcaatttttccattgatagatacttagattccatattatggctgtgttttggctattgtgtctaaagttgcagtgaccacaggagtactgatagctgttggacgtactactttcatctcctttggctatatactacaacatttaaagagttttaaatcactctttatgaattaaaaaaaatctcaggttgttttcactgtagatgggctagtagggttgaggaaaggagagtgggaaggctaagctattcaaggttgtcttcaatgaccactttcccttactcaccccctcttccaaggtcttagctaatctcccagggactgaacactctccagacaaaatcaacgtaacagaagtctggcatttgagaatatttgagtttagttacctgtagtcttccttaggtatccctagaaagattagttcctggataaccacctccctcccttccccagataccaaaatgttcaagtcccttacatgaaatagcaaagtatttacatattacctatgtgcatccttccatatactttaaataatctctagattacttataatacccagtacaatgtaaatgatatgtaaatagttgttatactgtattttaaaatttattttcctttattattgttttaattgtagtttttttttttctgaatattttctatccgaggttggtttattccacagacatgggaactgcagataaggagggccgtctgtactttgtttgatacctgtcctgccggctccctgccacccccggcaccctccgtttctttctagaactatttacattaatgtctactgtgagctaggcattgtgataggcatgaaataagacacagtcctggccccacattcaggggacatatatatagacaatcacagtgcagttgggtaggtcttggtgtagttatgtaccaggtgctaacagagtgcaggggagggacatgtgagctgagggttctggggatgcttggtagagttaggggttgggaataatggggtttcttcagaagggtggtgaatgagctgatcttaggagaatatattggattagggctatgaaagagagcatttcaggcaagaaggaggatttttttttttttcatgaactcactacttaggaccaaactgtgagcaccagcactgtttcattttcaccttatggagaccattattggaggtgtgttcatcaagttttttctatgaaccaacaaacccaaatctcagtggttcacacccagaaacatttgtctttttgttcagagttttttcaggcagctgttgtttgcctgatattggctggtttaagtaaggcttggtccaggttgcagatcaggtttgagtttgttcttagtgtctccttctgggacccatggctagtcgggacatgtgctttttatgataatagcagaagcaaaagagaccaagcctaaaccacacaagcacatttctgctttcatctgtttgctaacatccctttgactaaagcaagtcatgatggccaagtccaaaaccaatggagcagggaatataccttctctctctattgggaagtactaacaagtcacatggcagagagaagttatgaattacgaatcaggggcaataatctactctgccactgtggtttcctgaaatgaagtcctgatagaatttggtcgcagggggattaaaagggagattctcactcagcctcagcaacaggaaagaaagaagttacaaaaagcctgtaaagaatctaaaggaggatttgaaggagagaaagcaccaataatctaactgcagcactttatttgaatttaagtaacgctggtcaaacattcttacaggctcttaccctttctgatctataaattcttcatgtagatattgagccaaaggttagatctagaaaatattatatctagtccttagcatgttggtttcttttcaatgcgcttaaacgctcagttaacgtggctttagacataattgtaacagaattacaaaggacagcaccttggcagaaagttcttcctggttttgatgtgttgctactgccagatttttgtgacatgctgatgctaatctgtcaaatagcctgacactaagtgagaagagaaataaaaggaggcatgacagggccaaggacctggtgtggtggaggatggttgggcagtagcaaatcctctcatcagccctactgagactaagcaacaacctatcttcaggtctctgggttcggtggttggggggagcgggggcggtcctacgtgggttagaactcatactactctcagaaatgcacctactttcagttacccaccaattctgatgctcaaagcccctccaaacctgttttctgtgggtccacctgagctcgcttaactaagatagcacaaattctgccccctcttatgggaacatacctaagctaatgacacatgaggtgctacctcttccgcatgtatacctacgtgtttgagctttttcctcccttggatgtgggagggtatcagtctattttataaacattttgtcaagtgtcctttgagtcaaataagagaggatattagaaaagctccagaaaactttgggaggccgaggcgggcggatcacgaggtcaggagattgagaccatcccggctaaaacggtgaaaccccgtctctactaaaaatacaaaaaattagccgggcgtggtggcgggcgcctgtagtcccagctacttgggaggctgaggcaggagaatggcgtgaacccgggaggcggagcttgcagtgagccgagatcccgccactgcactccagcctgggcgacagagcgagactccatctcaaaaaaaaaaaaaaaagaaaaagaaaagctccagaaagtttggaaaagtaaattcagacctgagagtaaccaagagagttcccaccttccttctggtcaatgttccaggaaggcgaagcactggatttaccctccactttgcagttaaagaggaaactcgaaataaatattcccttctacaggtttttttttttaattaagaatagatgagtcttatgttttgtgtgtggtggtgacattcaaaacatagtttttcagtgttttgaaaagtaatttacctaagaaatgacaagaagagtaatgcaacacatagacagcattgctgtgagttgtaaaacattgacagaacgacaaatgttcctgtggcatagagtccttctgaatcacagaaatgacatttggatgaaagcaaatcatttttacataggcacactgctaactgtgcagtgaagccagaaatagcacaccttggaagtgggccagagagaaagaacacctaagaattttatgttattcagaaaaattttcactttttcggtaggatttttgaggagtaaagaaaatatttgagagccttaaagaaaatctgagctttgttttttttttttttttgagacagagttttgctctttgttgcccaggctggagtgcagtggtgctatctcagctcactgaaacctccgcctcttgggttcaagcgattctcctgtctcagtctcccgagtagttgggatgacaggcacccaccaccatgcccagctaatttttgtatttttagcagagatggggtttcaccatgttggccaggctggcctcaaactcctgacctcagatgatccacccgccttggcctcccaaagtgctgggattataggtgtgagccactgtgcctggcctttgatttttatttattaaaatattagtcatttattgtgttcccgtatactcatcaagtgtctcttgagaaaactcagaccaagcaggaaacataggcttgatgtttaggagacagagtaaagtgggaggcatgacatggggagctgatcacacagagattacagatggagataaggagtgcataacatccccaaggatggacaggatggagagaagaaaaggccaaaatcaaaactttggaaaatgcccactgtggtgggctgataatggctcccaaatatctgtccacattctaattcccagaacctgcaagtgttaccttgtttgaaaagagtctttgcatatgtggtttacttaggaatcttgagatagggagattatcctccattatccaggtgatccctaaatgtcacaaccagcgtccttataagagagaggcagagggagattagacacaaacactgagaaggtgatataatcacagagatagagattggagtgatgttgtcacaaggcgaggaacaccaaggaatgctggcgcccgtgagaagctgaaggaggcaaggaatggattctccccagagcttctgtctacctttctggagtcttgattggcctacaggtgttcagtttgcacttctgtggaaacagggaacatacagcagtgacacagagccctgccgacaccatggtgagagacacctggccttcagaactgtgagatgataaaatcttgtttgaactcatcctggttgtggtaatttgttaaattgggctttgggaactaatatacccacctttgggaacaggaacagaaagagtttaaaaaagtaaggggaggtagcaagaagcttaagtgtcatgaaaacgaaagccaaagcaagagtttaaaaacagatgagcagaggcaatggtataaacgctagagcctaaagcctaatgggtaaaaatgaagattgaggagaatcattgatatgatagaagctaatgatggcagctaacttgtactgagcacccattatgctggacattgccataagcactctgcagatataaactcaattctcacaaaaccctatcaggtatgaattattgttaccccattttacaggtgaaaaaactgaggcaaaaatttaaataaatgcattaagtaacataggtggtaaatggtgtggccaagatttgagcccagaattctggctacagcatccacattttagccactactttgtactaacctcaccttatcccccaaggtgtgtgtttcccaaggttctgactttgggtcttttatcaagtaaggtagatgatgtgtctcaagaggaaaaggtatttttgtaatgattatttgaggttgaaaggaggaagattaggaactttatatcacctggaccccatcttctcagctgagttggagaggaggctatctgatgaggctgagggaggcagctaagtttctgacctcagggagcctaggaaagacagtgaggatacaataaaacaggaagcactaaatgaaaaacttgctgcacagtgaagcatgctcagtgttatttccttgactggcttttggcactgtgccatctgtgcccaagatgtctgcaccatgtagcgtgccaagtgcagaaggaaaagggactgaaggggcatcatcgccccacacctgccctatggaaagtactttgttcagagacgaagaaggaatccgaaaactgcacaatatgacctttgtcattagaaactcttgaacgtttgagaaatggaccatccatgtactggcagatgaatgagagttcaagggcattacatgataagggctaattgcaagactagagactggagtgggtcagaggaactgaaatgtgtcaaggggaaggtacagctctagatagttcttactaaggtctttgacagctgatcaagaatcaggaggacatttcagcctggacgatgccatgggccaagcatgggagaggggagaaacagatggttctttaagagcttaggccaaaggactctcaacattctgggcttccaatctgtcccccacccaggatagctttctgttaagttactattcagaaccactgcaggcttaaaacaatgagtgtttatattggtattgaatccattagactgcatggtatagtggaaaaaggcaaggttaaaatatcagttaatcactttgttgtgtgaccttggtcaagtaacttctcgagcctcagatttcccatttgtaaaacatagataccaattctcaggctcttatggttgtgatgatacattaatgggataatgatcaatatcgagtgtggtgcctgacatttaatagatagtgtcaacaatttttttttagactaagaacaaattggatgatgtaatttattggctgacaattcatttctaaagatgtgacttcagaatgttctataaatgttaacattttcaaatgcccagagtatattttctatcttgcatactagctatttatttacaaatctctttctcccattgacttagcccttgtgtgaggagagctcttttaggctaggccctttatctgtactttgaggacccttaattcctagaggaagaacatggatttttctcaggcattaaagattccttccaaatttccatgtaacatacccactttcctcatacctatcttctcctggtaatattcttgaattattttttatttttaacattttttgctatgatctacattattatattttaaaaacacaatttcaagttatatattttaaaaaaatgccatttatttccatgatacaatttctattctcatttacgtcattttgtgcttccttcagaaaagttatataaaagctaaaagtgctgtgctgagtcagaatcctgttcccctcagcccaataagcctctgcaaaaaggaaaagaagaaattttttcaggagagcagtctatttcatatttgcagactgagagtgcatgtatcatctgatgttgacttaaaatgtctctccccttcccttcatctgtcatccacaaagctgtttgcattcttctggagtcttgatgggtctacagatggttcagtttgtacctccgtggaaacagggaacatgcaccagtggcacagagcatggtggagtggaagaaaatcactccaccatgatgtggatgatgcatgtgtggttgatgctgtggtgtctgtcctacttatagagagagacctctgggagtagaaggctcatacttgcctaggcacctgagcatcagagtgcctgggggcagcctgccagcctatctcctacggggccacccagcctgacagtcctaacctgggtgaatctcctgagaccaaggcttaggctcacagcattgtgggcttagaaacaacatcttgggggcagactcataccaagcaattcatgtggaggtagatgtgtgaaagcccaggatgtccatctgttagctcacactgagaaccctagctgccaggtagacaggaacactagcgtgaaaactctcttcctgtactggaagcccaatcctaatccataggttatccggtgagcactgttggaatgagggcagttaaatggataaaggagagtaaaaccatatgtcaggactgtctggcggtgcaactggaattcttgaacttagtctgtttcttagatgagtgctgcctatatttgttacagtttgttttaatgatttcctggcttaacaagccctaatctgatttgagtcatccttccttaagatttgctagagtttacaaattggcccaggtcatatcctctttttcccctgggaaaatttaaggtgacccttcttacctttgacatgacctatgattggtgattttgcagtttacctcttagcagacttgttattttccctgtttctgggtttttagtagacttcttattgtagctttaaaataattttttttacattccatttttttaatgttcaatatccattttaatgcatacaacaacattataaggtagatactgttttatatcccatttacatataaagaaacctgagactcagaggctaatgaacttgcctagaaatacctggccagtaaaggaagaggttgtgattcaaacctacgcactctgattccaatacttaagacatacctgtggctacttttctgaatgtttcacatgtactatctaatgtaatccttacagttacacaatttttattaaaaagtacagttctcactcagaaagaaagaaggatttgcataaaaaagaatttcaagcccagaaatactaatattacaggtgtcaggaatagtaacatccagcctacttccagcctttctctctctctctttctctccttccctcctttcttttctccctacttccttctctctctctccctctcccaccctccctccttctttctctttttatttacttacttatttatttatttttattatactttgagttctagggtacatgtgcacaacgtgcaggtttgttacatatgtatacatgtgccatgttggtgtgctgcactcattaactcgtcatttacattaggtatctcctaatgctatccctcccccctccccctaccccatgacaggccccagtgtgtgatgttccccttcctgtgtccaagtgttctcattgttcagttcccacctatgagtgagaacatgcagtgtttgggtttttctgtccgtcaatgatagactggattaagaaaatgtggaacatatacaccacggaatactatgcagccataaaaaaggatgagttcatgtcctttatagggacatggatgaagctggaaaccatcattctcagcaaactatcacagggacagaaaaccaaaaaatccaaaataatttttaattctctttcttatcggtgtttcttagcaagaattcttctgtagtgaagaattttccctcatcaactaataaaaaatggctagtaaaggcaggataaatgcttgctttattccctttattaatcttctgagtaacgaattggtatcttaggaacctccaatggtgaacaatgagtgttttaaaaagatacacattgaactcagcctttctttatacagttgatatgcatcagtagatggagtccatattaatgatgtaatctatataggctgatgtaatcaattctacttttgaggagattgacatgatgtctggaatttgctttaaatactccagcatctaaaaagcaaatcaacaacaaagggagtgggatcgatgaaaaaaaattggaaaaatcttgatatttgttgacactggttgatgagtacatggagttcattatactattcattttgcttttggtatgtttgaaatatttccaaataaaatagttctcaagatgcatataattctaaggttatcaagagtgtaaatgtgagtttagccaacaactttggcctatctgtgaatcttgtggagaaagttcttgatttttattgaaattccagataccccaacagtagttcctaagccctactgctttggcaacagcatgtcaaatatgtgcacattttcccagcattttggaaggaatttttataagaattttcagatttgactgattggatcctgattcataaaagtcttgtcttggtaactaaggatgtctacttttgagtgatgcataccttaagaatttgaaacatggttgcttctgttctctggacttcatatgagagcgtaacagccttttagccattctgaagtgacttcttcagtctaatggtgccatttctcattccaggtttaagtttatctattcatggggctgaaaagcgtttgcaaatccatcaacggcgaagtgtggcaagccgcccagcgtcacgtcgtcgcctgcctgtggtcaggcattcctcactcccaccaggcagaaggtcaataaaaatggaggcaagctcttctggaatcactaatggaaaaaccaaagtcttccacccaggtgatgcatggggaagttcaacggggacccatttcagtagcaacctgaccacagtctgcattatatttttattgtgtaaatatgccatactttcagctaagcttgcttttgttaggagtcttgttctatttccccttctgctcacctcagtcaatggtaaatatcaccaagacgaataagaggggagagagcttggtggttcagagaaggttgaggctatgtgcacagtggtagaatctaaatgaaaatcagagtgcataaactcttgctcagttcaggaaagctcattatataataaaacaacatagagatttggtcattttcctgataatttgctctaagattggtcaggaaaaaaattcaagccaaaaaacacccactttgaaacctaggttatctgtgttggcttgcccacatcctcctgagatcaggagagaagactggagtcattatattatattgttttaagtcttctgggaagcatctgtgatctctttaaaatattaaaatgattctacattaaatgaagtaaaaacatcttatgtgcttatttgggggaaaagctcatttaagtattcattcattcattgaacaaatatgtattgagtgccagctacatgctaggcattgttttgggttcaaggaaatatcagtgaccaaggcaatgttcctgcaaagtgactttatagaaacatcaaattgcgaaagaattcataagtcattgagaataactctcacccaatcctgattcctctctgtaatgtcctagtggatgaccacacagctgctactgaagccagcctccatctctactcatgtcacaccaccttctctctcttagcatgtaaccttgcttcctaacccatcaagaaacaccagggccgttgggcatgaattactggaggtcccttatcctctctcttcaaatgtattgctctttatgcatcattccccactttcctccagttttcagaagatgaggggcctcccactgtctttgaccaagctcttacccatgtcctttagccatggtcacctttcacctcttctgaagcttcctcaggagaatgtgtcctcttgttttcatctctttcacccttccacactgctagctgtttaccttcagtctatgaaaaggctcaagcttctaccattctgatcatttaacactgtacccttttccctcttctgccactttttcctcctcccttccaagccaaacttctgaaaataataatttacttttgattgctctgttctgtcgagagtaaccaacacaatctggtttctagctcctccattccattctggctgtttttgaggccctcagtgacctccttttatcacaatgtagtggatgcttgccagactttcctgatgcaccagaccaaggtggacaacccacttgtttcccaaacactgttcccttggcttccatgacaatcttagggttcttctcttatttctctcgcatgtaactttcctggtttctcccactccagcatctctttcctcctcttgcctcctttcccagtacgtaccaaatccagaatgattcatctgtacccctaatcagttactgtgcttgttctaccaattacagggtccagttcaaacttcttagcatgttaaaaacaaatgccttttgtgatctggcccctactgctttcacccttcattttttgccctcttcttccttaagctttattactatagtgcatcaatcaaggttcaatcagaaaagcaaaaccagtagaaagtatgtactagagactaattacaaagaattggctttcattgtgggagatggctaggcaagtctgaattcataggtcaggctatctgcaagggcaggctggaactcttgggcacagctcttaaaagcttcagctctgcttttaaggcttttcaactgacctagattatcaaggagaatctcctttacataaagtcaactgactatgaactttaattgcatctacaaaacaccttcattgcagcactagattagtgttcattgaataactggagactgtagcctggccaagttggttcatcaaatagaccatcgcatctgagtatatcaatgtgctttcacttctctaaatatgtgatgctgtttcatgcctcccaacctttgctcctgctgttctttcttcccaggataccctggttttgctctgttatctttgaacatgttgaaattacttgtctatccgtccactgaaaggtctttaagggcagggattctggattatttatctttgtactcccaataaatatttgtagggtaggaccgaacaaaaccttcattagctgtgttttagactactacaatagcttctgaatttttctgcctgcctttctttcaacaagtacctgatatacatcagtaaacaaagcagacaaaagtccctgcccttggggagtttacgtagtagctgcaagagataataaataaatatattaaagagaccaactgtgtaatctatattatagttatatgtaagctatatataacatatagtgtttagggaaaggataagtattatggataaaagaaaaagtaggggaagagggtagcatgttgcaatattaaacatggtgatcagggtaggctgagtcacgaagatgtgtaatcactgactagaagtttctgagacagccacgtggatgtctgagcaacttcattccagcagagggacagttagtggacaggttgtagggtaaaagtgggtctggcaatttgaagaatagtatggaggctcctcaacttggagtggagtgagtgaggtggggaatcaactcagtgaggttgtagggactagatcgggcaggaccttataggccattgtaaggactttgagccctatgtgaaaggaagctcttacagggttttgagcagaagaattccataatttgatttatattttaacaggatgtaatatagactatggggagaatagattataggaggagaggataaaaggagaaaggtcagataggaggcctccagaatgatccagtggagaaatgatggtagctctgactaggaacagcagaagtaatggtgagaatttagagtctggatatattttaaagctgggccaacaaaatatcctaatggattggatgtagggtaaaagagaaagaagagcaaaggatgactgaaaagtttttttggcctgagtgaaatcagctgagatggagaaggctgcaagagaagcagatttggtgggtttgagggcaaaggtggggctgagttcagaagtttgattatagatgtgataatattgagagctggcaagatcttgtgggtggtagtttgagctccatgtctggagtttgaaagatgattggtctgtgaaagagatataaaactaatagttgttgacatataagtgctatttaaagaaatgagattgcaagagatgaccaagggaagaagtataaatggggaagggagagcatcaagggctgagatctgggacactccaataataaagggtcaaagaggacatgaaccacgagcaagaaggccaggaaagaagcaccagcaaagatggagaaaacccagaagtgccacatctcagaaattacaaaagtttatcaagaagagaagaatggttttctaggctaaatgttattgaaagtcaaataagatgaggactgagaattagtcgattttagtaaagtggaggtcaatggtgattttgataagagccgttttagtggagtggtggggatgaaaccctgattgaagtggatttaagggagatgagaggatataaattagatgctctgaatatgggcaacttttttgagcagttttgctatgaagtgtagtgaagaaatagggcagcagctggaggagaagtaaggtcaagagtttcttttaaaaatagcagctctccagcagataatttatggtgttcaagagaggggagaatttgtgatgtgggcatcagtgagaggatgagagctatgcacaataggaccatggatagtttatctgtgataactggtgggaaggaggcgtatgtatataatggcaggtgtgctgagggtctaataagttcttttcctatgttgtcagctttatctttaatgtgagaagcaaggtcatctctgagaatgagaatggagccacagggagaaagagagagagaaagaaagatatggagaggggaaatatgtttgccaactcacattaaaagggatttgagattcatagtcatgaaactaaagtaggactagttatcatcattgtgtagtttttaattttgtgtagctacatgagtaaagacatacagttggtggtgagttggatttgaacagcagtgtggttttgcaaaggaagtaggaaagagagaaagggaatcaaaagtgcatggaagggagtgatgatagtgattcattttgtgatttggtaaagagggtacaagacatcaagggaaggaggtacagtgaaaagttggtaagatcaatcggttgaaattcccagagggttcaaaaaattgtgggggttagggtaatagaaggaggatctggaaggataagagaggtggtaagagaatggaatgtgtggcactaatattgtggcacatatcttaataacatttatttaattttattatagtaatatcaacacaagatgctgttactggtaatgacaaggtttaggccaaggtacaaaacaagggactataaagggtagaaggcaagatcattgaatgaaaaaattcctagggactgagaggccaagatgtgaaaatgattgagtcaagaattgagtagctttgggaagaatgataagccaggcattaactttactgagaaataagggaacatgatctggcaggtagcaggagagtacaaagataaagggtagaagatgatgtagtataacaacttgagattcaaggctgaaggtgtttggggaagagggaagaagaatggtctgaaggtggatttgagactcaagaaaggtatctactcctctttcagatgcgttggtgccagggctattggagaaaaacagttctaagtgaaagagccacagggaagcatgaccactgggaagatccaggttttccttagagcaaggtgaatggggcaatctgagaagagattgacgacattcagagaattctggagagcccagtggaaggttttagatgttggacaattgtcttcagtggttctctcagacaccaaggttctcctccagagaggataattagcatcagccttcctcttcttaaaattgttatggctatcccgaagaaagtgcagccttgtgagcccaccttttcaagtcctctccaatttagcctctccctacttttccaggcttatctcattttacactgtcattatccatgttattcagcttcaggcatccacaggctttttagtatttctcaagcaggcttttactcttccattttctttgccattgctcaagctcctctctcatcttggaatatcccttcccctaataaatgtctactagcccttctcattcctcaaaatgtaactcaaattccgcttcctccaagaagctttctagatcttatagtcagaattattcccctacttccccgtgcttccacagaacttagaagccttatcaaagtccatctgtttctatggtcttatagttctcccagaaggcaggaactctcctcaattcatctttgtatcttccgtcactcctaacatcatgcgttgtccctagtaggttcttaataaatgattttatgttgtttgtcaaaatctgttctactcagcagatataggttagcattctgaagttatatggcgtaaatcttaactcttctttcatatgacaatccttcagttgtttaagaaactcatccctagctattttccaggtgaaacatttcctagtgtcttcagtgcttccttgaatgacatgatactcaacttctttacctttgtaccctctccactcttagaaacattcttatttcattgctatctctttgaaaatgcagtgcccagaattgagtattccattaaagtcaaacgcaggcagtgtagattcagtctgtcctttcctttaattgatatcctgtgttgatattactataatacaattaaatgaatgttattaagatattcctaatggtgttttatcaacatgggctaattcagcccacattgtgagttaatatttcaagtctcttccctcaccttaaaaacacatcacttggatgagtacggtggctcacgcctgtaatcccagcactttgggaggccgaggcgggtggatcagctgaggtcaggagttcaagaccaggtggagaaaccctctctctactaaaaatacaaaattagccggacgtggtggtgcatgcctgtaatcccagctactcaggaggctgaggcaggagaatcacttgaactcgggaggcggaggttgcggtgtgccaagattgcgccgctgcactgcagcctgggcaacgagcaaaactctgtctcaaaaaaacaaaaacaaaacaaaacaaaaaaacatcactttacttatctacccatcattttatcatagatccttaaaccctacatatgtcgagtattggttgaaaatataaataaagccaatcctctagcctagaattataattaagaaaaaaatatattaagttacaattagaaacttgttatttaaaaaaagtatttttaaaactcatattattctggcaaggtagaatatgatttcagttccattctctttatttttagtgtacttggacaaatgcatcatagttctctgttgggaaattatggaagagctctcaaactgagtttcttaagtgcagtgagtcatagatcttagtagcagcttggacaatttagtcatattgaggcctattaagtcatccatctattttttacaaagttaataatccctgttcccgaagtgttctctaaggcccactcggattggttactaagaacaaaaagagaatttgggagtcttgtagattttctgttccatctgcctgaacaatttcagtatgtttatcctcctttgagtttacaaacttttatgagggcctactatttactaacaaggatttattgggaatttgccctccttggagtattttgaaatggtgcagaactctattaaacatgggtcttaaggcactcagtcatgtccaagagagacaatcagtcagggttctttgttaccaacaagagaaactaatcatttagtccaaacaaagaaggaatttaaatttgaagaatgtggatggaaaacctaaagagccagccttggaaaaggaatcgagaaatcaagaatagctatttgattagaatagaatatcttctatttgactatctggaatgattgaattcttaccggtttttctagttttgcatcatttggctcacgttttgaagatttaggaggacagttctattggctatgcacctttcctttggttggacagacagtgctgagacaaatgataggacagaagacctctctcttcagccttcatagtgggagggtaggactccttgatttcttctgctaccttgactacacacagcgagggagaaggacttccccaaaaggaaatagaggtgatgttaggaaacaactttatgtggaagaatgcccactacagggacatgtgcttaagctgctgtgatagaagtcaaactgtattaagggctggaacacagaaataaataaggttatggcagcataaccttattatgctgaagagaatttagaaagactcaaaacacatatggtctaccaatttgactttgaaggtcaactaggatttcaacagaaggaagaggcatgaccattcagatgcaggaaagagcataatgataggaacggtgcattacactggttctgaaagcaagctttatcgttaggtgtttaaaagctagatatgtcacctgatggctattacagccttagacaaattacttaatttctctgaatcttagtttctacatcagtaaaatgaggaaattaatacctaccttatagtattagggctgccaaattaaatacaatgttcccaattaaatttaaatttcagataaacaagtatttttgaaatacttgtttgaatttttgaatatttgaatattcctaattcaaatatttgaaattcaaatatttgaaaattcctaaatattgcatacgacacacataataaaaaattatatcgtttgaaattcagatttagcaggacatcctgtattgtaatgtattatgtctggcaatcctacatagccttgttatggcaattaaataattggtgtagaatgtccagtttgatttttggcacatacttggtgttcagtaataaatggttgataaataaagaaatcatttttcttgtcaccaacatgataagcaaaattcagaaccctgaaagtacctatgcctcagaatccttgttatctcagttaccacttcatttagcagtttcccagttaacttgtgctagaataccaataagatggtctctcattatgctgtataaatacagaaaccattcatcttcatcttgtatttgtatggtttctctttccttctgattgtttcaattctttctcctgtttatcaatttcattttgaccttatcctttagacactcataattaatgaatattattttctgcttcctttatggaccaaaaatataagtggtaaatggtactaggtttgggactataatttaagactcaagagcatagtaaactgaagcactgattttgatttttttgagtttgaaactataaagcttagtggatatagatcaaattatcccagctaatgactatgccatataaaatagaattggaagctttctgaaatctaaaatacttcttctattgctttttccttatctgttagacccatcatacaatcctagagaagtgtcattaatcacagaatatgtcctttagtctcatttagaatttgtaaaataatgttttgccgatatgtgttattcccaagtaatttctaatacaggttcttttatctcactttttaaaacctatggccctttccacatttatgcatgattattgttccctaagaatctatctagtatttaaatgctaggacataattgattttccaggagagaaacattaggattttcttgtttccaaacagctagaatgattagtactgtctgtatacttaggcattaaatgcatagtttgataataataaaattatagctacaatatattaagccctctaccatattcccaacctcaaaaactgttcaactgttttcattcattatctcatttaattcccataatattctcatgctattttccttatttgatgggtggggaaactaaggcatgaagaagggtaagtaccttgcctaaggttatacagccagtaaatggtgaaggcaagattctagctcaggtattcttattctcttatttaatgtgctattactttcttcttcacacaacttggcagaaacatttctagcaaattatcataaaaaagccttagaaaatttaaattaaaagccctgcagtagctcaaaccttagcgtaagaaaaccatactaaagaagggaccagttaggttctgttgattgcttgtgtaatcgtcttcaaagtttattatttccttcagtgtaagtgatgtccactttgtagcttctctttctggtctactatgctctggacttttgtttttcatcctccattttttgggttctgatataataaaattcattcctatttccctgagtttcaaagatttctttctggaaccaatgtcaaggcctggtctcaaattagggaacagactgtcttctgtttctccctttaaagagcagtaccagaagatgtggggagagggagaggagaggattattaaggagagacttttaaaagaagaaggacagtcaagaaagacttgttcctagttctgccaagagtcaggataaacttatgctttagggaaacaaaaataaggaaaagataaatatatgaccaatctttagaataacgatcataatactgcaaccctacatttacttgatattctgttgtttccaaagggctttcacaaatttttctcctgcatttcatttagtcctcatagcagtctgtgaggtggaattatgcctattttactatggcataggaagtgaagttactagctcaaaagtacaaaattagcaattgacagaccccaactaaaacccaggtatttaatttcttatgtggccgggcgcggtggctcatatacgtaatcctagcactttgggaggctgaggtgggcggatcacctgaggtcaggagttcgagaccagcctggccaacatggggaaatccgtctctactaaaaatacataaattaaccagacattgtagtgcaggcttgtaatcccagctactagggaggctgaggcaggagaatcgcttgaacctgggaggtagaggttgcagtgagccaagatcatgccactgcactccagcccaggtaacagagcaggactctgtcaaaaaaaaaaaaaaaaagaaaaaagaaaaaaaaaaaaaagctgaagcaggagaatcgcttgaatccgggagacagaggtggcagtgagctgagattgtgccactgcactccagcctgggtgacagagcgagactccgtctcaaaaaaaaaacaaaaaaacaaaacttattatgggtgttttttccacggtgtcaactttttatcttgaagatgagcattagttaagagtgaaattttgggggctttctatccccttttctgaaaatagacactttattgagaagtgtggctgaggtttgcttataggatctaaggaacctggctgttctcttgaacagaactgaagcgtggatgagataatcagtcttcctatttgtgaatggatttttggggtggctggaagataaaattgtatggaaaaagcgacaagggctactttggacttctgttttatttctcattgcattgaaggtgaatgtggtgcctttcagaacagttagtgctgtggtttagaaataacactgtaattatccttcatttgaatctcttcctctttaagtgggtttttttagatgtgtgatgtgagtttagtcaataggtgggggtgcttaggaaaacaagctattttggtccttggcaaatgtgggcattggtatctgtgttccttgctatcatttgctgagtaacaacattattttttttctaaaaatatataccacattcttctcttatttgcatttgcttttcattttactgagggacatatacacacacattttgatctataggatgcatttagagggaattttctgaaaaatcattttacaaccttttgagcacagaaagtgaatgaagaagagccataaaaaggcagccacaaagaaaagcaaatggttaatttctggaaaagagcattgcgttttgtggaatttaaaactgcttcttctgcctgaggctatttaaaataattttatattttagaagcttgaagagatttaagtacagcaatgtgccccttatccatagctttgtttttcatcgtttcagttacaataagaattctgagagaaagacagaaattgctctatcattattgttataattgttctattttgttattagttattgttatcaatctcttattgttcctaatttagaaattaagttttatcataggtatgtatgtataggaaaaaaagcatatatatagggttcagtactatccacagtttcagatatccactgggggtcttggaatgtatccgctgaagatagggcgggatgctttaaccatttagctcaggattatacaactataactagtagagctgagatttaaaagtctaagcccttagccatggtggatagtcagttaatagtgagcttttattttgcttgattgtctgagtttgagctgacaggccgatgcacaagaggggcagagtcctagcttttttgaggattgtcatttcgcaagggcaatattccttctcatatttatctcaagcccttcatgtataaagacttattcaagacaaaagggtaaacaacatttagtgaggctgaaaattgcacagtttctgttctgtaacgcctcctaatcctgagtttgtctcttctcctcatctgcaagagccctcgtcatcacaacagacctcagcatctaggagattggaagacaccacagaattctgcctatgtgattcacaaatccttcttgctatttgaagctttgcaattctgacttccaggccctctagggaacttttagtgcagggatgcattataacttaggagatcatgatcttaccaatcctggaaaacatagaagcaattctgctgaaggagagccattactggccgatgcagtagaattattatttccattttagacctgagaaatatctgcctgctgttagccaaatgtggttctcccatcaggacccagtaaagaacttggccattaggactactcagcattaatcatttgagggaatagctttagccttatagtgactagtgtgagtgaatcaatatgtttattcctgctaatatgagccaagctttcttctgtaaaagaatgaacttacaacatcataagatttatggttttacacaatactaataaaatgacatgaatattttttgcacgtatgaagcatcttctattgtgaagcttttttagtttatgccacacacaaaaaaaggattttggtaagtgctacaaataatgttaaaaaaacaagatggaactttttttttcagaaccagtagcatttcctacatgtaaatctatggtttccaatttcatattctccagaagagctgaattcatttcctttctctcttcttcagagacttttcttgaacactggctgatgccaggaaagtctgtaaagacagaatggacctccctcccttcttttttatttttatttttttaagatacaaggactctgttgcccaggctggagtgcagtggcatgatcatagctcacttcagcctcaaactcctgggctcaagtgatccttccgctttagtctcccaagtagacgtgattacaggtatgcaccaatatgcccagctaattttattttatatttttttttagagatggaggtcttgctatattgctcaggtaggtcttgaacttctggtctcaagcagtcctcctggctcagcctcctgcagctctggggttacaggtgtgagccaccacacccagccttcccttctttcttaacaccattctccatctcagtactgtcttaggaacacagaattcacctatggggagttcaatacaaaactcccagtttagaaaatgggttctttggtgcctcttaagtccaaaaatattacatgtgaggatttattttagatatgtagctcaagttttgaaatatcactgctacctattctataaaaaatgctgtgtttgagaatttgtattaagtatacctctcaggacaggaactaccaaataaaaatatttgtagaatataaatagaatgtagacagaagctcagctctagcaacagttattatgaggctatcatagaaaatatcatttgtcctcttaagtctgttttacacactccccatcttttctgtgacatggggagggtaagagctgatttgtcaggctttcctttattttggtttcaatatgaagtaactattccaagtcccaggttacaagatttttaaagtggaattgtttttacttagcctaggccccaaacctggagtaggccctcattttgcagagaatgaatatataaaatttgtagtgaagcacctagatctaacatgatgggccaaattatttatgtataatgtctataatttgtactacagcctccaaaaaattttagtttcccattttttcaatgagaaagataaggcttattattatttaatgagtcaaggtcacataaaagtagcattcaaatccaggttagtttagtgccagtatctcctttttcaatcacttgtgttaatttacatatatgacatatgtctataattgattgaacaaggaaaggaattttaagtgatttatttaaagtaactaaactaaggcaatctaatgaaattactaagaatagtgatttggtgagtgagtggagggcaagtggaaagtggtagtaatgtaacttttacattgttatgtgtcacagcagaaaaaccatatatagtatataaaattggaaaatcatgaaacaatgggacacacacatagaaggatccaacagagactcttaaaagtcctttttccactgaggaagaggacagagattgcaaaaagggtagctattgatttttattgtaagccctttggtactttgatattttgtttattatttgataaaatttaacaagattttactaaaaatcaaaaagttatgatctataatatgtctttcacagtaatctactgataacctatcaagatgctttaaattgtagactaaaaaaaaatcagagcgtcttcttagtttatattcattattgttattcataatgtgaaattgcagtgaaagagcattaactgagcatctaatatgttcaaggccttgttctaggttttataggagataaaagggggatacagtttgatcccaggcttcaatgtgttactgtctagttgaaggtgctctcaatgaggaagaaatctagatatggaaaaactaggaacttaaacattttctttgtctgcttcatactgtgctaggtactctgactcatttttcatagaaaacatatactatagaaaagacaaaatataaagagctatgtgagttcagtggatagaaaaatggtttttacttatcaggatcaagaaatgcttcctgaagcagagaattctaggtgggccttgaaagcaagaagggatttctatggacaaagaatggatgggaaggcattgacatatttgctaatcaagaaacttatgtttgaaactcatttttttgttgctgtttctcttgtataaaagtgctttgatgccctggaagttgaggctgcagtgagctgcgattgcatcattgaactccagtctgggtgacagagtgtgactgtcttaaaaaaaaaaaaaagcctagctgtaagctaggtacagaatgaattttaaaaatattgcttgtccagctaaagactttttattaaatgtaaatgctgttaccaaagttacagaatcacaattaagtattgagtataacttctgtccataaaatgtggggaaacttaaagacaaaatggagatcacatggattttgtagctattcttgatttttttttaattggtcaatgtgtttccacatatttagggatcttcttagcttccctctttaatttatttgtttagtttccttaggattgtacttaattgcatgttaattactgatgcccagtggggctgtattttaaagaatcttcagtttgaatctatagtatctttaccatcttgcctagtttttcaagtctttgtgttctgatccaaaggccaagatatctgtggctatggcaaagaactcagattcttaggtttttagaaattataacaaaaagctatatgaataacaataaataaataaaatcagtagtacgaagtaggcatagtacattttttacattgaagtcatttaatctctctcacttgggcactataagttaaaggtggagattgtcatctttgaagattcattggtacactgatcactctccatttaggaaagcttacaaaagtccttgttttacagctccctctcctttgtagtgttagacttaatgaacggcttattgtcagaagttccagaccattacattatactctatgaaagagtattctgtatttcttctagagcagagacagaaaaatatcttatatttgggggactctatgtgtgatcataatgtttagcatgaagagaatgttgcattttgaagctgtttggtttatacattttaaaaaattacatgaatttagaaaatctgttatattaaattggatatttcacatctatggtttaatatctgcagtctttattttcagtcttaaatcctgaactccaaataattattaatctccacaatcccactcttgaatttttacatgtctttaaagttataaaagtgttttgtgctaagggcagttgcaatggctcacgcctataatcccagcactttggaaggctgaggcaggcagatcacttgtggtcaagagtttaaaatcagcctgtgaaacatggaaataccctttctctatacaaaatacacaaattagccaggcatggtggtgcgcacctgtagcccttggctacttgagaggtgaggtgggagaattgcttgagcctaggaggttgaggttgcagtaagctgtgttcgcaccactgcactccagcctaggtggcaaagtgagactttctctcaaaaaaatatttttattcttattgtgaaaaacataaaaaagataaagtataaaacaaaatctacccatcatttcacagctgagggataacttctgtacctattttgagtattttcttcctgttatatttttctagtcatataaatgggtatgttttttaatatgcagtcatgcaccgcatgatgactttttcatcagtgatggaccacataaaccatggtggtcccattaagattataatggagctgaaaaattcctatcgcctagtgatgttgcaggtgttgtaatgtcatagtgcaatacattactcacgtgtttgtggtgatgccggtgtaaacaaacctactgtgctgccagttgtataaaaatatagcacatacagttatttacagtatataatacttgacaattaaactactatgttactggcttatatactctaccttttattgttgttttaaagtttactccttttactgattaaaaaaaaaagttaactttaagatagcctcaggcaggtcttttaggaggtattccagaagagagcatttatatcatgggaggtgagagctccattcatgttattgcccctaagaccttccagtggaataagtgacattgataatcctgaccttgtataggcctaggctaatgtgtgtgtttgtatcctcattttttacaaaaaaagttttaaaaaagtttttaaatttaaaacatagaaaaatgcttatagaatatggatataaagaaagaaaatatttttatggagctataaaatgtgtttttgttttaggcttagtgttatcacaaaacagtcaaaagttaaaaaaaatctaaaaggttacaaagtaaaaacttaccataagataaatttattattgaagaaagaaacatttttaaataaatttaatgtggcgtaagtatacagtgtttataaagtctaccaatgtgcaatagtattttaggccttcacattcactcaccactcaatgactcattcagagcaactttcattcctgcaagctccattcatggtaaatgccctatacagagagaccattttttatcttttatactcgatttttactgtaccctttctttgtttaggtattcaaataccattgtattacagttactacagtattcagtgcagtaacatgctgtacaggtttgtagcttaggagcaataggctgcaccatgtaacctaggtgtgtggtaggctataccaactatgtttgtgtaagtacactgtatgatctttgcacaatgatgatatctaccaatgcatttctcagaaagtatcccatccttaagtgagacatgactgtacttgggacatgtctctgtgtgtgtgtgtgtgtgtgtgtgtgtgtgtgtgtatgtatgtatgtatgtatgtgtgtatgtatgtatctatctatctatctatctatctatctatctatctatctatctaatctatctgtctatattcttgtattggttttcctcaccttttcattataaacgagcattttcccacatcattaagtattctttgaagacagaatttaatggcctgtatgcttcctttatggtgcttcttttgtgtcttatacttctatactgccctctcacatttaaaaaaattattaaaggtttttggaatctttgttattaaaaattctagttatctagtagtcatagctacttctacctgagtttatgagcccctgcttatgacaaataacaaataaataaattgggcttctatttattagtctatttaggaagtcacttgttttttagcttatgtaatgtgttttgtcttgatctgaagtattagaacacaggatcattttactgggttatgttggatttatttggcaaatccagttctcttatctccaatagcctgtgtttgtgactgcttggatatgggtgattttaaagactagtgaagagcatggattgtgattacatatttacacctcaatagctgtgtgactttgggcaaattactccattgcatcgcaccttcttttcaagattaaagcctaaatgatatcataaagtacatagcccagagccaggctgataattgaatatttttgttatttttctgtcattgttgtaattatgaggtctttggccatcaaatagaacaaagctgactagccttagttgagattgaaaagcatcagaacttttctttacccattagaagtaactggccatggaagaaaaaagcaaataacccattttaattctggaccagcaggaaggcgtctttgtctgtcctgtctaagaaactctcataagtagcttcagactttgcaatgaggcagctgcattagtgcatctgaaaagttcactgctgtggctggaatgttaaatagcagttcttgacagtgaccgaaatgcatacctggggtctcaaggaaaggacttaggacttccttttcgttattcacattgttcaatacctagtctgtctctatataaatgccagtgttgctttaataaattattatggatgatcatagtaatacctgtagctgctatttactgagtgctgactacgtgacaactaaggtttttgtgcattatctcatttaatcctagtggctgctctgtgagtctgttatcatcatccctatttcacaaaggaggaaactaaaatttagagaggttcagcattatctaataagaatttcaacgttggtctctcagactccagaatctgagcttgtagctttgctcttagctctgttgttttggttttataattactgcatagcctcattcattcattcagcctgagaatctactttgttgagaatctacttcatgccagctcctgttctaagtgcttgggttatagcatgcaggcaaagtccctgccctcccaaggcttattttctattaaatataatagaatattaagttaccttcaggtgttttactcctagaataagcgttcctgtgaggctatgagttatcttattcttgagctttaggaacgtaaccgaaattttgtataaggctgagtatacctcctaagcttatgagatttctacagaatttctacaaaatactggaagctagggcatgttccattttatgcatcaggctgtttattttagcattggctttttagccctggcagactcctcaaatcggagacgttcttactgattactttaagaagcttttagaaggtttggaaggtttattgttcgtgataaagctactttttgataccttggtttctttgacttccttaaatgttctataggtgtatggagcagcataaaaactttctttctttagaacatgccaaaaatacatcagacaaacctagaacaagaggcttaattacttcatagaataaattttcaaattcggatacagttgaaaaataaatgatgaatcggggaggtctaattatgagggacctaagtattaataccttgtttccgtaatatcaagaatattaaatccatccttaagaatgaattattataagaagaagatgatatcataaagtgtttgtgttaatgtcacatttaatccatgtggaagctgaaaataattttaaatatccttaggtagaggctatgttatattttttacgtagggaattatcagtaaatactatgaagtgtgtttccttataaaaaagtagttgccttattttgcattggaaatacaagtgaacctttttggtcccataaaatgcaaatggcttgtatatgttcctttttttttttttcttaagtcctttgtctaagaaggaggatcattggcaaaccagctagccattcactttggattttgacatagcttctccttgggaccctaatgacagactctctgataaccagtgcaaactccatgaatatctttcatttctctagaaggaggtgtggatttgcaaggctaccagctggatatgcaaatactacctgacgggccaaagagtgatgtggacttttcagagattcttaatgcaatacaagaaagtaagtttcactcaaattttaaattcgccgtgagagaagaagctattataatacttgggaggggtaataaactagaaaccttagatgtcaagctttaaaaaatattaacaaaatgatgtcttgaaagagatactgtgcaaaataattttgaaactagaagagatagtgaaagaggtttaatttgtgagattaaatcacataatagtggaatttttgaaaaagctataacggaatgatcaattctgtatattgtatttcatgtaataatatttagtaaaccttggagtattgtaaatttttagatttcttgattaatcataatcaaagaaaaacctttaagaaaacaaaatacaattcctctgctcaaatggaagtaataagagggaaatgttagtggagcaaggtgaaatcaggaacttcttctccaaaatgagtatctggagtcattgatgatggactgcatgccagaagtgaaccctcattttctaagcattttgagtaatcaaggtttgctcttcttcgagtattttatttctgttttatagctttcactcagaattttatcagaatcaacacatttactcaagttaaatatttagcattgaggatgggtgatgcggtgtctcatactaagtcattaccattgatatttcattatcagagctctaattctagatgatgaagctcctcttaatatcgaataatttatctcatgttggatttgagggattttgatgtgaagaacattgtataaacaaccattgcaattttttcttacttctagttttgggacattgcattttcttttctttttttattattatactttaagttctagggtacgtgtgaacaacgtacaggtttgatacataggtatacatgtgccatgttggtttgctgcacccatcaactcgtcatttatattagatatgtctcctaatgctatccctcccccagccccccaccctacgacaggccctggtgtgtgatgttccctgccctgtgtccaaatcatctcattgttcatttcccacctatgagtgagaacatgcggtgtttggttttctatccttgtgatcatttgctgagagtgatggtttccagcttcatccatgcccctgcaaagaacatgaactcatccttttttatggctgcatagtattccatggtgtatatgtgccacattttttaaatccagtctatcattgatggacatttgggttggttccaagtctttgctattgtgaatagtgccgcaataaacatacgtgtgcatgtgtctttatagtagcatgatttataatcctttgggtatatgctcagtaatgggattgctgggtcaaatggtatttctagttctacctccttgaggaatcactacactgtcttccacaattgttgaactaatttacactcccaccaacagtgtaaaagcattcctatttcttcacatcctctccagcatctgttgtttcctggctttttaatgatcgccattctaacttgtgttagatggtatctcatggtggttttgatttgcatttctctgatggccagtgatgatgagcattttttcatgtgtctgttggctgtataaatgtcttcttttgagaagtgtctgttcatatcctttgcccactttttgatggggttgtttgttttttttcttgtaaatttatctgagttctttgtagattctggatattagccctttgtcagatgggtagattgtgaaaattttgtcccattctgtaggttgcttattcactctgatggtagtttcttttgctgtgcagaagctctttagtttaattagatcccatttgtcaattttggcgtttgttgccattgcttttgatgttttagtcatgaagtccttgcccatgcctagggacattgcattttcttgttaactttcttatgaataattttatgctttttagttatccccatttatcattataccgtcctcttgaccttatgagatagttattacctccaccttacagatggaacaactgagggtggaagaaattaaatgacaggggaagatgataataatggagaccagactgcaatgatggctgtttgttccttcatttaattccttcatgaatgtgctcagtacaggatttaaacacattgaggtgaaggatcctgaaactgaagattaggctacttttaaaagaaatgtttttagcagagaatataaggggatcagctatttattccggttgaacaatccctttatattacattaatgaataaaagagaaaaaatttccacaagagaataaaaatcagattattagacattggagagaaaataacttttcatggaaagttataaaattatgtaattacttcacttgatttgaaagatgataggttgtacagtgctcaaagagttcaaattttttttcaataaatgataaaagttggcttccatgcaagtgctagaggtgaacttaaatttaaggagtgggggctagaatgaacttgcatcagaatgaactaaaggttagtaaggtactatttttatagtaatttttattaccagatcttagtaaagacgtgtgtatctgatgttaactgttctgtagtttagaagggtgatctttctatgaacaggtagaggagtataaatttatgagtacttaacagaagaaaaaggaaatgttacttgactttaaaatgcaaatccagccctttataagtttatgcattttctattgctttggaactaatttattttcttgttgcaaacaagttttgtgctaattagatttgagaagctgcccacacaggctgggtcatttctggaaggaaagattttgggccattcagtctctatttaggttccaaatatgatcgaaatttttagccagttcatggaaatctccaagcataaaaataggtagcttggtactttaagggactgtagcttagattatcgtttctggaaagctttgcgagaccatcgttaagtgtgtaaagaatatggagttctgcgactggccccagtgtgtgatgttcccctccctgtgtccatatgttctcattgttcaactcccacttataagtgagaacatgcggtgtttggttttctgttcttgtgttagtttgctgaaaatgatggtttccagtgtcatccatgtcctgtcggggggtggggggctagaggagggatagcattaggagaaatacctaatgtagatgacgggttgataggtgcagcaaaccaccatggcacgtgtatacctatgtaacaaacctgcacgttctgcacatgtaccccagaacttaaagtataattaaaaaaaaaagaatacagaattctgaacatcagtataattcctctcctttttgttaagattaacaagatgatggaaaattttcacttttttcttcaaatgttgtgactatttatatatagtatatatatatatatgtatgcatgtatatatgtgtgtatacatacatatacatacatacatatatatacatacatatatatacacacacacatatatatatatatgagaccttcaagatcaagctagaagtgcatatgtgcatgcttacatgtgtgtatttcaaacatttcttgagtgtctggggtaggctggccatgatggtgttttcccaaagtatctcttttcaatcttaaccctaagtaataatagataagattttctccattttaaaggtgaaaaaactgaatatagctccccaaggatatatggttactatgtgatagagtcaatatttaattgtatgttcatccttgttctgctaaatactaaattaaataaaaatgattaggaaaaatgaactactttgcatttttaaagttgtattatattttcacatcttgatgcaagaattttgccaccatgcttctacattgtgaaatacatttacagtattttatcttttagtgtgcataccctaagtatatcctcatctcttctaaagatgtctcagagtggctggccatactcaagtgctttttcagatcctccatattagatgtacagcttataaaaaagaaaagagttattttaaccatccatccatcttgcctgtcatgtgtcaggtactgtgctaggcataataccttaaggcagtggtgaatgtttggtacaaagtctaattcaggaaaaatgaaaacgttttcagatcacgtcttgttttggtgttcaacaggaaaacaacttgattgctttttaggaacaggcatttacatgtgaaagtataacaagggtgtgtttgtgtgtgtgtgtgtgtgtgtgtgtgtttgtttcttttcgttgatgttatttgtcccttcctctctattctcacccttcactctccattccaagatggtagtcaggtaccttgaactcctttgtttcagcagagttttgtgttaactaaagttcctgccttttttttctgaaagcctgagcttccaagactgatgcttgtatggaagaagaaattgcaagagagatgccctgtagagggagccaggcttctggtagggggaatggaaagggagggaatggctatgttgcatgcctgggagactgcaggggagccacctgaactgtcagtcacacagagagttcctggcctgagaaaggaacttaggagtctctgggaagggggcagtctcatcttcctgtttctttgttttatctccagtgccttgaacagagcatggagtgtggtaggtgcttactaatatttgttagtgattgagtgaacgtgtggaatcactggagacttgaaaggtgggcagctcagtagtaaccagtgtgtcttggacacctgactgctctttctaaatgttctgctctttacaaaactcctaggacctttgcacagttctggatacatgaggcaggaaagtgggagtgtcagcaataactgaaattaaattgtccacgaagccggtggaatgggaacttgcagatagatttagtttgatgcaatgataacaacattacagtgcaattcctactcttgagttcatctagtaagattcaaaccctccatccatagtttaaggagtggagtgcctactcaaatcttatgtacagtagcacctattaaaacaaaaataaacaaacaaaaagaaaaacactgcttttttaatcaccaaagttttcaaatccgaacattttaagaggtaagcattttaaaatatttccttctgaaacttgattgagaatcatgtcttaaagctctgcagtccatgaatcaggtgtatgtgtgtgtgtatgtatgtgagcatttattacattagctggctactgtgaagcatgtcattcaaaggttatactgtactttttcattctcactttaaattattttcaatgtccagccctttttagagaccattcatccccctaccatttgttgcccacccctcttgttttgctcctagtttttcctttcatgattcccagcatatctggatatatactgtagggacactcttgaatggcatccataccctgaaacacatgattgtgttgtattccatcaggttctgatgaaggaaagagggcacaagatagtgtttgcagtgagatctgaggagttaaaaggattgtgggatcattgttatcctgcagtctgtttgtgcttgcacgtgtgtctacataatcatatagctgtgcctacattaggggtggtgtatacttttgtggctgaggagactgagtcatttctcagtgacaccgagtgagtcactttgaatctaattctttagccctgatttccaattttatttttaacctgcatggtcatgccatttcagaggagcagatggcagggtatggggtatgggggtgagcggggccgggggggctggcatatattgagcagataatcttgtctggcaattttgtggctgaccttttacctatgttattttatttagtctttaactctctttgccttaatttccacatctgtaaaaggaaaatagtaatagtacatctatgtaaagcctttaacatagtgcctggtacacagtcaggggtgtataagtgttgactgccacctttgtctttattcctcaatcattcattctgtctgggaaattgtatttccatatttagaagataaataaatatttagaaaataaagaaattaaagcttgaataagttaaatatcccaatctaatagctaataagtggaagggctggcatttgaactcaggtctgtctgaatccagagctcatgctctttccaaagaaggtgaaattgtggtcagtagacttggaggctcttttatgcagagcatgaatgacctcactttatgttatggaaaggtcgccaaggctaatgaatgagcaaagattgaattaggcacatagttcttctctaaatgtcattcccagggctgtaagaagtgccatcatcattatttgcctttttatagaagtaaccaaggtgttcaccttttttttacaatgaagtagtagtaagagaagctcttcttagcaaatacgctaaatcagaaacaagttaatgatctcaaccccattgtggagtgctggggttatatacaataccatcatctgtgctgttttataaacattgccattattgagccaggtgatgacaatgacatctttttttattttaatttttaattttggtgggtacatagtaggtgtatatatttatggggtacatgaaatattttgatacaggcatacaatgtttagtaatcacatcagtgtaaatggggtatccaccacctcaaacatccattctttctttgtgttacaaacaatccaattatacttttagttttaaatgtacaataagttattattgactctagttaccctgttgtgctattaaatactagatcttattcattctatctaattatatttttgtacccattaaccatccccacctcccttccgctctactactcttcccagcatatggtaaccaccattctactctctatctccattagttcaattgtttttagtttttagttcccacaaataagaacatgcaaagtttgtctttctgtgcctggctcatttcacttaacataatgacctccagttccatccatattgttgcaaatgacagaatctcatatttttatagctgaatagtactgcattgtgtatatgtaccaccattttctttatctgttcatctgttgatggacacttaggttccttccaaatcttggctattgtgaatagtgctgcagtaaacatgagagtgcagatagctagtatactaatttcctttctttggggtatatacccctaagcagaattgctggatcatatggaagttctatttttaattttttcaggaacctccaaactgtccttcatagtggttgtactgatttacattcccaccagcagtgtatgagggttccctcttctccacatccttgccagcagttgttattgcctgtcttttagataaaagccattttaactgaggtgagccctgatttccaactttattttacaatgaaattatatctcattatgaaatctgaacattttacaatgagatttctcattgtagtttttatttgcatttctctgatgatcagtggtgttgagcaccttttcatgtgcctgtttgccatttctgtgtctccttctgagaaatgtcttattcagacatcttgcccatttttatttggattattagatgtttttcctctagagttgtttgagctccatatatattttggttattaatcccttctcagatggatagtttgcaaatattttctcccattctgtgggttgtctcttcactttgttgattgtttcctttgctgcgcagaagctttttaacttgatgtgatcccatttgtccatttttgctttggttgcctgtgcttgtgaggtattactcaagaaatctttgcccagtccaatgttctggagagtttctctaatgtttccttttagaagtttcttagtgtgaggccttagatttaagtctttaatccattttggtttgatttttgtatatggtgagagataggggtctagtttcattcttctgtgtatggatatccagttttcccagcatcacttattgaagagactgtcctttctccaatgtatgttcttggcaccattgtcaaaaatgaatttactatagatgtatggatttgtttttgggttctctgttctgttccactaatctatgtgtctgtttttatgccagttccatacagaaattagttttaaatgaatattttttttaaatctcatgactttttgtttgtttgcaaaggcatattttaaatctcaataactttctgtggcagaaggaaggttcctgctgtcatatctgtaataactagaaccgcaggttctttagggagatgtcaacacaaccatttaattgttgccagaacacactagcagaagtttctaaacttttgtaaaagcagtaaaatgtatttttccccaatatatgatcaacatataacttcaatatacaaaacagaaactgagttgtttggtataggtaggggtagaaggtgagccttgcccgctcagttgtctctttgtctgctccatggcccctgaaactcctcaaaagggctgtagggttccagagaacagagattgaaaactgctggcctattagaagggagtaaaatcggctaaggaagcattatgtcctttctaattgctttatttatttattttgagtttttaaacttaaacctccttttttcttattggtaaaccaggcagcctttgccttagggatgctgtcaagatacatttgaagaataatgagcatctagagagtcttgggcttgctcgtgtcatatacatgctaaatagtgtttagttcttaaaatcccagcctaaggtgttcaaagctgtattgtgtctttgtatttccgtgaatttttaagacaataatggatctatttgttaaattttagaaagttgtcagagctgtcagactacagatgtaaagtctagctttattcagataaatgttgaaatggcaacaagataattgcttggtggttaaatgacttccattcttgaaagccaaacatgatttaagaacagtaaaatgcttcccacaaaaacaaaagccagctagaaatggtatggatttggggtctgaattgaatgaaaattcatctttgtcacttactagctgcatggccacacttagcatttctgaacctggcttctttataataatacttgtctcataggttgttttgagaatgaaatgagaaaatagacctgaaaatcattaacacacagcaggctgtcagtaaactgtaattcctatctttgtctcctttcccacttccttcatgtttaatctctgtgattctaagagagaagtagacattttcaagccatcttactaaggtaatcagaataagaaaaaactgaaaattgatgtcatcctacaattagcttttatttatcttaaaatgcatattgagtgtctcctacttggtagcccttaagccgaattggagctaccttagctcttcaccttaaagggaccttagtctaaagacatagagatggacttattataaaacaatctggtaagtgttaaaattgagatataaacattttttgcattctaaaatattcccggaggtgttctttttttttttttttaagtgatactttgaggtcagtatgtaatcccttgagaattctgagtatcagatgcaataacttggaacttaggacaaaaatagtataatgaactggcgctctagagaatgaatatagatacttggattatgctgcaaagccctcttctgtcttcttcaatgacctgtaatttcaccttcttttctctgcatctgaaatttatatatctgaaacttctatactgtaatatcaaggtggggttattttgctgcatttggaaaatagagaagtaaagaaaagagcaatgaatcaaagtctttgatttttttgattgtatttcttactgtcttctaggctatttctaaaatacacttgctggtttttttttttcattgcctttatagcattgattcccaaactttgttctcttgcctggaagtgtgagggcttcccactcatgtcatgtccagcacttaactctaaatctttgttcaatgaacaaatggcagaaaataattcattaattagttcgtccatttatttgagtccttgaaatatatttgtgatctcttatccatagggtattaacaatagctaacatctcaaatgattttcactggaggaataattgaaataattgcaaatagttgatttgattagtagatttagtattaccaaagtaaattcaccttttcatcatgtaaagatcaccatgatctgcctgcctgctggtcctctcctgacttttctgctctgcctccatcctgggatgatgtaaaccaagccagctgtcataaatctctgagtttaatgctttactcagactctttagctgatttttcgtctcccaggcaatttaaggtccttgatcctcgttgttcagttataatatgtgagtccttgctgttttgttcccaagtcattttttaggctgagcttctaatctttgcaatagggaatcatttgagtatcccccttgccttcccaaatgcatggtatacacctaccctgaccaatctgtgctgcctaattctgttcacacagcccttcctgggtctgaatgaaatgcagatctattacttgagttgcatggtagttttgcattttctctccttcttgtcattctttttttttttgcatttttttaaaattatattttaagttctagggtacatgtgtacaacgtgcaggtttgatacataggtatacatgtgccatgttggtttgttgcacccatcaactcatcatttacattaggtatttctcctaatgatatccctccccgagccccccatcccacaacaggccccggtgtgtgatgttccccgtcctgtgtccaggtgatatcattgttcagttcccacctatgagtgagagcatgcggtgtttggctttctgtccttgtgatagtttgccaagaatgatggtttccagcttcatccatgtccctgcaaaggacgtgaactcatccttttttatggctgcatagtattccgtggtgtatatgtgccacattttcttaatccagtctatcattgatggacatttgggttggttccaagtttttgctattgcaaatagtgccacaataaacatacatgagcatgtgtctttatagtagcatgatttataatcctttaggtgtatacccagtaatgggattgctggaatggtatttctaattctagatccttaaggaattgccacactgtcttccacaatggttgaactaatttacactcccaccaacaatgtaaaagcattcctatttctccacatcctctccagcatctgttgtttcctgccattctaactggcgtgagatggtatctcattgtggttttgatttgcatttctctgatgaccagtgatgatgagcattttttcatgtgtctgttggctgcctagatgtcttcttttgagaagtgtctgttcatatcctttgcccactttttgatggggttgtttttttcttgtaaatttgtttgaattctttctagattctggttattagccctttgtcagatgggtagattgcaaaatttttctcccattctgtagatttcctgttcactctgatggtagtttcttttgccgtgcagaacctctttagtttaattacatcccatttgtctattttggtttttgttgccattgcttttggtgttttaatcatgaagtccttgcccatgcctttgtcctgaatagtattgcctaggttttcttctagggtttttatggttttaggtctaacatttcaatctttaatccatcttgaattaatttttgtataaggtgtaaggaagggatccagtttcagctttctacatatgactagccagttttcccagcaccatttattaaatagggaatcctttctgcgtttcttgtttttgtcaggtttgtcaaagatcagatggttgtagatgtgtggtgttatttctgaggactctgttccgttccattggtctatattttggttttggtaccagtaccatgctgttttggtacttgtagtatagtttgaagtcaggtagcatgatgccttcagttttgtttttttttgcttaggattgtcttggcaatgtgggctcttttttggttccatatgaactttaaagtagttttttccaattctgtgaagaaagtcattggcagcttgatggggattgcattaaatctataaattaccttgggcagtatggccattttcatgatattgactcttcctatccatgagcatggaatattcttccatttgtttgtgtcctcttttacttcattgagcagtggtttgtagttctccttgaagaggtccttcacatcccttgtaagttgtattcctaggtattttattctctttgtagcaattgtgaatgggagttcagtcacgatttggctctctgtttgtctgttaatggtgtataggaatgcttgtgatttttgcacattgattttgtatcctgaggctttgctgaagttgcttatcagcttaaggagattttgggctgagatgatggggttttctaaatatacagtcatgtcatctgcaaacagggacaatgtgacttcctcatttcctaattgaatatcctttatttctttctcctgcctgattgccctggccagaacttccaatacaatgttgaataggagtggtgagagagggcatccttgtcttgtgctggttttcaaaggaaatgcttccagtttttgcccattcagtatgatattggctgtgggtttgtcataaatagctcttattattttgagatacattccatcaatacctaatttattgagagtttttagcatgaagggctgttgaattttgttgaaggccttttctgcatttattgagataatcatgtgttttttgtcgttgattctgtttatgtgatggattaagtttattgttttgcatatgttgaaccagccttgcctcccatccttcctgtcattcttaatggacttctcagagtatttgactctctttctcatttaatgaacctaacagcaatattctaccaggcagataattatcaaacatttttctatttaggagaagaagtctaaggaaggtgatgggattcattcacaaatgaccctgtttggatgaacagcatctttgtgatgttcgtgcccatggatagaaaggcctcactcccactctgactggacagtgagctctgagagcagggccatgcctgggctctccagtacttcagccccggttcctagctcagctcagtgtctgcccgtggtaggcactgaatatacttattgattaaaatttattttaaaaattggttagtgttggaagttgagagttgcttttttcttcttagagaatcaatgtaagtttgaatcaaagattttattttgtttctaaaacttaccttgtagttatagctgataatatcagaaacagtgatgaaatatggatgaagtgcacatactttttatgcctgtggagtgtttatatggtctacagtcttcttactgaccacgggttcagctggacattctctcacagcagactttctaatctctgctgaagatactgagaggctggcaagtgataaggttggcttagtatcacctattgtctaacagattgccatgactgactgatttccctgagctcaagtggcagtagccccatgacttccagacagtgattctgatgggaaagaaagagctctcttcctttcccaagttagctgctccttctagaatcaaatcccttgggcttttcatgaagagtaggaattctcaacttcagcaccaattaatattctaggctggatcactctgtggtaggggctgtcctgtgcattgtaggatgtatagcggcatccctggcctctactcactgaataccactttcactgtccccctctccccagtaatgacaataaatatatctccaaacaatgtcaaatatggtctgggagacaaaactggtcccagttgagaaccacggacatagagggcattgttgaactgattgtgccagtgccagaaagtaatattgatagaagatgacctgatattttctatccttgggaaaagcctaaggggatacatacatatatcaagagtttctccttagtatgagccagtcacctagacatgaacctcagtgtccttgttccccctttatctcacaccccgtcctaaaccatttctcataacaaccattccaacttgtaaatatctcttctgccttctcatattgataagaccaaaatactcactttaagctcccagagtctagctagaatcgacaaatcagcatttgttgtgggtctgccatgtgtcagtcaccctgctaatatgcacattgatgtaatcctcttcgccaccctgagagagaagtttgctattcctgtctcaccagtgaggaaacagaagcacatatttacacagctaagtggcagagttcagaatagcgagcaggtcctctgacttggttaaacgatacttttatcttattgttcaaatatcatcaacatcgacttgaaatttaatttaatcactgtctgcttgaaaatttaatcacattacttgaaaccatggaatcctggcttgtgaataagaatcatgttaggaaaaccatatgccaagtcccagaaccatagaatgttagaggaaaagggctctcagatatcgttacattgtgaccatcttcaggtcatcattctgtcatttaacaaatatgtgttgaaggcttacctgtgccagagcctctgtacatcagtcaagacagacaaggtccttgccctatggaacttacattgtaataaggtaaacatccaataaacaagtctaataaataaatgaacaaataagataattaaggattgtgttaagtgctggaaatgaaatgaacaatgagaggacaacaattatgggagggagatctttttacatccagtggtcagggaagttgtctttgatcttgacagctcccaaaacactggacatattagtcttcctcaaaaagtgttagttcctctccataagcacctagcacagtacctggcacaatgtaggtgctacaacccttggctgtatgaaaagaccatggttttttttctttgtagccttataggtctaaaatcctataatatattgttttagtttccttttggtgctatagcaaatgactacaagcttagtggcctcaaacaatatgtttattatcttatacttctggaggtcagaagtcccaaaatcaagactctcctctctggaggctccaggggagaatctgcttttttgtcttttctgtcttctaaaagccacccgcgtttcttggctcgtggccgcatcctgtatcctcaaagccagcagcatagcatcttccaatctttctctctgattctggccttcttgcctccctcttcttaagacccttgtaattacatcaggcctacctatatactctaagacaatgtccccattttaagatcctttgtttcacacatctataaaatcctttcggtgataaaaaggtaagatattaacacgttctaggaatcagatcacctttgggggggtcataattcaccctctcgtagttagcaataaatgttaactttattcctatgcccattatattttacagatgaaaaacttggaaagctaaaagtgttgcctaaaatcacatgcttggatatagctttatacctggtcatctcatctacgtagatcatctctattctctctatatccaaactctgctcttttcattagagaattcaccacaagttacgtgtctttgttttcttcagttattgccacaagggcaggaagccaggtcacttttattcaccaaggtgcaatcatcacacagctctatgcctgacacacaatgtgcacatctctaaaatgtttttgaatgaaagaatgaatactgtattacgtgcttgggtaagaagaacccaatccctcatgaattattttgtgcagtggcttctgacaggttataaaccctcagccatttttaaagcatcaaaagaaaaagtgaactgcaatgctggcccataattgaagtggataaaacagaagggactcaacccatatctttcctctgctggtgatgaacttaaatttctggcgtgctgtaaggcactctgcatttgaacgtggtagcctgtacctagaaccgtgatatacagcactttatatattgacatgttattaacgtcaacagtcttttgagagagcttctgaatggctcacttcattatttcaattcaggataagaggaagaaaaaaggccaaaaatctaagtgcatgctttattgttgcattaggttttctctgttctgtcttagagaagtaacaaaggaggaaaaaaatcacagttcttactgaatagttcaagtggcacgtttatgggttcacttggcaagctatacgacacttaaatgaaaaaattaaatttaatttaaaagtataggtcatctccaacccttttccaacctagaagtcttaaatcaaagtaccttatgccaaacaactatgtgaaggaaagcgaaacaaatataacacctcctgctatcatggaagacaaattatatttacattacggatgtactttgctttttattttccttaatcttgcctaatgaatacactgtttggtcaaacatgttttatgtctgacatacttttcttttaggaaataatatgcttgtcactcaaggagttaatgaaatgatgagaaaatatgaacccaaagggagatgttttctcttttagcattgctttcaagatcccagatttttacccaccttataatgtatttactttggttctagtggccaaggatgtcaatattctttttgatgaattagaagctgtcagcagtccttgcaaagatgacgattctcttcttcaccctggaaacctgactagtacttcagatgatgccagcagattggaagccgggggagaggtaagagtatatgatttcttacaaatgtaattcgtgatccaggcaggaacctgtgaagcatgttccaatggactgtttaaagtcataatctcattgaactgtaggctcttgtaaaacaagggacaggttttatattcctttgacatcccccatgtctaagcatatttcaaggatcctaaatctacctatacacaaaacaaagtttcagtttttcttaaacctatcatttttttaaactgtccgtcattttaagatagcctacattcttgagtgtctcccactggtacaaaataaactttacagggatgggcttccttgtatagatcccccagtgggtagaatagtgacctaaaatgcaccagccttcagttgattgtgttgtctgaagtctctctgagtttccatttgcctctgtaatctggaaacttcattgcaactgtaaatagacctatctatttgtgtgccattttggaaaaattagtattttttttggaggcattcccctttgttcaggttgtgtctcaatagagtttaatatttcctttgtacatgtactgggtacaggtaataggcacaccgaatcagagtaatttatttattgcatattcctaaggtttttatattccagagctagttaactgctaaaaggatgacacctggaacagagaaaattgtttactcttgccaagctttgcagacttcaccccacaaacaccatatgcagctatccaagtttctttttctgttttttttttttctgtttgtttcattaaaaaaaaacactcattctgttattatctgtttacacagatactttggaaaccataatgtggcgtaaagaatggactttgaaagggacctcagacagcaacttgtctcatccctgtaacttacagatgaggaaacagtatcagaaatattagggctttgccaaaggtggcacagctcattgttctgcttggagccaatacccctcctaatgtcttggctgaagccatttttgaaggcagatgctaatatgctgaattcacaggacagccttcttgcttggcaaataagtgttaactaaagtgcttattcaggtagactcctgagtgtctcttaatgtaaaatccaaaacatagtgaggattggtcatcaattgaaaatgtctacatcaagacatggtacatggtcattccatttccccagctgagatgtttttttcgattaaggtttgtgcaagaatgtggtttctagcaatggcccttcaggtctggcatgtttaccttcttcataccaccattggaaaagatagaatccacccatccacttggctgggtttatagacacaattttgaaatctattaggctgagaaatttggctccagcccagtgagcccatacttgatggtctctttcaatgttgtacagcaagcccgaagagcctggatgaaaattcaatccactccttttgttctttactttttaatattactgcaaaataatatttgtaacttctatgtaagttacaaagtatgataataaaatgaacacctggaaccaccatctgatttatgaaccagaatgctatttttcaaattatagtgacaaactaattgtagattactaactccagtttttttttaatggaatggaaaattaatattggagtgtatgaaaacagaaagggtaaacaattgttttgtgaaacttgtctcatattttgtatatgtatgtttacatatatgcacacaaaggtaaaatgtttttcttgttgtgggtaaaaaaaaaaaagagaaacactgaactagaatattcctaaaaccacggaagctactttcaatcccatacctctaccctaccagaggtatcatctttctaaattttattgtgttttattctcttgctctaaagacagttttaccacatagattcgtagtcttaacaacttatatttagatttactttattttatgctttgtaaaaaatggtatcatgtggtatgaagtcttctgagacttgctttttttatcagtgttgtctttaagattcatttttattgttagatgcaactatagtttatgcattttcactgctgtataatattccagtgaatgaactgtctataatttatttatctatttattgtctgttcatggacatttgagttgactccaactttaaacatttttctactattataagtaatgttgccatgaatattcatatacatgtctcctacttgccttatcaagaattttttctctaggcttacatgttatgcacatattcagttttgcaagataatgttaatgtgttttccagagtgagcatatcaattttcactctcatctcacctgcaggatatgaaaatccttagttgcatcacattcttggctacacacggtatttttagatgttttacattttgcgcacttaactcaatgcttcttccaatttttattttgtttcctcttgattacatttttcactaatgaatatgtaattgaacacaatgaaaaaaattattattattattattattattattattattattattttgagatggagtctcactctgttgcccaggctgaagtgcagtggcgcgatctgggctcactgcaacctccacctcccaggttcaagcaattcccctgcctcagcctccagagtagctggaactacaggcacacgccaccatgcccagctaatttttgtatttttaatagagacaaggtttcaccatattggccaggctggtctcgaactcctgacctcgtgatccacccgcctcggcctcccaaagtgctgggattacaggcatgagccaccgcacccgaactgaaaaaagttatttagttttaattgttctttaacattactcacttgaacctcaatttgatgaatgacttaaactggtccctttctctttgtgtgcagacagtgccagaaagaaacaaatcaaatggactttactttcgagatggaaagtgtcgaattgactacatccttgtgtacagaaaatccaacccccagactgaaaagagagaagtatttgaaagaaacattagagcagaaggattgcaaatggagaaagaggtaaatagtttgcttggatgagaaaaaaatatatacatatctattcatatgaagaggcaataagaaataagcaagcagtcttaatgttaaccaaacatttcatttggtcagagttttccagtcttcagagtttggggaatgttccaatatttagactttgacagcacagtttgcttttgagataattttaatgccaaatgattccatgaaaatcaaaatattctattccaattaaatggattgtttcaaagtgtgattccttatctaacttcctacgtctgccatttctctgtatatgtaaatggagggttctgttcgcgtggattaaagaaaactttgagtgaaatccagtcactctctctagaggctctttttacatttcaggaaatatcatgagcttgggcatcctcgtacaccagaggagactgcctggccaatttggccaaaagcagctggaacttacaaaaaagattccagttttaagagacattcaggctatttttttcaggtccccaagctcaagagtgccttaccagtgtttggttcttccccttccttccttctctgcatggggagcttcaaggcagaactaagtaaggaatgtacaagaggccagccaggcctctgatagtaatccatgatgggcttatggtgttctcaggaatactgtgcacatttgtagaacttggcccgttaactgaattatgtaactcttctcggcttctccctaaacattgtgcaaagcttctggagcttttcatagtcaataagaacaacacattggtaatttaagatacttctgattctgttcctcaaggctgaggggatagatctttgaagtcagacatccaggtttttctttgtatgatacagttgcagttcgtacaacctgcgagttgtgccaaggtatcaaatattagaagcataatatgcatatacttgttatctgatcttgggacacttcagataaatgggatttttttcagatctgttaggctgacctcagctcttgaatgtttataacacggaagcagcatttttctggaatgtctccaagagaattggaaaaatggtgagatgaatgtggctgtaaggaaacaggttcttattctcaggaaagaagaaccagctttctcaaagaccatcttaattagaggttccctggtacaacaaacagaattaaaaatgttgtttcttccacctttgtggagttccagaaaatctttcctatacaaactgagtgtatagttgataaatcttactctttaagttctaaattgtctcagacaattgcatttttttcttaacattaatagcacattcatatttttctccttaatcatgccttcttcttttattctcattcctaagtggcagaatttttatatgaagaaataaaagatctgaattgctacttaatctaaaataatggaagtcctccctctgacccattctgactctgtcaaaattctgattcccatcaaaactagatagctttgttcaattaatgcaagatttatattttaagcttcataagtattctctacaggcctagggcttcttctgtatagatcttttcaatgttatttcgtgatttattcgttagaacttaaaaagcctaatgcttttccaaatagcgcacattaaagtgatggaaagtgtcctgttgtgtatcctaaagcatcacctgtactgcagtgtttagctaccagaatttgaggaggatcatgctgcctgttgtacagttgtgctgcacagtacagtgtggagcatgctgtgaagaatggactgcttgtacgattttgtctatatacaagatagttttgtttgttggaatttaaaaaaaaaattttaacaggtatttattttaatgtgtactggaaaaaatagcaattggaaaaagggaattatcactatatggcaaaacatcataaaaacttatctaagcatttcccccctccccactttcccccaaaagttcttctctgggcatcaccttccatatttctcctttcctccacaatcttttagacactacaaacagttaggtcttcccctttctggaaccttcttcacaagtgacctctcccgctgcctggctcgagtcttgccctgactttgcataaatggtgcaatttctctctaatgcagcctcccagctctgctttgcatcttcgtggactcagtcagctcagcaagaaaagggcctttgcaggttctcttatagataaattaatttttccctgccataaataattaaaagaaaatatcccttggctgaacagtaaacaaaccttcatcctttattctcataataagtggcagaatttttatatgaagtatctacattgtattattaaatttagaaaccgttggaagtatttttatttaaatcaagttttttataagcagctacagcagaaagacaattttaatggcgatttcagcttccaggagttaattcaaccttttataggacataaaatgaagaacttagttcagggtggaaaagaagaaacaccctagggacccttgtatatctgaaacgtttgacactatgcacattttatgaattattagtatcttcttaattagctgttgtcatgatgtctaacaattatgaaaaacatgtttcacagacagatgcttatgtttccaaatagacaaagacaggctttctagttcagtttaacatccttatctctttaacattgaatttcaagaaacacaactaggataatctttaattcatgataaaagtgaggacatagtcaagtttaatctttcttaaaacctttgctccaggctgattagtcaacacataagtgcttgctttggtaccctgggtctttaatattctgcaattcaactttcataatagcccagagaaagcaattcacaacaaagttcccaaacaaaatatcattgaagtccaggtgatttacttcttagtatctatccacttaaagtgattcccttcttaaaggtaagctcatatttactaattaacattttctatttctgattttttcatttttaattctatgtccattattgatctttggatacctattttgaaatcattgtcctcaataagacatttatcttttcttttgtataactagtaagaggatgagttaactttgaattatttggaatgtgtgagtaacagttgtactaatggagcaccctcccgcttcagaatcatgtgaaacattggggaagacctttatcattacagtccttacaaaactaatataattaggtaaatcatatcatcttgatgatggttatttcattcaaaaaatatttattgcacactcactctatgccaggcattgctttaaggactaggatctcagcagcaacaaataaaacagaaaaaaaaatccctgctttgttggaacttaaacaaaaaatatgtacaacatatacaaatatcagtaagtgctaaagagaaaaaagtaaagcaggaagtgttgagaggggcttgcaattttataaaagtcagcaagagtgggcctcttttccacagaaagagaatagcaagtgcaaagagaacagctccacaggatggagcatgcctggtgtgttcatggaacagtgaggatgccagtatgactggagttcactgagcaaggtgaagaatagtgagaaattacaccaacaaggcagtggaagccttagtgatcactgggggatgttagcttttctctgagtgacataggaagccactggagagatttgagcagaaatataagatctgttttctgttttaataagggcattcgggttgcctggtaagattagactgtgaggggtggaggtggcaagggcagaagcagggagaataattaggagattcgttgcaagaatccaggaaagagatgatggtagcttggtcaagcacatagaagagaggaagatgagaagagtagaaagtagcactgatgggaattgcagacagattgaatgggcagtgtaaaaaagaagagtcacagactatttgtctgacacatggtatttatctaagcagttgggagaagacagttgccacttacagggatgcggaaaagagtaggtcaaattgtagacttgttaagattgagatatcccaatggagatgttgggtaagatagaagagtctgggattcaaggagagatctggactagagatacacatttgaatgagatctccaaaggagtaactgcaaataaaaatgagaagaggtccaaggattgagccatggggaacactagtgttacaatttggatgataaaaaggaggcagcagaagagactaagaaggagtcaccaaggagctagaaggaaaatctagagtgtgtggttcaggagagatggaggaatcaactgtgtcaaatgctgctgatggggtgtgtacgatcaaagctgaaagttaattattggatttagcaatatggcaggtttgggtggtctgggcaagagaagtttcagtggagaagtcaggggtgaaagcttcattaaagtgtcttcaagaaagaatgggaagagaaaatacagagacaacgaatacaaacagttctttcaatatgtttcactgtaaaggaatggagagaaatagaatgataactggagtatgaagtttggtcaataaagagttctttctattttagatgggagaaataaatacatgtttttatgctaatacaaactatatatttgagatggaaaattgatgttgggaaagagtggaggaagaatttttagagaaatgtccttgaagcaataagaaaagaatgaccacaagtatctcccattgcatggactcacctatctgcctctgtgcccacaaatgccacccttccccagtgctaagggtgtcctgtccatactcattggtaaggccaacccttcactttgcttctaagaccccataccttctcagtcccactcaaatacattgcttccaaaagagataaaatgtagtacgctttaaaaactgaaatgcacaaacaatacaatttgtggaagtagtttgtttctgtttgcactcatctctcagaaggagtgaaaaatccaactgcagtaaacacacacacacatgcatgagcacatgtgggtgcacagtcgaggttgaatatcttggatacttctgtgtaatatgatacaaattacattatcaaaatttttatgctcacatttattaatcacttactattataatttccatttaacagatgagaccattggtaacttgccccagacaacataagtagtaagagataaagccattattaaaacctaagcatacttgctctttgcccttatattgtgttgatttctggtatctaaaggtgaatttcagggttaaagaagttaggagaggcagggcatggtggctcatgcctataatcccagcactttgggaggccaaggcgggcggatcacgaggtcaggagattgagaccatcctggctaacatggtgaaaccctgtctttactaaaaatacaacaacaacaaaaaaaattagccggctgtggtggcggacgcctgtagtcccagctactcgggaggctgagctgagatcatgccactgcactgcagcctgggtgacagagcaagacttcgtctcaaaaaaaaaaaaaaaaaaaaaaaaaaaagttaggagacaggctgagaagacaagtagtgttatgaaaaggaaaaggtaaaggaacaaggaaaattgggatgaataatgaagttgggtgctgcccagactgtggttcttatgcctctagtagccatagacttgaatcttggtacataaccacttacaagctgagtggtcatgggcaatttatcagatttttatggatctctgtttccattgttaatcctgaaggtgatataatttatcgtaaatgatgaagattaagtggacctatatatagtgccaatctttgtttttcctaatttttacttttaaatttcatattattgttttacttccagtgtaagttgttcagctaccttctatttatggcaagtgatatttgttttccctttatgactgatataaaagctttttgtaaaatgattatttaaaaaagggagttatttaaagaaatatacaaaattaagatattgtagatggtattacaaatttgacaaaaattgtgaaggtggcccgcgaatgatagcattctgtgttacttagctagtccttgtggtggacagactctaaagtctgtgatgcctgcttccttttcacaccttcccttccccctgagttcaggtgggacctgtggcttatatttaaccaatagaatatggcttttgctatcatagaatatgacaaatttaatgggatgtcactcctgtgattatcttatatggtgtataagatctcatctcagcagactggcgtcagagagaccctccttgctggctttgaagaagtaagctaccatattgtgagacagcctatgaagagggccacctagcaaagaaaggtggggtggcctctaggagctggcatccagctgacgtccagcaacaagcagggatcttagtcctacaaccacaaggagatgaattctgccaataactgagaatcctggaagcaggtctttcttcagttgagccactgatgagactacagccccaggcaagacctacatcatagcctggtgagaccctaaagcagagaacccagctcagctgtgcctgacttccaccctctagaaactgtgagataattaatatgtgtagttgtaagcctccaagcctatagtaatttattatgcaacaatagataattaatacagtgattaaaagtctgggatcacacattctgagtgttcatttggttctaccattacaagctgtgtgcccttgtaaaagttaacttatctgcaaaatgaggctaataatgggatttatctcatgggttattttaattaagtgagatcatttatatcgagtgcttatctctgtgccttttatatggtaagcatttagtaaacttcattattatcatcattactgttatcataacggctaaatacaacgtgttaacacttttattttggaatagttttcaaggtaaactttaagaaaaattttcatccagtttacaaattctttataacgcaaccattaggaatagcaacatcagtgggtcatatattgttactgtgtatgcattaatgagatttataatttaatgctcttggaagaactcggaatacatttggtaacaagtttagcatgatcaaggttcagatgtttatctgcttggagaggatttggttttagattcatctgggtataaagttatagatcaattcagagctaaacaacaatagtaacaacaacaacaaaaactgtatttgattgtccatcccagtgtttctttacccccattcaaaggaaatcttcacaaagatttccccacttaaagagctaatctcatgcagatggctctgttcccttgtagacttcctgcccaaattaccctaatttcatccccatttatatactgcagccacatccagcttgttgctgtagatgctctctcagcatccagaactccgaggatacaagaacgacaacatcctcccttccttcacagttgaaaacatgatgatgagtgtctcaaataaatgagtgtcaggactatgtgcactacccagatttctgtcctctagggctttctggtcagaaaagaaaaaaaaagaaaaagaaaatcagacttttctccacccaataatctccactttactccactcaatcttcttatatgtcacacacttgtattaccaagggtctcaagttaaggtgacaagaaaggagaatttaggacagtcataaccaaagaaggaagaaagcagattttcttctgaacctcagagccctggcgattccttgagtgtctttcaggagctaccaatgtcagtccacacttgtggtggcttttctgttaacttgagtcttaggctggatttccaaagcataagcagaacttgaggtgagaattcttcctcaagttgttgatgggtggggcaatctcaggagaaaggggcatgagaggagcagaagagaacagctaagccaaaagcatggcctcagctggacactaccttcagcctgatcccacaggggaactcggtaatcagcaggtgcagcacagagctggtctacttttcagacacgggcccccacgtcagtcagtcattggctgaggtctgtgaaggtggtgagaggtaggcactgtccgtttggctgaggatcattctgggtaccagcagcatacattaccactggtattgaattagtagtagagatgctgccaaatctgtggtattcagacagcactttttgagatgccagcaaacatgaaattcatgggggtccttgaccaagtgaagagagaacaagtacacattggaatttcttctgttttaatttgtcaagttgttcttctaattttaggatgctatttctcaaaggtaaagattccatgttgctagtgtaatcactttgagggaggacatacatgtggccaacaagcatattaaaagctcaatatcactaatcattagagaaatgtaaattaaaaccacaatgagataccatctcacaccagtcagaatggctattattaatactaaaaagtcaaaaaataacagatgttggcaaagttgtggagaaaagggaatgtttagacactgctggtgggagtgtcagttcaatcactgtggaaagcagtgtggagattcttcaaagagctaaaaacagaactaccattcaacccagcaatcccattactgtgtatatacccaaaggaatataagtcattctaccatatagacacatacacatgtatgttcgctgcagcactgttcacaatagcaaagacatgtaatccacctaaatgctcatcaatggcagattggataaagaaaacatagtacttacacatcatagaatactatgcagctattaaaaagaacaagatcatgttctttgtagggacatggatggagctggaggccattatccttagcaaactaatgcaggaacagaaaaccaaatactgcatgtttttacttataaatgggagctgaacgatgagaacacatggacatatgtctcttcttttttgagagagagactttgtcttactggtttttgcattccaaagacttattacagtgcttagcttgtggaatcctgagtttgctacaaaagattgtggatagctgattttcacagctgagtctgggtaacaacagtcaattcatctccagggtttttcaacatagaccctattggcatttagggctggataattctttgttgtagagggctattctgtgctttacaggatatttggcagcatctctagcctctacccactagatgccagtagcacctccttcaagtaatgacaaccaaatatatctccaagcattgtcacatgtcctggtgtggggggagggaggaatcatccctagctgagaatccctgggtttgacccttgatccaatattatatggtttgttgtagtgtctagggggtagcgcttccattcttttatccatggtcaaccaacttatttcagcactcttaacatcagactcttgaatcagaaaagaggcctatgtatttgaggggaagaatagagtatgtgaagactggctctcaagccagacagctgggatttagatccacttactacttcaccacttactaagtgaataactgtgtaaagcttttaatctctctgtgccttagtttctttgtttgttaagtgccagataattcctatctcaagggctattatgaggataaaatgagttaataaattacaatatgcttaggaaagagtctggacatattgacagctttaacgcatggctgttgttggcattgatggtactgataaagaagggagtgatttcaaccactggtcatcctgttcctgaagctcaagcattcaatcctgtcacctcttgggctgagagtccttgtgtgtctggggaaagctgaggggacctggtagatggcaagagatataacgataagtcccacctcatcaccaggactcagtccacctaccactgccccatatcagtctgtagaatcagggctgtattcttactggttcatcttgttagggcagttttatcaaattgatgatggtttgagagaaggtgttctccctcctttccctccctcccttagtcttactctaatttctgagaccggtttaaagatctaagggcctcattattgcctcaactgcttttgcttatttaggtagacaaagtttaatcaaaacatttctgttgccaggtcaagatgacctgtacaaagttatcttgatttattcaaaggattattccaaatcaacacgtatttcatataactcacgcatattacttcagtcaagacagaccaactttaagggaaaaaaatacccattatacaaggcacagctgaaaaactcaagtcattttatgaactattgtcatcccacaaaaagaaacttatttaatctaaaagatttctcagcagtctaaatttaacttctctgatataaagcacgttttgcataatcatcattatgtgccacatgtgggcattgtattatatttatgaaaggaattgaagtcctttgtgatacttttgctcctgctgtttttgctatgttatgataaattgctgaaaattatgcaaagtatatatcatgaatatgacactaattattcattaatggcatggagagatttaaaagctttgaagcagcctggagaactgtaaatccatttacaatctccagcttgtaacccttacaagtgaaaaatttgaaaaagatgaagtgtaagctgagtattattaattgaacttgacataccttagttgcaaaaatgatgatgcagcactgcctcttgaggcaagggccctggcttagctcacttcctgttgtatcttaggcatattttaagagcagtctgtggtatctaataactccatttccagatgaagtaattcattcattcattcatcaaatgtctgatgaatatctactactattgaaggaagggaggcattaaataaatatatcagatgtaataggtattgtggagaaatatacaggaatactgggaaggagtcactatttcatttcaggagttcaagaaaaatctctatgataatgggtgaactaagcacaaagagaaattggaatttgcatgtctaaacccaactctctaaagcattgcagaattttcccactgctgggtttcctttgttttgtgcattcctatgcaggctggcatgggtgtaggaagagtaagtggagtaactgaatgggggggtatggtagcagggggaatagctggatttggctgtgggatagaggtaaactctggtgtttgcatctaaatgaacagggaaaaaagtcaagtgcacgagcagtgttgggattttggagaggcccgacctagttgcaaacacctccctaacttgtccttttccattaatcagttgaactctcattctgggtgctacctcttcacttttgcctacccagaaacccaaagtttcttctttaaaattcttccctagtacttataattgcctagcccctctttcattcagggttgtgcgggaaagccactctgtgtcctccaggaatgaagtgttcaataaataattttacagcactgtaagaccacttaaaaggttgggcatgaaggtcagggaatccacctcccatcacttcagcctgaagcaccacagcagcaggtcacaggtgccggcgtggaagccactgggatctcactaatgcccttctgcagcacatgattctcaaaacttacctggagctgcttcaaacctcaaatctgcctgtaactacctgcctgagaaacagcctctcctttcccaccttccatctgagcacccatcattgtacactttaacccagaactttatggagaaggggattctgggaaaccagaaccaagttctggtcgcagcttctcagcaatgcagaggactcagaaggaggtgctaaggtgacaacaaacaatatagtgcagccaccagccctcctaacaggttgttccctgtcccttcatttgaggctatgctagccccatctctgtaatacccagatggtttaaaagttgtaaggtctgaaatctaacacctgcctttgagacagaggagcagctatttctgttttttaacatgggcatggctgagtaaatcacccagtcagagttcctcccagaaacccacatctttgttctgatgctaacgttaggcaactgtcttttttcaaagcatagcagaattcactgggacccaatatttaattggatagtcagcagcagccacaagcctgcctatggaaatgtccttgtgtttgtgatgcaggggagggaaaagaaacaaggaaagacaagctaaaaattccttccaccataactgcccacagaggaattaaagaaggttccctttgtcgtgtccagcccctgcagtgagagtatcaatcctcatgcacacgtgtattgagcgtctattatgttccaggcattgtgccaggcactggagaataaaaaataaatgttctagttatctattattgtataacaaacaactccaaaacttgtatgttaaaataatagtcattctttttgctctcaaatctgcaattgagcaggacttggtagggacagcttccgtctgctccataggacatcagtcggagcagcactactagtgtctggaggaccccccttttaaggtggctgactcacatggctggaatgttggtgttggctgtcagctgaaagctcagtcagggttgtgggctgtgggcctcttcacaggctgcctaggctttctcatgacatcgtggctgggttctaggagaacaaggtaaaagtgaacttttacgacctagccctagaagcatttattctgctgtactccactgggaaaggcagaatgaaggggaagggacatagattccacctcttgatggagagtcataaggttctagaagatgtgtgggatgaacagtaatgttggggccatctttggaaaatataagctgccacaatatgctcagcgtatttgaggagctcactaactagcaatgaaggcagatgtgaaacggatagaatacagtttgaaaagttctatggaagccctggggaatttcatactctgcagagatttcaggaaggttaagagaggtgacctgggacttaaaggatgattagatattcaccaagtcagaaagtagaagggcatggcattccagatgggaaacaacataaacgatggcatgatagactttgaattgaggccttagggctcctctgtgcacctctgcttcccagacagagtgtgaatcccatgaggactgcacggatttctccctagtccacagtgcctggctcatcatgtcatcttgactttcacattatatatgctcgcttagcaatttcccatgaacataattgacatcagatacaattgttctagaccttaatgacagagctagaaagatgtgcattttatagtaatttttttccaaaatgttgcaaccaaatatcatttagcctctttacaaccaaatccatcacactgtacttatatttaaataagaatcatctcaatgccaatttctttcaggccaaggattttactaaacaaactgtaccagccattacctacaaacttagccaagatcatgatggtcttcgaagaaggtggtgttactgctcactagagtactttgtttttcagctccattcttctttctctctgttttctacacatgttgaaattaaaaagagttttctagaagaccaggagtagagcaggcagaaaaatgaaactatactacacatgattttccttgaccttagcagtccagcaggcaggaaagaaaagtacatgtggtgagaccttgtgcccattagagtttcagaagtgcattatgtcgcctcttggggactctcttcctcctcagtctgtaggttcctttcttcagccagaatattcttttggattgtgtagcagtaaatcactttggcattcatctgaggctgccttgattcagtttctcagactctaataagaatcttctgaaatctagtcttttatcagtgactcatggataacatcatatagttataaaagggtaacctgttacaggcgttcgctgttcgctgttgcttctgattgttcaaggggatctcccccaactgcacgtatctgtagaaactccagtcaagtgaaaaactgttagtcttgattccttatgtcacataatgttttacttagttgacagaacacagttaagccatcaattaagtactgaattttagtttgtcatttcctttttttctctggtcccatttgtacatagcaaagctgtaccttaatgcctttttaaaattaactctttttaaggaaagggagttctaaataaactcttaaatacttggaactgaaactttctttgaatgatgtcttagtttattttgtgttgccacaacagaatacctgagatggggtaatttatgaagaaaatattatcatttagttcatggttctacaggctggaaaatacaggaagcacagcgccaacacttgctcggcctctggtgagggcttttgtgcttcgtcacatcatggcagaaggtcaaagtggaagtagacacatgcgaagagaggcaaaacctgggaggtgtcctggcttcataacaacctacttttgtgggactaatccattcctgcaggaacaggtgcagtctcaccagagtgagaccaagcaccaagctacccacaaaggcagcaccctcatgatccaaacacctctcacaaagccccacctctccacactaccacactgggggtgacatttcaacatgagttatggtggagacaaacaaaccatatccaaaccatggccagtgggtttaaattgtccaaaaatgtcattggggagtatattgactgtgataataagcctgctgttgaattatcccaaccattttttaatttattatttttatttcttctgacagagtctgctctgttgcccaggctggagtgcagtggcgcgatctcagctcactgcaaactccacctcccaggttcaagcgattctcacacctcagcctcctgagtagctgggattacaggcgtacaccgccaagcccggctactttcctgtactttccagcctgcagaactatgaactaaatgataatattttcttcataaattaccccatctcaggtattctgttgtggcaacacaaaataaactaagacatcatttttatatattttttttagtagagatggggtttcgccatgttggccaggctggtctcaaacccctggcttcaggtgatctgcccacttcagcctcccaaagtgacagaattacaggcatgagccatgcccagccacaaccatttttttaaatcattatttcatgtccctcattacttagctttgattctgtagttcatcatcatgaccactcacaagcacctgaattctctcactcctttattcctttgacttatttgccgggcaaagccccgaccatggttaaactgcatcttgttcatgcccacccctgagtgatttaatgttgctggaaaaaacatgctgactggttcactttacatcatgaccgcagtctcacacaggtaccagagaatgctcagtgagcctggtacttttgcttcgtcctctctataaaaatcaagtaactttcttcctccctcttttcccatttcactctctctctctttgcttctttctttcattgattcaattttaaaatttcaatcattaaaaaatcatatagtgcctggcacaattcaaggcacttgggatacatcagtgaacaaatcagagagcccctacccttgtgaaactcacattctagtgagggaaaccgtgaacaataaacataataaataagtaaataatacagtatgttagaaggtgataaatagagggccaggtgcagtggctcatgtttgtaatcccagcactttgggaggccaaggtggaaggattacttgagtcccaagttgaagactagcctggacaacatggtgaaaccttgtctctacaaaaaatgcaaaaaattagccaggtgtattggtgcatgcctgtagtccgagctacttgggaggctgaggcaggaggattacttgagactgggaggttgaggctgcagtgagccaagattgcgcccctgcgatccagcctgggcaacaagtgagaacctgtctcaaaaaaacaaacaaacaaacaaaaaagaaggtgataaatgacatggcacaagaaaaaccagagcagagtgtgggtatgagagcactaagggaaaaggatagtcattttaaatagggtgttgggtgggggctcactgaaggtgatgtttgaccaagatctcgaataggtgggggagttggcccactgttacttcacactgccctctctctgcccaatcaaccttctcacctgttttctctgcaccctcatccctctcaacccccctccacagacacacacacacagttctgctgataaccttgcctatactctgatagaaaatgaaaatgctcagacaggatcttctgtgactccccaccctcaaccttccctcccaccaccactctgtgtgtgctgtcgcgggagctctcctattattcgctgaatcccctctcacctcaccttctcaaggactttgctcctgtaattgtcttcctctatctctcctgcatcatcatttttcctctctactcagttgttacaaacatgctcccataactcacaagatgaaaaatctcttgacccctatactctcctctaatgaccactccgtttctcttctacacttcacagaaaacttcttgaaagatttgtctagtgtcctgtctccatctcctcacctaccattctgttttcaaacttctcagtttgggctttctccctcaccatttcacagaaaccccttttataaaggtggcctgtgatcaaatccagcagtcatgccgtctctgttatcttactggcctcaccagcagctttcctccacatggtgagtcattccttccttgagaaaaacatgcttctcttggctttggtgacatctcatgctttcctggattgcttccttcttcattggctctttctcaatcccctttgctcaccttctcttctgtttgatcttcaaatattagtcttttaagacttgatcctgggtccccttttcttctgtatctccatcttcctgtgacttttgtccagttccatagctttatatagcttctgcctgtcactcgaggctttgtcatctcagaggctttaggcagcagggtttagtttttgatctcaggatggcagaagtggaggaggaggaatgctctttgctgcgaccagggacccagataacagaagctgcatccagacacctgcctctggggcagggaaacacaaatcacacaccagacttcaaggctctgctcacagctcaatggctagagctcatgatatggctcctgcctacccaagtgggctaaggagctcagatttccctgtgcctgaaggagaggagaaccgatgccagggacacactagtgacccccacagaaaatgttttcaaatgtactttatatatacatgtacatacatattcacacacacgcacacacacacacacaccctataaagtaggtgagggtagttatatcagcattataccaatgaggaagtgatatgagttgaggtataacctatcagatttctctgttattaaaaatcataagagccccatttattgacagttttgtataacctttaggtaaaaacacttgatagactataccgctgtgtgccctgtaacatcctctaattttgatcagcatttcaccaagacataaatataacagactgaggagggatgtcataacccttcccaagtgcacatgtatacctatgtaacaaacctgcacattctgcacatgtatcctggaacttaaagtaaaataaaaaaaaaaaagacagatagtaaaaaaagaaagtatttccaaagttaaattgcttcctcactagcagaagacaccaaattcttctgtcttttctgggtcttgcttatttcatggctgttaatctctgcagcgtactaagggcatagcgattcatgggttactgattgggtcatagctgtgaatggctgtcagtgggttgatgttttgtgataataaaaagtatactgtgatgataaagttgtccccaagttcagtttatctcatataccatctagaagagtagggaaaacattatgatggtctgtaagaagtgaagggacgtttggaattttatagatcagaactgacattgcttacttctaaggagagatttagtactgggattacctacaaagggagtattttctctcccaatagatagtagaccaacctctgttcatactaattacattatttataattagggtcatcattgctttgctgaattttgagttccctgagatcttgaactatgtcttaaccttctttgtatcccgagggtccaattagggcctatgcactaggcaacacagtgcacagtagttaaatcatctttaggtgtttgctgaatgattttatgagtcattgtgttgtgaggcagataaaacatttgcttttcataatagatctaagaaggtgatggaagaaggttgtctatatcagggtgtattaattagcagtatcagatatactcccactgccggtggtcttgtggatagatgtagccatatgactacttctgttcaatgggctgggcacagaagtgttatgtatccttatgaggccctctgagctctgccttccctctggcagagtgacccatcagcatgaaccactaaatcactgcaacgagctgacctgcagtagacatgtagcatgaacaagaaataaactttatcatggcactagccgatagaaataatgtaatttaaaatattcgggagctacatataaaaggtaaaaataaacagatgaatttaataatagttttgcttatccaatagatctaagatatcatttaaacatatgatcaacatacgaattattgagatattttacattctttttttgtatatatgctaagtcttcaaaatctggtgtgtactttccacagtcagcacatctcaatttgaactagttatattttaagtgtttaatggccccagttgcctactgtactgccagtatagctctgctgtttgaagttactgatatttgggggttattagttgctgcaacataacttagcccatcctgactgctacactaaacattgattttccttggataccctgatgaagtaagtcttccagacttgacatggggatcaccagggttggtacaaagtgacaaagagtatgttgcatcaggggattcactttatggcaacatagagaacctctaatgaaatgtgtgaagatttgtgctcagcccctcagcactgaacatctcctaattgtggcctagaggagagtttactttagtttctcataaatttagccacattgaaacctctgtggtaagaggatgaatttttttctgcctgataatagtgttttaacaaggtaatcaataatgtgagaaagctactcgaagtctcgatcacaagatgttcataaattcatttaggaagcattccttctcaatgactgtgtgctcagtaacatgctgggtgctgggaatacaactgtggagaagtgtacagtctcacaaagacagcaatgaaatctataattagagtattcattagctggaatatgacctgcattagttttatatcgcggctgaagagattacttcaaacttcaaggcttcaagcaacctatgtttatgctcccacagtctctgtgggtcaggagtctgggtacagctcaactgtgtcctctaatcaggatccctccaaggccaccccagggtgtctgccaggttgcattcttttctgcagctcaaggtcctctcgcatagttattggcagaatttagttttccttgtggttgtaggtctgaggtcttcattttcttgttggccttcagccagatatagttctcagcttctagagacccctcagagaccctcacacaacacagtggcttatttcttcaaagcgagcaggagaatctctctgacctctaggctcttttttaaggactcatctaatgcattcggcccaatccacgctgcaatggaaggagcccagccatgaggctgttgcagtattcaagaagagagatgatggttgctcaaaggagggtggtggcagtagagatggagagaagtggatagattagagagaagtttaaaaggtagaatcaataagacttggtgatttgttggatatgacataaggaaaaaagaagttaaagatggctcctggacttgagctactaagaggatgattgtgccatttcctggtctggggacactgagaagaagagcaattttgccagtgaagcagatccattatagacattgatgtgtctgatctgccagtgagacaccaggtaccaggtgccacaatgaccactggctacactgatctggagctcagaagagaggtgtgggccaaagatatgagtcttggagatatcagctaataggtgacatctaaacccattacaagggatgagatcatctagggaggacaggtagaatgagactagagcctggatgaagtcctcagggacctccacttaaaggtctactaagggggagggagtggcaatttcacacacaccaatttcttgttgctgttactaatgtcactttcagggaatgaatattgtaatcatttaggaacatatagtacttcaagaggcttctctccaccaggacactgtgtgtgtgtgtctgtgtgtgtgtgtgtctgtgtgtgtgtgtgtatgtgttgcagagaggaaattgcatccgaatcagctgaagagcatttgtaaactacactcacaaattccaatgtgtccctaagggaaaagaataacagatgcaaaaaatttctttttagagacacgtgccctcattttttagagaaaactggagctcataaaagtacaagtcatttgcccagtgctacacagttggctagatgatagccccactgagaggagttaaaggagccctttaaccctcgaggaatgtacacttatccatcagtttcacaggctagattccagaaacatcaaggaattctagtgtcagctattgggggttacccaaatgtcccccaagcattcagtacctgtgagtggaagaaagaaattctcacttattgaaccagtactatacaaccatgacagctccagaatgatgctgcaaggcagatattattttcctcattttacaaatgaagaaactgaggcttatgaattgagtaatgtgcccacagatggcagaaccaagcttgaaatttgctcttactactggccttacattaatttttaggatgttaaagccaactgtatacattgtgcattgactgtaatatataattaagcattccttcaaaaaaaaattacagtggaattgagttcatgagcaaatacatagtgtgagcctctcagctttcttcttgtgaaacagcagttctgaagccagactgcattgatgagaaccaggctccattccttacttgagtaaacttagccaaggtaccagacttctttgtgctttagttcctcatttgcaataaattagaataataataataccggggttgctgtgaaaattgaatgatttaatgtatgcaaaagctttgaaacaccacctaacgtgtagtggcactatgtagctggtcccgtctctatcattactattcatttgcattcactatgattttttttaatccaagaggcttatctgagtttccaattagaaattaatatctcctcctagccccagaattttagagttttgctttgtcctcttaacagtatagttatgagaaagtgatgcccagatagttacctaaggggatacagagcagatgcaagtggctaacctgatttgatccttcacgctcagtaaattgaaacgtcaagcatatttatgcctcagggcctttgtcttctactcttctcactgactggaatgctctctccctgtgtaatagaacagcctccctgagtaatttcttcaggtctctgttcaaatgtaaccttatcaaaaggcttgtccacaccactctatctaaaatagcatctccttcccaccattactttctattttcttactctatttttcttcaaagcacatcatcagaagtattacacgtctatttattgagggtctgtctccccattagagcttgagttccgcaagagcagggatttggtctgttttgttcacagctgtattcccagcacctaggacaggccctggaacatcacaggccatcagtaaagatttgcagaatagatgagtggatgtgtgagtgaatgctaagttacagttcacacaatgggattcatggctatctgcaaagaccaccatgatttacaggtgcattgtcacctacacaactttgggacaaactggacagctccagcccctcactgcagttaagagtactaccatctgtccagttccccaggccaaataacctcttcatcattctaggcacgggatttttttttcaccctccttatttgttcagtcccaagttctttcaaacctacctccactagatctcaagtccgtctatttctcctttcgttctggttctaaccaccatcttgtctcacctggctactagaataactttcttattgaacttcccactcctatgcttcctgtggaccattctctgcaaaacatgcagcacgcacttttggaaacaagtgatccctgcctgtaactcattagtggcttcctattggccttggaaaataaatccaaacttcttaccacattgtacctggcctggcatgatcattcccagccctcttctctaatcctatcttaggtaactctctccacctcacactttacaatgttcaatcaccccagccttttagttcccggaacaatctctgggcctttgttcttgctgtttcttctgcttggaatgcttctcacttgactcttcctatgcctaacaccgtctcatctttcagatttcaggataaaagtcacctaatcacagatcaaccagcaaatcttaatcaggtgcctccagttcttttctgccacagaactatattcttttcctttttaaatacttttcataattttacatcatgcttatttgttgtctgatgtctgtctcccactctagattgtaaatcctatctactgtggtatatccatcacctggaagagtccctgacacagagtagccacttaatgaacatttttgggtgttattgaatgaatgtcacagacgaacctgcaggaaaccctgaagatactgagggaaaaaagacaggaattgggtgcttggatctcaggatttctggtggttcgggcttgtcatcaaagactgataaatccttccaaaatactggtttcttatttattaccttctcaggttataatttgagtgagtaggaatgctgtgttcttttcaccataccaccaatatgatgtggcccctcttggagataacaacaagcatatttttagatttactatgagcaccttaacggcattatgccatttaatacgattcaataagatatgcattgctatcatttcctattttacatttgaacaaactgaggcacagagaagttaaatagcttgttcaagatcacagggctggtaagaggtagataaatgaatataaatatgtgaaatccaacctcacagtccgaattgctaacctctgaggcacagatgcccacatggcattgtacctatactcccatagtggcctctaccagccctttaaatatcatgtttatcctggacacacttgctttgtatctctggcccagacttctaccctgagctccagactcatttgtctaactacccacaagacatcttctcctgggcatgtcaaacttaacttttccaaaactgagtttatgatctacctctgtacccccatcccccatgcccaaacctggtctgtctctatttcctcttctcaataaatggcaacaggaatcatgagatgtggagatgtgtgtgtttatactatatatatacacacacatgtatatatatacacacacacacatatatatatacacatatatatacacacacacatatacacacatgtatatatatatacacacacacatacacacacacacacacacacatacatatatatatgcatacacactcctttgagagatggactgcttggattagatagtggcatggcatttctcctgccttactgttgcaaggactgtgactgttacataccaaggcatggaccaaaatttattaaatagaaggttttcagtatgttcttgctgaacaaaagaaaaaaaaattttgtgtgtgaatcttatctctttttactccaggtaatttcccatgatactcgttaattttctcagtcatttttctaagaatattttcccaaacttctctaagtggtaatttttctctccccaaggttttattcccaggaatttgtattgcagtatattaatgaaacaactctatgtttcataaaaatcattttcatttcttttcactttggctcttgtgcacttggatttatgtggcaaggaatacttaataataaggaaagacctatctagaaacagcggtgtaatcatttggcagtagagaaaagaatgatttatgggccatataattagcaatcatctgtttctcatttatttctcagggctgaagttcagaaggcattcagtaacaagcagtaggtaatgccttctcagttcttccttgaaaaactgaatataaataataagccccatacactatattttcccttaagtatgtaaagaggacacacacacacacacacacacacacacacacacacagaggactcatagatattcatcgccattcaagagaattcaggtaatattttttctcaagataatcaaaaaaacctttaatagccccaaataaaatcacagttcattagtaacttaagtttgctttacatgaaggaaagcctctttatttttgttgctttgttttctaaaatatgaaattcttttaagatgaatttgtataaactgataaagcaacaattcagtctatgcatcttaaatgcatttgcaaagccatggatttatttaaacttcagaagttatcaggtataattcaaaaggaagttaaaaggtgagggtatggaatcagctctgtctggggtaaacattcagtttggctgtgggtgagccacttgtcacctctctttctcctcctctaagaaactgaaggaaaaccactctcacagggttcatatgggaataagatggggtaacatgtgaatgtgctttgacaattgcaaaacatgaaaaataataaataaataatattgttattatttaaataataagtgatttttatccagctgaataaatcaaaacagctatccttttatgcataaaatggttgagatcccacgtcagaattttagttgattcagtatgtgttcagataatgaacttagcttttctacatatagaaatgtatttatattgttctctgagtggaatattttaatatatttttaatgtttacatacatttatgaaaagtcttcaaatgattattttcccactagattgtttattttctgtaagacctaacacttacagtaaatctatggagagagtatactctaagcgctatattctgctctaaatcatttgtttaattcagtgactctatcacatttccatatagtgtcttcggtgttgcccaattttactctttctctcataggaagatgagtgaatatagaaccttataggaaagctaagtgaatttaaagaaatcccattatcatgattaaaatttccaacttaggaagccacaaagccttcccagatctgaagtatatcttcatataaagaaaaagaactatttttaggaaatacagtctttcttctgctttataacttggaaaactgtactatgtattgaaaagcaagcggcaatcttttctgaagtccaacaaatgctcagctgaaaagctgtgagaccatttcagatccccaaggcatcattgcgtccacaggcatgaaatggggcaggactgactgtgtgtgtgtgatgtttctgtatgttctctatgggcatcgcagcctgtgagctcattcacatacccctaactacttagctctgatctaagcagctgtgccgggaggactgaccataataggttactcaacagaagaaaacagtgtttacaaagagacaaagcattggccatcaaattttcagttgttactggtttgtccactccctggacaggcacctcatttgcagtaacctgcagtgttcactctaagagtcacttcattgacagtcacttcctgcttcacaggaatcacaatatccacctaggccaggtctaacggcccacatttcactaatcatgttcatggattagataaatattgtgtgtgtggtccctccatgccaagcactgtgctaggcccaaaagatccaactatgaataacagaaatattccttgttctcaggagggttatactcagggcactacttgtcccaagccagaagataaaacctcatttcagcctgaactgccagaaagttagacttttcagaccaatattagagagtgcctcccactactgatgggccctggccttcctacccttaggaaattcagcatcacaccagtctctgagaacactgcagttgatgccagtttgattttcataatatcttgatgagttgatttgtgtagagtatttataacccttgaatgtttataattcaggtcaaaaagactctgaattaaagtatcataaatgaattacaactttacatccatctgcaatttgaaaacaatttcccggagtgcaaatttaccccagctagaggaaaaagttgagcttctatttttgtcagttgtgcaaaaacaacaagaagaaacaacaaaggattgttatacaatactagtataaggaaagtctagccacaaagcacaaagtcctaacatatctgtcaacattcctaaactataaaaacttaaatgccatgcagtccagatcaatcctatatgagaaagatggggataagtaattggccactttactaatttaaactagcttggctcatattttctcactttccttctacaactgatccctccttgtggaaagtgacttccaaagagaaatctcctaattggtttttcatgtccttttgtccagaggcatagaccaaaatctgttggatggttactggggtgtgaagtcctaattttacttccctatgttctgggttgataaaaagccctgaaggaggcaaaggtctttgtccaaagaacacagctctttcaaaaagctttgccagtcacccacccagattgcaatctcacatcttttggctcccttcatctccaccaccaccaacttttgcttttgcctggatgactgagaacattccttcttctccctcatcatttattctctatgaaacagccacagtgacctttgacaacctaaatcaaagtggtttcccagtgttcctagaataaagtgcgctgcacgtcctgtcttctgctcactttctcagcctcttctgatgccactcttccctccttagtacgccttagccctttgctcttctttctctccctcaacataccaggaagcttcccagctcagggcctttgcacccagagcgctcatcccatgctctttccccagctggtgccttctcctccttaggtctcagctcacatgtcacttccacagaggagactttccttgaccccttgtccagatgagtatgtagccccctcccataactgtttctgtcattactttatcttcagaacactcaatattatctgagtcttccctccctcccttcctccctccctccctccctctccttccttccttccttccttccttccttccttccttccttccttccttccttccttccttccttctttctttcgacagagactccctcttgttgcccagattagagtgcagtggcacaatctcagctcactgcaacctccacctttcgggttcaagcgattctcccgcctcagcctccccagtacctggggttacaggcacctgccaccatgcctagctaatgtttgtatttttagtagagacggggtttcaccatgttgtccagtctggtctcgaactcctgacctcaggtgatctgcctcagcctcccaaactgctgggattaaaggcgtgagccaccacgcctggcctatccttgcttttcaacttgtttttgcctatcttctttaacatttttgtagaatgtaaatgttattcatacctcccttgtttacagctgggtctccagctgacatgagtgccacacacacagtgggatgtttgttaaatgaatacttgcacttgtaagggtctggcctattggtgaggaatgccccaaatcataaactctgtccaggtccatgcattctaagttccaactcaacttaaactgtgggagccttgaatatacttttcaatttagtttcttttttctgtttcagtcctctctaataaatagtgacattatctttgtgaagttgcatgccccatgggaagtccttggaagatatgcagaacaaatgaatgtaagaatgcctttcaggtaggtggaaatgtattttattccactctctctgctgcttcactgtaaatctaatgttctcctctctcagaacaaataaaactgaaatgcagattggaaggccattagaggagggaatctttcaaatgtttaggatatgcaaataagccttcatggccaataatgatttcatggctttttgtgaaaaattctggctaatttagttcttagcaggtagatatttccagtgcctgtaataaagaagcattttccaagtggcatttttatttccaaagtgccatttttagaagtcctgtgtactgctgctttgaacagccagaccacaggcagcagttgcacaggggcatgttttcatgttctttactgactagtctcttccagaaaaacattaaaatgtatttctgtagatacaagtgcaagaaatttcatgacagtgtgatcttctttttaaaaaaaaaacaaaaaaaaccactttttttaattttaaaaagtcataaatactttgcaaacacgaatattgatatttgttccaaggggaatagaaaatactttgtattccttagttatttaaaaggattaatttaccttcatttcacaatgaatatttttattttccctatggattatggaaaagtgatctgcatttgctatacagaaataaaatattaaacctcaaattagaaatgccaagatatgtgggtcttttgtaatggaatctgctaaaaagatggatggatgtagtcccaaggacagttctgaggggactcgaagaataacgtacttttggtttgcaatttgccagtaagaccacattaggtgacagaaatgaggcaaattggtaccaactctacagtctgtctcttaatgagctgtggaaagttgtggagacaaagaacatttatagagacagagagaagggttagggactcatttagagaaaggcaatttccattcacaggcttgtaatgtatctccctggtgcatcttatcttctttgttcattggcctgtatgtcctaataccaagtcaaaatagaggctatgatttctagcatctgttttcctggaggcaaaattctcaaaatggataataaatatagttctgatcttatgatttatttttgtatttaactgttaaaaagaaaatctgagaactcaaggattaaaaaaaggaatacatatatatatccactagggagagataaggaatgtcaatttagattccactgaaaatttttatactataatagttaaagccaaatatgtatcaatgatataataagtgtctaatgtggattaataccatattatacctaagaaccgaaagagaaagaaagaaaaccctacaaaatatgtctagatagaaatttatacacccctctccagtataaataaatctcataaaaccttctgccagaacacacttctgtaacaaagaacccagggagatgatagaaacttgagcaatggtaatgcaaagccaattctcttactacctgcaaaggattttgtatctgaagggcctggccacatcatgaataacacttctgcatgcctactacacagcagaaatgtgctgcctccaagcagcattaatactgttttaatgcagcattgagagaatgtgaaccaagcaatgaaatgaaaatgaacatgaacaattatcttctttttagatataggaattcctgcaggacaattttagaagaaaatattgttaatgtgtgacactaattgacctcattaatattgatgtaggtttacctactaaacatggcttcacttgttgtaacctgatggattaaaaacttttgctattattgtgtccacagtttcagacaaataactctagtctaaggagatacatgcatttccaaaggaggaattctcctactacatcatttcaacaaaatgtacaaacatcattttagctgaattttaatacgcaaagaatcttacctgtattcataattttctgtagattcataattttctgtacttctgaatcccaagtttagtctccatggatttttatccctataatgtttaaaaggaaatataggaatagatttcttatgagaaattacagtaaaacctgcttcttaaatacttatatgtccatggatattttttataactaatagaccttactttttagagaaatttttaggtttatagaaaattgagaagatactagtgttccaatataccccttctcccccagcctacagtttctttattattaacattttgcattagcgtgatatatttgttaaagttggtggaccaatattgataaattcttattaactaaagtccatagtttactctagggttgactctgtgtgtgtggttctgtgggttttgacaaaggcatatcatgtatccaccattgcaggatcatgcagagtagctgcactgccctaaaagtctcctgtgtttcatcaccttccttctcccccgacctgtacctctggcaaccactgatctttttattgtctctatagttttgcctgtgttttaaagctttcacaaatacgcaaaaaaattggtgatatataaacttaccatttacagaagtcagagagttcagtaacagttcgggatatacataaaaagcacctgtttcattattattccattcagtttcggttgaagcctgaaatatggaaagtgaggttgcattttaataaagaatctaatacatgtattctccattcaaactacaccaagaattttcatttttaacatttttaaaagatagatatatagcaatctgacagaataagactgatttttgtatagtttccagaattccttgattttacttatttaattcatctaaagccagggccagtggttagccagtgtgccccggtgtggttatgtacagctgggtgttgatgctgacaagtgagtgtccttcccatactggttgtgaaatacatatatatatatttatttatatttatattactcctgtctataccatgagagacgtgtcttgtgtaaacttaaaatgctatataaatattagttaatataatagcgtgcccactaaattatgtatgttgccctctgatccatctttgcattttcctggggaaaaaagctgacctcagctgaagctgtgcaaataccaatcactccaaattatcatactgcacatgctttgtaggcaaggagcaaccattaaaaaaaaattatggtaatgggtagaggaagaaatatcaatggaaactgtttcataagatttcatgactcaaaaacgcatgccctgtgttcccactgtatttctcactgttaatctctttttagttttttcttcttcacctcttacaggcttctatcttcaatctcctttccttccttgctagttcaaactgtaactgacgatgggttttcttctcgactggcttcatttttgctgttcttccaggagaaaaatctattacctgccccgccgttacaagttcatgagcaggttagtagcacgctctgtcctgacagtgtttgtctttctgttggcccgtgtgctccaacaatgacaaggagctataagctggggaagatgagcctgtgtcacatgggaaagttggctgccatgcacattttaaaatcagctgtgtctgattagcctgaggagaaaaaaagatgaaaacgtccctctccgcgtcttcccagtaacttcttcccacttggggggattgccattcatctgcaagtgtgctggggctattgctttttagcccattcttttttttttttttaatttcaatagtttttgggaaacaggtggattttggttacgtggataagttatttagtggtgatttctgagattttggtgcacccatcacctgagcaatgtatactgtacccaatgtgcaggctttcatccctcgccccctctttttagcccattctattagataaattatcaaaaatcccaatatctttggcctagatgttctcccttcccttccctttctttttcttttttctttttctttctttctttcttttttttttttgagacagagtcttgctctgtcacccaggctggagtgcagtggtaccatctccgctaaccgcaacctccgcctcctgggttcaagcgattctcctgcctccaagcgattctcctgcctcaacctcttgagtagctgggatcacaggcatctaccaccacgcccagctaatttctgtatttttagtagagagagggtttcaccgtgttggccaggctagtctcgaactcctgacctcaggcgatccgcccacctcggcctcccaaagtgctgagattacagggtgagccaccacgcctggccaatgttatttttttctacaaaaattcctccctccactatatgtaatttgaaagcttgaagtgcagatagtcatccttagctgctggctacttgacttcatgagtggggtcctcctatgttagtaatattttgttaataacatatgcagatgtatagcctcactcaggtgcccttcctaccctcttttctgccaaaaaaaaaaaaagaaaaaaaaaacccaccagatgaagattgcatctactatactttgtatcctccgaaagcttgtttttccttgttttttgaggagctagggagaaggggaatgcatcaatgatgatgtcctctaatttgattctgttgtgatcattggagaatctaatttcaaaatcttaattgatcttatgttttcattcaccctgagctgagctgagctgatggttaaactgggaaactagtaaatttctctgaaaatcctagttagttcaactctatgaaatttagaattcaggttccctctgtttatatgctatgttgagtgataaataaaagagtagttggtacattatggtgggtttactcaaatgcatgtttactcagtgaagtacagtgtgagaactgacctccaaagaagtgaaaatgttgtttctcaaaaattgcctgcgagcaagcttattggcagttctttcattaagcagttgacatgacatttggattcaccatgatttagattgctaccttgtcacactgtaatcatctgtacaatcctgatataacagtttagcctatattaatagttctcaaactccagccagcatcagaatcaccttgttaaggcacagatttctaggcctcaaccccagagtgtcttgttcagtagatctgcagtggggatggggaattttcacttctaatggattcccagctgcagctaatgctgctggtcacgggacgatgttttggaaaccattggtctgtatgataggccaagctccatcttctcattaaaatacggatttgactgactatgggacgggaaaacaaaaaccaatatcaaagaaaacctgaaggaaacacagcaaggtgaagagaggtttctcccaactttgagggctaagtggaaatatcaagtttgtacatgatactgtttcagtattctagattctaaaaagaatgtagggttgggagaagtcttattcttgtttggaattgccaagtcagcaaagtcagtatgtgtggaacagagcacattggggtcataaaacctatgttggcactggatgactttgggcaggttacttcacttctctgagcctaagtttttcacatttataaaatgatattaacttctcccctgtatggtttatgtgaggtttagtgcctagtatgtagctgatgtgcacaaatagtatctattaatacttattacatgtaataattaatacatgtaataattaataattacatgtaataattatgtctttgcagaagggtatccttctattctttctgtcgtgcttctgaatttgttatccatctgtaagtctctcctttcttctatcctctagcaactagtccactaactgttctgagtttatctgccaagtagtcattttctccatttatattctctatacaggcattggctctacttcccacacagtcacctaatttaaaacctaagggtccaggtgtggtggcacacacctgtagtcccagatacttgggagtctgaggcagtgggatcacttgagtcaaggtgttcaagcctagcttgggcaacatagtgaggccccatctctaaaaatgtaaataaaaaaaacctaagggtcattttggatgttttgcttgctcatctagtcagtctctcaaattctgcgggtgcagatgaatatttctaaaagtctatatattactcttcattcccactgccattgacttaggctgagctcccatcacctcttgcctaaacatcagtttatcttcctgcctcctttctgaccccttccaaactctcttctattcatctcctgagtagcaaatctgattattgtcacttggtggctaccatagagtgatcacaataaggttaaaagcattagcttaattacagccctttataaactgtcctcgcccatcgcttccctcccaccactctttgctccatccatattgagctcatcgtttccaaacatatgttatgctcacgtgggtttatgtgcttttgcgtatagtggtccttctggaagatcctttcctttattgttcaccaaggtgaggtctactcagtcctcaaaactcagtccacatttttgccttttgcccaggtcaaatgatctcttttctgcttttccattagaatcctatggccccatcaccctgtgctgtaatctatgatgtaggtgtctagctctctacctgggtggtatttgaaggcaaggatgactcattcaattctatatttccagcaccaagcacataggagatggagtgaatgaacaaatgaatctccacatgcgtgtatgaggattggagtagggagaaaggaaatcacgaagaaaagaagcatagaaaaaccaggtctgcctaaagtttcagacacagccttggggtgaaaacatttgctcaaacagtgggggtgggatggacaataagggcttaaaagaaaacagtgataaaaggaactatagaatctcaaggttttatgggatattaaatgccatcaagtccaaccattcatcagatacttaaacttctgctttctggtcagccagtctatgtttgaacatctctggagatagtaaactccctggcccatctgtgggcagctgtgactgttacaaagttcttctttaaaataagctataatctctatctctttagttttcactctttgattggagttctgccccctggatggataaaaaaataatctagagcaaaaaggcaaagcatgtgagaaatattctgaaatataggcaaaagggcttagcacttagcagctatttggaaattcagagttgaggagaatgaggttctgacacctaagggctagggaaaatattgttggaggtaaaagaagactggaaatcgagaggagatacaggtgtggtgaggaagttgactttttaaaattgattctgtattataactcaacagtagatttcttaggtgttggtgtcttaaaggcctttggaactgatggcaaagcagctgaagagagtggtaatgctagagaatccagtgtgggagtcagcatgaccttagcgaggggagtgtatggaatatcccaggaggagatgtaaagggtgaagagaagagcgcctgtggcagttcctttgaaaatctgcattaatgggatgggggagacctgaggagaatgaaaaagaacaattagagaagtagaaggagaatgaagagagggtggtgtcaaaggcaccaagaatgagattccacaaggagggctgtgcttcagcttctgatgatcaatcagagatgagaatcaattttggatatttagaagtttcagtaatctctgtgacagcagtctccatggagtgatggttctcaaacatgtgtcaggatcatctggagggcttttaaaaacacggatcactgggcgcatccccagtgtgtctgatttggtaggtctgaggtggggctcgataatttgcacttccatcaagatcccaagtgatacctgtgctgatgttactgatcctggaccacatgttgagaaccatcactatagagtggaggataatggaaaccaaattacagccagtggtggaaggatgagggctggatgaatcagaggcaatgagggttcactgctactttgataagtttcatggtagaggaaggagaaagaggggacaggatttaaaacaggagccaagaggaggaaggcagaggagactatgaccttgtgacccatcacatgttctccatgtgtgcagaggagaggctttgagtgaataagagcttgagaaataaactcttctttcttttatttatttttttttttgagatggagtctcactgtgttgcccaggctggagtgcagaggcacgatctcggctcactgcaagctccgcctcccgggttcacgccattctcctgcctcagcctcccgagtagctgggactacaggcgcccaccaccacgcccagctgacttttttttttttttttttgtatttttagtagaggcagggtttcactgtgttacccaggatggtctcgatctcttgacctcgtgatcctcccaccttggcctcccaaagtgctgggattacaggcgtgagccaccacgcccggccgagaaatccttctttctaaagctgaaggaatggcttacaaaacactagtctttgggctggaaacattggtgctacttctagcgcacacatcacaactacagaagaatttaggcattggaaggtactggaagactctgggccaagctaaaggaaaaagaaatcccaacgaaggtagttgattcagaatggcctctcaaaataggcttcattgcataccacatagaattaagtctttgatatcactgggatgtgtgactttctgaagcccagtgtatggtgtacatttaaaatccacgttgtcagaaaatgttgcatctaccttaactcttcatttcacatcagaacagactgatttagatgatggagagtgtctttttctttgtagccagctctgatattctaaattgaaggccacatatacaacttgccatctagtagtacatcaataatgcaacactgacctccaatatcctaaaattcccgtcgtatgaaatcttgatatttaagttagcttggagtttcatttatataagtgatattgaattttattaatccatgaaagcatctctgaaacaaacctattccctaagaataaatgaattaatatctctaaggtttctgagcaggcagagaaataaagcacttcttcataatatctttattttaaaaaatcacttgactctcataaagcatactcatgtagttcagacatggatttttggagttaatgctctttttatccatgtacttggtctattaaatgctgctttctttcttatctttggacaggcttatagccattataaattgcctatccaataaaaaggaggaatttatcatcttttggctgccctttttttttgccttcataaaatattgcaaatatagtctgtggaagatatgattacaaaataacaaatctgattattatgggtggcttgtaggtggagtctcattactactccttccttccaccccccatatgcattctgcctgacttgatcctgggtgaggcttgacagtgtgaatgctggactgtattgcattatacattcaatgcagtcacaacttatcagatgagcatacaggcaaaaggacaaaatggcttgtgtattttcatcctcgttttaaaaaactaatacatgtaaatgttccaaagcctttggagtcttctataaggtatttaggctatgctccaaatagtacccctgtgacctaaaagaataacattagctttctaagatctctaaattctatccaggcagaggcttgtaaatctggagacttggctctaagaaaatgaaaaacaaattcatgcctctgctgtctattatcattccaagagggtgtcatttactgtaatgtagagctgtgtgctactgaaagaaagaaaaggagggaaggaaggaaggaaggaaggaagaaaggaagggagggagggaggaaggaagggaaaagaaaagaaaagagaaaagaaaagaaaagaaagctcatctgtaggttccctctaggcatatcatcgctgataatgtaatctgttagaaacatgatgctattattataatattctttactggggaaaagtaggtgtcttcaaagtaggcctgcttcatttaattcagtctgattaggttatcattagtgtacagtccctcctgggttgttagtggctcaagggaaatgacctttcttctacttcctcaggctatgcccacagcatgcaggttggcattctgtacattgtaggcagtttataaaggtctcctgacaggttagcatgttgggagcaagatcctttgcacatatgtggccttttccttaatcatcatctctcctaagttgggtaagattatctcccctttagagctgagggaactgagggtcaaagagatcaaatagaaccttcccaagaccaaacttgggaagccatcgcagagctggcaagtttgtacccatttgcttatactgtattgtcagctcttcccaggtacccggaatctcacctatcatgaatcagcatgaaggaaacctgagcttaccatcagaacaactttctgtaaaaataactcacattgtagtccagatattaacttgacaagttagggccagaaatgcccaagtgtctgatccattttccctttattgatttgcctgtgtagtgtgtaagagggcttttgctcagtaaatagcaaaaatggaacaaagtgacaacatacccaaccaaaatcaatgctaaatcattaagccaatgttttctcttttctattccctattggtggaggcttcattaagtaaagtctatactaaagtccactcctatactgaagagacaaatggggtgctttctggttagttggtttccagactttaacatatctaagtaaatttcagggttaactatttagggatgtttattaggtgggaacacagacatcaatctactagggagattcacagattttgaacttttattgggaaaagagcaatctatgtagaagttcatcattattgtcaccataattttcttcgtcctagaaactatcactcaatcgagccctttgtgcatccaaggcattgtgtaagcacttgatatccatgatcatgtttaatccttaccattgccttgttctatggattctgttggctcatagaggtttaattacttgcccagcaaggtctataaaactggaatgtgaatcatcagcttccagctgactccaaagtccatcattgtatactaaaggttatctaacattgtatactaaaggttatcattaattcaagtttgaattaatcacataagtgacataatcaagatattatcacccaaatcaccaacaacctgtagtatctaaagaatatctggctgatcatcattttagagatgagagcactaaggttaggtgaggataaagggcttgtcccaggccacactgatgtatgaccacagaatcaagagtccaacttgaatcttatgctttccagcctagtggcttttgcattatgtgcttctgtcttgcatgattgaagggggccctaagtgaagtctgagtgtggcaaagtttggagacaggaatgtgtttgtggaagagcagactaggggagcactcactcattatcctgccacagagagatagactcttgttcccagagccacctaactgggaggtgagaacagcatgtggaatggcagccttaacagtgggagcctggctagctgttgccaggtcttgaggagaggatcagaccgagagtgttttaagaggtgtattcatttcctattgctgtcctaacgcattgcgacgaatttaacagcataagactacacaaatgtattagctcacaattctgtaagtcagaggtccaggaagaggaggctcaactggtttgtctgttcagggtttcccaaggctgcaatcaaggtgttggtcaccctgggcttttatctggagactctggggaaaatctgcttctgggttcatttaggttgctggcacaattcagttcatgtaatcataggactgagatctccatttctttattggctgaaagtcttcctcagcttctagaggctgcctgcattccttgcctcctagctcttttcatcttcaaagccagcaatggtgggtcaagtgcttctcaaactttgaatctctctgattctccttctgccacatccctcctgctagagaaagttctgctttcaaaggtctcatgtggttaacttgagcccatctgagtaattcaggatgctccccctatcttaaggtctgtaaccttccttacatctccaaagtcccttttgccatgtaacataacatattcacaggttctggtgtgtacatctttgtgggggcaactctggtaaccagaggaagacacaaactgctgaccatgtttgagtgtttggtttagtcgtagtgaagtgcacacagcatgcacagccgtgtgtaatggaacctggacaacatgccttgtccacctgcttctgctcaggctcctcagtgaaggccagttcacaccctccagcccccatgcccaaccagtgtctcggggattttatttatttatttatgacacggagtcttactctatctcccaggctgaagtacaatggtgcgatctcggctcactgcaacctctacctcccaggttcaagtgattttcctgcctcaacctcctaagtagctgggattacaggtgcacaccaccatgcctggctaatatttgtatttttagtagagatggggtttcactatgttggccaggctggtctcacgcctgtaatcccagcactttgggaggccaaggcaggcagatcacggggattttatttttaagatgttcttttgaatgtgtttcttccaccacagttttttaaaaagcccagttcctttgctttccatcacttttatgttagtcctgtgtggtccttaagaaattattaataatgcttgctatctgtctggcagcttctccaaagcatttcatactcaccatgttttatgagcccactaaccactctgtaaggtcagtaagatgataatgatgataatgatgattattgttactattacctctattttataaccttggaaaagaaggctctgaagggtaaataacttgtggaaggtcatacagctgaggcgcaagagagccaccccagttacaaatctcagcttccttttaccatgccaagcagcatcctcttgcctccttcttgcttcctctttttcacatatttcaattaattaatcattttaattaccctgttctactctcttttcatcatctccacatttcaattaaattgtggtgccacaggctggctgctgaaagctgccatttcactcctatagagtagttatgcctgattttttttttttacagctttatttgtttttatccatgctgagcactgtacccagctggattcaattcatagtcatcgcacacagagcccagattctgtgggaatgtgaattttacaaagtgtgatctgattagtcctgcagactggagatgtgtgggaggtaaaagctctataataaaaaacctttgggccaatggcctctttcttgaatgagttttaaggcaatcaaatgaaataaagccaagagccatggggaaggccaccatcttagctgaggaagtctaatttatgtgtccatataaggactaaatcattgagcatagactagtgatagatgctggtgaaacacaattaactttgaattaaaaagcaaaaaacagaaatgttaagcggcaagctggttgctcaatatttttatttttggaaaaaagagaaaaacagtaataatagccagcatttcctgtataccagacagttctaaagactttatatatgtattaataagttcatcatcacaactctacgaattgggtatcattatcatgcccattttatagataaggaaactgaggctcagcaaagttaaatcacttgcccaaggttttgctgttaatattaacagagccaggatttgaatctaggcattccagccccatagttcatgttgtcaaccactgtgtcatgctgcttctctaaagcccatcatctcactatattttaagtatatttcttttggggcggagggttctcttggggaggagggtcctagagccactgtgagattcttttcagtttgaccctttgggagttctgaagaaggacagccaccaccaagcagagttgggatcatggtgaggctggaacaatgctgagaataaaggagatagtgaaagagaagtttaccattattttttagtttggaattgattggttatataaataatattatcttcagctgagagtttcactgtgatggttaattttatatgttcaacctggctgggctaaaggatgcccagatagctggtaaaacattattttggggtgcatctgtgataatgtttccagaagagattagcattcaaatcagtagacttagtaaagaagctgatcctccccagtgcaggtgggtgccatccaacccattgagtggaactagaagatggaggaatagtgaatttgctgctgcttgagctgggacatctctcttcttctgcccttagacatcagtgctcctggttctctggccttcagacttggatcaggatttgcacggttagctcataagattctggagagcaagaagtcccgcaatctgcagtttttaagaaggaggcctaggaaacctgatggtgtaagtcccatttccagtgtaaaggcctgagaactaggaaggccaatgtccaagggcaggagaagatggatgttccatctcaagcagacagcaaattcaccctgcctccacttttttgtcctattcaggtcctcaatggattagatggtgcccacctgtgttggtgaggaccaacttctttactaagtctacaaactcaaacactgatctcttcaggaaacaaccccacagacacacctcaaaataatgtttaccagctatctggacatcccttaacttagccaagttgacacagtaaattagccataacattcactgaaaagaatacattgccatgtaaatatattgttttaattaggaaaaaaataaagcatgaccaaattccacgtgttttcagttaataaatttagaaggtattttttccagtagtatagacacttgaggtagtgctatcattttaaagtttggtgtggtttttgcgccttctggtgtttttctgtgaacagtgattgggaactgttcacttggaagccagatgttttcatcagcagaagtcagtggaaccgagggaccagggagatagccagagagaaaactgtagctgaaaaccacttttaggatactgttgttttcattgacttggcttcattagagtgacacatgtgtgtcacgatgccctagcaccatgagaaccatggagcctgcttaaaaagagatcaatgaaagccaaaaatccggctgcctgctgagaggctgctcaggggaggtgggagaggcaggaagcaaatcatggcatggagctctctgcacaactcccaggatgtgctgccagcaccccctcccgaaagttaattacagctagagctcttctctgacctcagatgttttccaaacacaaaatgaattttttagaacctacagaatgtaagttaagatctctgctgcttgcttaagggactgttggaatccttttcagagctttccagccttgttaggactgcttggtcatttattattggcatgtgggtggacatctaactcacagctgctatttcacaaacagtaataatattgaggccacttggtgaaatcaaaacaacactagagttctggctgtcttctttccatctataaaacaaggatatcctgagtgcagtgagagggcctggaatgtgtggtatgatagttgtggctctgcggagaccttcctcctgtgtttcagggcattgctgacatgctgtaccctttggtcttgccttccatgtaccacaggatcgataaacaaataagcaggtttcggagatggttacctaagaagccaatgaggctggacaaggagacactgccagacctggaggagaatgactgctacactgcccctttcagccagcaaaggatccatcagtgagtgttccatgttaaagccccatctcactaaggatgtgcagctgtggtagagcctcaccctgcacgcctttgattcctgggcatgaggaaggaacagcatagtgcccttctcccctaaaagtcttgtgagtgttcatatcccttttatttcagtcaggggaagataactgctgtaaccaacaatccctgcatctcagtggcttaagatgatacaatgcttgctcatgtgtgtgttgggtaaatgatcttctccacagaaaggcagtgacccaggctctgtcattctcattgctctgccaactccctgtgcacggagccccctgcaggctcatctgcatctagccagcagacaggaggagtggcctacaccttttcccattgaaaagagggttttttgttttccggtttttgttttatcttggttcacttctcagttcccctttcttcagcagttcactgggttgccttaggaaaagccacatcacctggcagcccacttgctgagtcatctgtcagattgtctcagaatggttatttgtcacttttgacatggggggaggaaaaacaagttggctaagtcactgagcctgtgaggaactgcaaaaatgaaagagaatttactctgaagcttctgagatgacaagaaatgatggctggatgcagggcagggcaggcaggaggacagaaaagcctgccgtgtgctggagactgtaaacaataggagaaacacagcctctcagtggaggcagagatcaggtcagccccacctcccttgcaacaagatcaggaattccaggccctcttgctccagcagtagtgacagcctccataaaaatgacttacctggagggaagaaaagggtgatggatttaaaaaaaaaaaaaaaaaggttgctgattttgtgagaaagtaaaccaggctgagtgctgtggctcacatctgtaatacctgcactttgggaggcagaggcaggcagatcacgaggtcaagagtttgagaccagcctgaccaacatggtgaaaccccgtctctactaaaaacacaaaaattagctgggcatggtggtgcacacctgtaatcccagctactcaggaggctgaggcaggagaatcacttgaacctgggaggcggaggttgcagtgagccaagattgtgccattgcactccagcctgggtgacagagtgagactctgtctcagaaaaaaaaaaaaaaaagaaagaaaaacaaaaaacgaaggtaagccaaatggcagttttcaagaagttgcagggagtgccaggtggggacatatttcagcaacagaaaaacggttaaagtctgtggagctctgcagggcaaaggggaaaagaaaaatcaaagaatagatgttctgaatcaaaaatgtgtaacagtaagagcagtctaatgcaggggaagcaactctgtacgcctctgaaatagccgagctgatccccacaggtcagattaaagccaacccagctgcagtatgtgaacatttgaaagggtcattgaagcaaacatggaattcacagactggcctcaaaatcttagttcgatcctcaagagaaagtgggaactggaagggacataatgttaattcagagatcagggtgttttcttaagagaaaaagacagaaaaaagctgatacgttcccattcttaatttaaacccctaccatgtctctcttgttcatcttggaagttttttagacaatgagttgtttccctaattcttccggaatgatgtctggtttacaggcaggttttccctgtgcttctacctgtttatgatagagttcctagcacagtgcagaagggtatcaccaattttggatgatggatggatggatacattgataggttgctgggtgggtgggtggatggatggatggatggatggatggatggatggatggatacatggataggtcactggatggatggatagatggatggatggatggatggatggatggatggatggatggatggatacatggataagtcactggatggatgagtggatacatggatacatcaccagatggatggatgggtggatagatggatggatatatggatggatggatggatggatggatggatggatggatggatggatggatagatggatggatagtgtatatggataggtcactgaatggatggttgggtatacacatggataggtcaccagatggatggatggatggatgggtggatggatggatggatggatggatagtgtacctggataggtcactgaatgaatggatgggtatatacatggataggtcaccagatggatggatggatggatggatggatggatggatggatggatggatggacagatggatgaatagatacatggatgggtataggagtggttgtgtaggtgtataaatgaatagaggaataaatgaagtaagtggtatacactctgggattttatttcacttcaaagggaggatatatgagatataggtaaatggaagaaaaaaatgaatgaatatatggatagatggatggataaattagtgaagtatgtgatgtgtgctctggtattttgtttcacttcaaagggttataggtgtatggaagaggagggtttcccacctcctcttttcatgctgtttatattctacagtgttcttgctttagaacaatacttctcagcgtgattcttaaagtcagaagcccttggatacccagtagaatttctagggactagaactgagaatcatatttttggaagtatttaaaaatatataataaatgagggatgattagattagggatatttagccaactctctcacatatttgagaagcccttttgacatgctttggtattaatttgtcaaataattgatttattcaatagtcactaatttagtgttcacttcttgccaggcactgtctgggtacagagggtataaagataaacaatactcagtttggaccctggtgtagtaaagatgcagactattttaaataattgtaaacagtatgatgggtgtgacttaagagggggaatactcaattctccagatttggagggaggttggtaagtgatgaggattgatcacaagagaatgcttgatatgggtcttgaaggataagacttgcccaagtggataaggggcgaaaggcatcccaagaggagacagtaacgtgtgtataaatgaacgaaggcgtgaaataggatggagtgttttgaggaaccacaagtagccttctctgagtaagagcataggtttgtgaggaggacctagtgttgtttgaaaaaagagagtgatcaatggaagatgagatatcaagacaggagaaccaaggaagaaaaagcagaggacagctggaatgaatcaaaccgaagaaccagacctcagtgggaccaagagaatagaggcaattttatcgtgtaaataagaggtgaaaaattaaataagtgtcttgaatattatgagtggtgaggatttatttctctttgaaaattgccatgtcacatagatagcatccctcgggtgtataaaagtatgacttgaagaatgctggctgtcaaattggaaacaattgttgggtacaatcagaaaagaattccctaaggatgttttgagagtgacattaatggatttaaattaatcagaagtagctggttaataagctctgggaattatagcatgatattcctggctttccaaatatagtccaaaatcccatgtgacttcttagttttccagaatgtttcatattgtgtttttcttggaatacaagctaataatagaaatgtaagtgtgttcgttagggggtgaggtgggaggagggcatgaaaatagtaaaaaaaaaaaaaaaaaaaaagagaaaaacattgaaagtttaataagtgtttcatcagagacatttcccactgaaaaacctttcgagattttccaacctccacccccaattctggttgagatgtactcatctatgttttagtaatatttttcttttccttaaccaatattaccacccattttaattactttctccaagtctagagactccttgaaagactatgcctttctcactcatttttgaatcccatagtaagtgcttaataatgattttttaaatgaaaaaataaatgaatagatagaaacaaaagtaggagaatcatgtaagtaaagaataaagctgatgtgaagtcagctgactgcacactcatctcaaaccaaatccaagataccttcttttcaaatgtagactacctccattgttccctgtctcagtaaacagcactaatatttgtccagttgctgaaactggagtctggaagctattctagacacctctctcatctctgcttcttacaagttatacatctccacggattgatgattttacatcctaaatatctctatacttcagactttgtcactgtatttcacttgaaattcagaaataatataacaggtctccctggttttactcttgtcaccaccaatccattctctcaggtgcatactgcatggtgtcttcaaaatgtgcatctaatcatgtcacttcattctctttaaaaactttagacaccaaaattattactatgacttacaagctcttaaatgcctacctgcactgccatcccctctccagcctcatctgcctttcttgcctcccactcttcatttgttgtgatccagacacatgcagcctctcctctctcagctctttggatatactctgccccaggacatttgcatatgttgtttcctctcctggaattctcttccgattctttccttcttcatgtagtatgctgttattcatcctccagaactcagctccaaagactcctgctatggaagcctcccctgaccctctccttccccactaatccttccaaagattgggtctctgttctatactgttgtagttaatgtttcctagataacatttttttaacaattgaaatgctataattatttgagtagcatatgattaatgcctgtctctctaggtaaatggtatactctgtggagccataggccatatctgtttttgcccatgattgtatctccaatacctaacacaatacctagcataaaattggcacacaatgctggtcttctaaatgaaggagtgaggattgaagtcagaaagacagcacagaataatctaattgtaaacctttattctttaactgcactgtacaaaaatattaaagttgagaatctattaaaaaacaaatacctgccagccacagtgtctcacccctgtaatcccagcactttgggaggctgaggtgggaggatcacttgagctcaggaattcaagaccagcctaggcaacagagtgacacccatctttacaaaaatttaaaactagcagggcgtggtggtgcatgcctgtagtcccagctacttgggaggttgagctgggaggatcatttgagcccaggaggttgaggctgcagtgagttatgattgtgccaccatactccagcctgggcaacagaatgagaccctatctctcaaagcaaacaaacaagcaaacaaacagcctagcattccatttgaaaatatatctgtatttaaggaggaagaaagcaaacctgtgggtgtacaagtcaacatacaaatgctacttggtcactttatatgagcttaccaaggtgggcctacaggtagaaaaattcttattgtatgccagacactatttaagaactttaatacaatagtttgagggctgaggtattattattatcaccaatttacggatgaggaaagtgaggaacaaaatggtcaaagaacctgctataggtcgtacacctaggcgaggctacctgtctaaacaactcccaaatatcagcagtagaacagcatagaagtttacttgttcacagcactatctagtgtgggtcactctgggggaaggaggcatatgtctctgattcatgtagtcattcaggtacctaggctactgttatcttgttattctgccatcccctaaatcccttacagacaaggaaaaagagagatgagtgattttttaggaaatttttatgggccaggcctaagagtggtatatagcactttcacacacatttcgtagtctagagcttagtcatgtagtaatgctgggataactagtctacctgtgtgcccagaagaaaaaaagaagcagatttgccgaataaataatcgcagtctgtctgagtgatagagcaggaattcaggttcgaacaggaaggctctaggtctcacccttataagcattacgctctattgtgagatttctcagcctcagcactaatggcactggggctgaataactccttgttgtagggaagagtcctgtgcagtgtaggatagtaagcagcatctttagccactagatgctagtagcattccccaaccctttagttgtaagagaatcaaaaatgtttccagacactgccaaatttcccctggtggtagtggtgggatgggtacaaaatcacatccctttcctccagccttgaaaaccatggttctactgtctttcatcacatgacaccctttaggcagggccacccattctctgtgataaattaaactctatttgaatctaatgactatgacagccaagtccatttaagaattaatttatctctcttcacctctgtgcctgtgaatgttgccctgcttaagtatcattgcccttcattcttaaaatggcattagcgatgacacccttgaggcaattactttctaaggtcaatacccataataaaggttttctgctggtagacagaaaaaaggaaatatgcaagaagagtcgtgttactttttataatagatatacaggacattctttcaggaaatagatcaattctgattgtctttcagaaaaatgtgctagatatagacagaaaaatgttctcccctgcattttctgtgtttttattattaccattattttatttttgtaaacacccataaaaattgaggttaaattaaataccagttcttaagagaagaatatgaaatttatgctatgctacgtgcacatatgtttaaatatatattcactcatccacgtattccataccagttgttgctctgggtgcttggagatcaacagtaaacagaaaggcaaaaattcctgccctcctggagcttacattgtagctgggtgtaactggtaataaattataaaccagcagttgtcagtgaggggtaatttgacaacgtctagaaaaatttttggttgtcacaagttaggagtggagattgcgactagtgtctaacgtgtagaggccagggatgctgctgaacatcctgtaatgcacccaacagctccccacaacaaaaaattatccagcctcaaaagtcactattagtgtgctgaggtaaacattttttgaagtcaatttaaaagcaagtgaaaaggggataaatgctatgggaacagagaaaaagagggtggggtgaggggaatggggaggactgcatgggggtgggggtgcaggttgtatttccaaaagacagtgtttcagttcttcaaggcaggcctcctacagaaggtgtgattggaaaaaatcttgcaggaggtgagaagggcagagagagttccaagaggggaacagaaaacaaaaccaaggccctaatctgggagaagctctgattgtgtttggggaagagaacaaagaccttgtggctggagcagaaataccaaggagaacaacaatagtgatgagttagaggcgtgggagggagcctgatcctgtaaggcctgtgggcttttacagaggaatgacgtggtctgacttaacttttgacagtgtcattctgactgctctggcaactgcagtcatccgtgtgaagcatgatgtatttatattttttcaagtttctatcttttcaaaatcaataatgaaaatacatgccacatataactcagcattgacccatttctttgcaaagcttttgtgttgtacacaaaatgttttaactcatgtactgtgcatgtatgaaacagatattattgaaagaccccttgaaataaagtctgcctttaaaaggcacagattttatgtgaaataaaatcacatggctttagactcctactttcatctcctactagaccgtgagctacctgaggacaggagctatgtgcctgggagcaaggggcacccagggaatgtttgtgagaccaaagagaacaggaaaggagcaaggcagaattggcattgttaccgctgggggacagagccagggctctggagccagcttctctgatcttgatgcagcatctaaaaactgtagaatatttagaagagaagtgaaaaatgcggtcaaccacaatggtcaattgtggtttccatgtccaacttgaactttcccttgacttgattcagttttggctttagttctgctaactgataatctatcttctctatcaaacattttacggccattaaattctgttatcaggattcacatctgatactaagatatttaattcatgcatcacactttttaattatgtgtgatgtgtagtatacaaaatgggcattataaaaagaccacctgacacaaaatttgctttcacgcctttttctgcttctatgctgtgagctagggcataagaaaaaagtctagagaataacaaaatgacatagttctttgtgcctaagaaaaagcgctaacaatggaaatgttggtgctggggtcatggagggtttgtaagaatgggaaaatgttggctgggtgcagtggctcatgcctgtaatcccagcactttgggagaccgtagcaggtggatcacctgaggtcaggagtttgagaccagcctgccaacatggtgaaaccctgtctctactaaaaatacaaaaaattagctgggcgtggtgatggatgcctgtaatcccagctactcgggaagctgaggcaggagaatcacttgaacctgggaggcggaggttgcagtgagccgagattgtgccactgcactccagcctgggcaacaagagtgaaactccgtctcaaaaggcagtggggcagggagaagaatgggaaattgttgctggagggacagtgagtgggagattctctgagattctctgtaacatccctttgattgtcttcttatcttttgactgttctcagcagaaaaggcagcaagttaaagccagtagtgatcagccaatcaaacagtggtagcaccaatggcaacaataaaaatgatagcaaccactgtttactaaacaactccttcattccagggttacaccataggtatattacaagtctgtgagggtaagggtagaataatgatggtcagagaggctgagtgacttgctcatggttgctctggtcactgttagatgagtgaacagaaagaagtgtcttttcagctgggtgtggtggctcacgcctgtaatcccagcactttgggaggccgaggcaggcggatcacgaggtcagcagtttgagaccagcctggccaacatggtgaaaccctgcctctactaaaaatacaaaaattagctaggcgtggttgcgcgtgcctttaatcccagctactctggaggctgaggtaggagaatagcttgaaccctggaggcggaggttgcagtgagccgagatcccaccactgcaccccagcctgggacagagcgagactctgtctcaaaaaaaaaaaaaaaaaaaagtgtcttttctccacagtgctgccacctcctgtaggtgccacataaatggagcctaaatacaatttttcaactgccttaccctagggataagcctgtgcatgtgaagacatctgatttcctttggaatttattgttaaagcattcgagatgcattaaacagacatgaaataaaatggtaaaaatataaatgaatattctgaaccaaggagaatataagttaaagtaggcattcaagttcagggaaaaagtaggctcagatttgcaggcctcagtggcctatgtatctgtaatggttgacgaataaactagaaaattggcctttacaccaaaggggccaagcggaagggagaaacgtagtaactcatgtgattctgattgtcagagacgaagaaaaccaataccataggtaatgggttgctttttgactctgaaataaaattcttgcacagggtcattggagtggacagtgaaatagtgatatggtggacagtatccctggtaacctctttatcacaggtgccttgcaggacttttctgaaggctgtttctggtagtcccatcagcatggttctgaagacttaactgctcatggccataactttctgtgagagtttaggcaaggtatccagcaaaatactgcagtatacctgtgatggttaatactgactgtaaacttgattggattgaaggatgcaaagtgttgatcctgggtgtgtctgtgaggccaaaatagattaacatttgagtcagtgggctggggaaggcagacccacccttaatctgggtgggcaccaccaaatcagctgacagtgaacataaagcaggcagaaaaaacgtgaagaggcgagactggcctagtctcctagcctacatctccctcccgtgctggatgcttcctgcccttgaacgtgagactccaagttcttaagtcttgggactcagactggctctccttgctcctcggcttgcaggcagcctattgtgggaccttgtgatcatgtgagttaatacttaataaactcccctttatctatctatctatctatctatctatctatctatccatcctattagttctgtccctctagagaaccctgactaatacaacacccaaactaatctagttgtctttgttgtttgaactgtattctttaaaaactaaatttgaaaactgatcaaaaagcaaataacatcacattctagttgaaaatggttccatgtttgagaaacaatagaagctaaccagtgggtacacatctctatacgtcaatgcataaagcccttcgtcattttatatcttatcacaagagctaggcctacaggctgcccatcagccatgattgtatggccacctaaacatctgaccccacagaaagctctctcacactagccagctatggaaactcaggttgtcaatattagagtcagtcattccaggaggcccctctcaaaactcaatttcagaaaaggtcatttcaatagaaccatatgaaatttattataggaatatgatagctaacattcatatagtgcttagtgggttccaagtacttcacggttataaactcatttagtcctgtgagtaaggtatcgtcattatccccatttttacagaggaggaacctggggcacagaagggttaagtaacttatccaatgtcaaacagttggtaagaggtagggcctggatttcaaggccaagcattctggccccagtcttatctttttaacattgcatgttagttttctatggctgctataacaaattatcactgacttaactgtttaaaacaacaaaatttatcatcttacaattctgaaggctagggtgcaacatgggtgacactgagctaattaaggtatgtcaaggctgcactcctttctggaggagaatctatttctttgccttttctaatttctggaagctactacattccttagcccatggcttcttcctttatctttaaagccagcaacggtagttgagtccttctcacatcacatcactctgactttgcttctgtcttcacatctttttcttctctgactcttttgctttcctcttccatttttagggacccttgtgattatattgtacctatctaaataatccaggtaatctccctgtcttaaggtcagctgattagcaactttaattccatctgcatcattaattcctctttgccatattgcttaacattctgaggatgaggatgtggatatctttggagggccataatattgcctatcacagctgtacaaatttgccaatccaaaaagtgccaagggttgggacagaggacaggaaagttttgatgggaaaaaagaaggaaagaaaagagagagggagagaggaaggtggcaataggatttggggacattaaatgaaatgacatatgtaaaagacttagggcctggcgcgatggctcacacctgtaaccccagcaatttgggaggccaatgcaggcagattgcttgcagccaggagtttgagaccagcctggccaacattgtgaaaccccctctctactaaaaaaaaaaaaaaactttagccaggcatggtggtgcaagactgtagtcccagctactcaggaggatgaggcaggagaatcacttggaccagggaggcagaagttgcagtgagccgagatcatgccactgcactccagtctgggcaacagagcgagactccatcttaaaaaaaaaaaaaaaaaggcttagtccagtacctggcagatagaaagcactcaacaaatcaacaaatgatagttatcattatcattattaccacaaaccagcagtatactgagaatcctttggagaatctgcaaagttgcagttggtgtgtaatgggaaagtttgaggtgacagagactgattttgcaaaggctcataactgacctgaactggaattgctttgcttttaagccaaatgttactcagtgttccagatactttgccatttaacattttatgtgtcagtaacatatgactacttgcttttaaactctcagcatagatatcggaagatagtgattcttctaacctgtgccttttactgtatttttgtttcaaagaactgaagagttttttttattgttttcatcgatctgaaatctttagagaatccttcaggcagaggtaccaagattgatttacgtaggattaaggttcttttagtgcctcaatgacttaaagcagtctctgaacacttattttattgcagttacttattcggcattaggatcctcaatattcaggttgtttgtattgatccttagagtcaggggaaacatatctatgttctggaaagtcttaaactgaaatgaaaatgaaaaaagccacgcatcttgagatttgtgcttctcaagatcatacagctccttttaagtaggacataatttaatgactttaaagggacaaagaggtcacctaatcaggtgggaaaagcatacctctgggtatctggaggcccagtagttagttgggtctgttatcttaatatttgtgagaacatctgtgaataagtcacttggaaatattttattacatttatctatctgtaaatacatagtttgtttttctgcttatcagttcattcatttaacaaacactttcaatgcctattatgtgccacatattgtactataatagaaaaatatatacaatatgttgatgtatatttatgtgtgcatgtatatttatgtgtgcatgtatatttttatttaaaattttaacttcagtatgttaagttcgatagtcaagaggctattttcctcatcagaatggtaaaaggcaatttaaaacacctataggaaagggaaagagttgtcaaatttacgtacagtaaaataaggaggggttaacctaagaggaaggaagggaactaggatcccatctgttgctatagtatacgtatgtagtcacactgtgcattaagtcttaggaaacaacagtggtgagaggagacaaggaagagcagaggtgaggaaaacctagtgcttcacaggcaggtagacactctggtgccccattggtcagtattctgtgccaggctgtgcactgcacgccctccacattatcttttttgacccttgcaaaaaccctgaaacataattttacagaaggaggcgcagaaactcagaaacattaaatactttaagccagggttacccagtaacaaatagacttggagttagaacccaaatctgtctcattgcaaacccatgctccttccataatacaacctgacatatattgactgcccactagacaccgggctacctgggaggctactggtattgttatttccgtttagagaaatggaacacggaggagtaagtcacctacctgagttgcacagttggtcaaagtaggaaaacaccctgagcagctgggggagggtcatttctgggcctgcttctgactcacatccaggagtggcactggggagaaggagttgttaaacctgtaaactgtgaagatggtagtttattcaaataaccactaattcaagaccacgtcttagaaatgtctttgtctgtggggaaaaacctgattcttctcacttcccactttcctcacccctgatacaacacccacaccatcagtttggtgtttcccattctagatgagtgatttcaccactgtgtgttgaccaaccttgacgctcccatcttcctcgctgcccaccatcaccaccaaatcctttcggcccttctcctcctttctaaccccactgccattgccttagtggaagcagccacttagatgaacaattacgacagtctcttcacctctgtctttcctcactcccaaatctgtctatcccactcatgtcacaggacatttgcaaggctgctggcactggttcctacagtacctgtgcacagttagaagaaggacatccttcctctaggaatattcgtagcgcatggattggcaagcagagtatggacagggtcaacccttcatcatgcccttggctgtgcacctgcaggagtgaataatgcacagtagtgccacgtgtagtaacattgcttccttgcttaacagcttttaatgattccccagggcctttgggataaagcttaaatttcttcacatggcatacaaaactgcctttttagcttcttcccttctccccccagccttttgggctggtgctcctgcagcatgggaatggaagtgaccctaaatattccatgactatttttcctcttcccaaggtgtgctctctttcctctcactctttggtaatatcctgttcttccctcagtaacgagttcaggtgtcatcttctttatgaaacatcttatgtctcatgtctcatgcagacagcattagacttctgggcccattagcctctgtaaatgctttaattatggcactgactattatatcacagttacttgttttcatgactgtgttctacacaaagcccaattcagcagccaaaagtaattagaagggagctccagactaagtttctcaaaggacataaagggaaaccatatcctcagcatccatttattatcatcctttcctctccttccttagtcaaaggtcatcctcctactgttgacaaaagcattcctcctctgccctagcctatacggtttttctttcctcttcctatgttgctctcctccccacaaacctcagccctctctcctattgctttcttatatggattgccacagcttctccatcaggaaaaaagaaaacactcatcttcttcaggcgaagccataaattacaggattatcattgttaggttagagactgtgtcagccaggttctgctgggttctgatacaacaaaccctcaaatctcagtggcctgcacaaaggtttatttatagctcacataacatgttagcaacgggtcaactgaggctttgcctcacatgattcctttatcatgggatctggactgaagaagcagtctgtaagacatgcattctcatagcagagggaaaaagtaatggcacaaccacacattgacttttgaaatttctgctcagatgtggcatatatcacatatcctcacactctgtgtgccaaaacaagccttatgaccaagcatagtatcaatgtggtagggaattatatgctttctccaggcagggagaatgtcagtaacatggtaatgagtagagatatattttcaaagcagcaaattgggactaataagacagtatgctcaggaatacctcgtattaatattgttttgttttgtcacattcgcatggcacatcagtctgtgagcttacggggctcagatgatgtctcatacttttttttatgatttacacgtaattgcacatatttatataggaggaataagttctggtgatctattgtatagtaggatgactagaattaacaatcatgtattgtatatttcaaaatatctagaagagaagtttttgaatattctcattagaaggaaatggtaaatgttttgttctgaacacctagcatatttttagaaaaggaattttccatgcaagttaacaaagacctgggcagaagagagatctctgtagggtagaaatcacacttgaaactggaatatttgaaaattccaaatcaaaaatctatctttatacttgggtgatattcctatcagattaccaagcaggataggtagatggctgcttctgtggtgtgtagtttctcagagaaggaggtctcctctccaaagaatgtttctttctctagatccctatactacttaggttccattcaggaaaactgaaacctggcagttatttttttaaaaaaaggatactgtgggggaagtgaagaactatagtgtcgcaaaggaaacactgaagtcaagcagatgataactgcaggaagtgaagcagctactgcctctagagttgggggagcaaaatgaagaggttggggttatcggaaccaagatgctcagagaggccctgtggagctgagcctcggactcctggggaggagattctgcccttgtggtgctgggccctcaaggatatggggcaacggagtgagcctagtttggggagtgttgcttttcagctggaaactggaaccagctgccattgtgaggtcagaggatcattgctgacaggaacaggcaggcaaacaagaaggaccaaggtcctttcacctgttctcccttccagtctccctctcatgccctgtactgacagagcatatcagagagacagacagcaatgcagaaatgtagtttgcagagtctctattctggcattgtattatagaaaagagtaaggaaggggaaatcagagataacttaatagacagcacactccctaatacctggaattttacaatttgaactttaatcctttggctaaagtcatcctcaattaaaataaaaatgtcccttggaaagatgaaaattttaatgtccttctttattgacaccccattatgaatagtttattgaaaataagaagaggaagcaagagatacagatgaggtattttggccgtagcaggggcagatagagaatgccacaaagatggtggagggccaaaaaagagcaatgaaaacagggggatcatggaagataaattttaccaacttccagattttgcagatgcttggcagagtttctaggactttgctgctcccagcaatataaatgaacagcagggacagagatggatctgtccatttggtcaacattcagaacaactcagctcatataaaaatgagacccatgactaagatcagactaagatggagggagccatggttgagtcactgaataataaacttatgcagggacaattgcctaagtaattcaagcaaaaccttactattgactgaattacagtagtgccctaattagtggaacgctgagagcttagcttattctaaattggatttttctggtctgaggattaattaggaaatatttccagacttgttttatagattaaaaaaaatgatttcctctttattctggctcacttttgaatagcaaataaaactaatctctaataaatttgaatattgcattgttttcatttttgagtgtctatctcagttgagtctgcatcaagtaccagttctgtggcaagaactgtgtagagctggacaaagatgaatgaatcattttctgaccttaaggattaatggttgagctcactcaagctctggttggaaacacagggcctgggtgcccaatcccagctctgtaacttgtaaggtatgtgattctgagcttcaacctcttcatctgtaaattggaaataataaaaaatagccatataatattgtgaaaattaacaacacagtatatcagtgcttatggtatatgttcgataaaggtattttatttttgttgataattttgatggaaccttatatataaatagataattttagtatatgtgaattctataaatgctgattttcatgatccagtcttaaaggtagatagtttaagattggtgggaagttttcccaattctaggatattacttttttctcttacttttttcttctcttttctatagcatcctttctcctttcttttcccctatcatttcctcttcctgcctcctcctcttcttccagaattatccagattgctatccacctctccatttctcttggttgtgtatacctagccaatatcaaaggtactgtttggcctactgtgccttaccaataggttttcaacctctggctcaattaatgcatatccttttgttagataactgactctttaaaatatttattgatgcaaccaataaataaaaagaaaaaggctattccccagcctttttctactgtgatactttacttatgcaacatgctccctcatgttttcctgttcctgcagaaagcacgttagaatacctgggagtaaaatgatcctattataaaggtaccttaaatccattctgatttatttttttaatcattcccaagttttggcattctaatcatcattactgtcaaatacacacctcaccattttgtcttattaggatgttgtgacacatgggtgaataagaccccaaaatttgactattgcttctttcttaagacctgtcctattggacatgcacccttagtcctagtaatgctcttcctaaagtaggtacttcctcaaaacacttgcacatgtgcattttgcagaacgttcattagagcattgtttataataataaaactttataaatagcctaagtatccactagcaagacaatgagccagtaaactgtactgtcccatacagtagacttctgagcagcagggaacatgatggactagagctccttgtatgaacatcatgaacctcaatgctgagcaagcaaagcaacttgcaggagagtaattatagcatgataccatttctataaagttctaaaatatgcaatactgtatttttaggaatacctgcatgttgtggattataaaacattcctgatagtggttacctctaggggaggagaatacaattaaaaaggaggacacagagaaacttcaattatatttgcaaacttttgattcttaagtttgttagtgggtatataggtgtttgatgtcgttcaccagtgcatttttgtatgtttaaacatattttattaaaagaaaaagatgttcacaagatcttatttcaaaatagcaggaacttatacactgggggcctgtttgaaccatgagagtcagtaatcttataaaaagtgacaaatagtgggccaggcaccatggttcatgactgtaatcccagcactttaggaggccgaggtgggtgtatcacttgaggtcaagagttcgagagcagcctggccaacgtggcgaaaccctgtctctactaaaaatacaaaaattagctgggtgtgatggcatgcgcctgtaggcctagctacttgggagactgaagcagaattgcttaaatccgagaggcagaggttgcagtgagcggagattgcaccacggccctccagcctgggggagagagtaagactccatctcaaaaacatttaaatgaaaatttttaagtgacaaatagatgataataaaaatcatgaaactaccatttatgagcatcatgtgtatgtaaccacactgcatgcagtatctcttaatcctcaaacatcctctgaagtgggtgttatggttgtccccatttgaaagataagaattctaaggcttagagatgttacttttctaaattcaaacagttagtgcttggcagaaccaagattctaacccaggtttgttttttctttaaccaacaaagtagatattattgtattccttcaagatgttgtcattccaaccaataagatataacctagctatattatttgggggggaaaagagtgacccagaactcagagttttgtttttgtttcatttggagataaggtcttgctctgtcacacgggctggagcacagctgcgtgatcatagcttactgcagccttgaaatcctgggctcaagcagtcctcccatctcagcctcccaggtagctaggactacaagtgtgtgccagcacactcagcttgagtttctaaaaaaaaatattgcgagctgcccacatgtttacaatatcttgggctcacaaaaggtaaattctatctatgaggcgacttccctcaaaagtctaccttcaagctggaacatcagtatttgtcagtctaatctagtgcataaaatactgagccctaaaagcaataagaatcattgtgaagattctgactttatttcaatgtggatgttttatttttgaaaataattcaattttttaaaatgttagttatctttgacaaatatgttattccaaagggttccttccttccttcctttcctaccaccttataaattaaattaaaattagacatgtatacattttaaatagccctacaaggtttgttttgaaaaacagcaatcccatgcttcaaccctttatatttgcccctcccaagaagcagcccctttcaactcttttacctgtttattttggcaattaatgcctcatatctaaataaactattttattattactttgctgtttttcagttatagcagaatctattacttcccccatagagaataagaatttgctgtttgtttcttccctacaattcttactacagtagatacctattcttatcctttcaacgtagttatattacaatttaattacattatcataatgtagatcactatttacataatgactatacaaatgctacccagagctaggtcatatagtacaatatgaatcattttccttttttgcgctatttttgcttgaactggagtaactcattctcttgatttttaattttcaaaattttctatgtacctattactaattccatcttacattctgccagttatttggcagagtttacctaaattgtctaaatttcaagatgttcagatgcatcatacgtaatcaatttcatcttcctgagaaaattactctggagccttctgacaagttccaatctgaactcttgccttccgctcctgttataaattatcatcttggtatcttcctttaccaaggatatcctaggattctctttgtctttcacttttgtggcatcttctgtttcctgtgtatcatttcttacactttttttattgtaccctcattttgcattctctagtgacttcctaataagattacgtggatgatattatttttgcgatcatgcatactgttatgggtcaaattgtgaccttctgaaattcacatgttaatatcctaacccccaatatctcagaatgtggccttaggtggtgatagggtctttaaacaggtaattatgttaaaatgaagttattaggatgggccctaatccattatgactggtgctgttatataagagaaaattaaaacacagacatacacacagagaagatcatgtgaagacatatagagaaaacagctatctacaagtcaaggagagaaaatttagaagaaaaaactctgctgacagcttgatcttggactttcagcctccagaactgtgagaaaacaaatttctgttttttgagccactcagggtatggtactttgttatgacagcccaagcaatgaagtatatgttcattatactgcactcattatgatagttgggctaggtatagaattctgtataaaaccaaaatctgtttttctcacaatttttaagttcttgatcttttaacttctaaaattaatattcaatattcctgctgagaacttcaaaaacattccaattcctaattctctgtgcgtaacctttctcctctatggaaccttatataattgtctctttggcctcagtgttctataatatcataggaatgtatcttgatgtggttctatgtttacttatattactggatgctcagtgaaccctttcaacctgtatagtcttgtctttcggttcagaaaaattttcttgaataattcttgaatgttttagctgatttattccttttttgtctttctggaattcctatttttcagttattggacttcctgggctgatcctctaatgtccttatcttcctctttttttgataatctatatatttttgctctgggagaattcttcaagttattttctggaccttcaccccacttctttaggtcactgtgtgccccagttctaagattttctgggatttcgtagtataaatattattgttcttgggttttccccagaactggtttagcattcagttttttctggttttctaagtctattattacatagatctgtctgcttggcacattccaacattttgatgctgttgttttgtgctatctttgttctatgagtgttcttactgttatttaaacatacacacccactatgcatgttactatcattttcatgggattttgagagagacagaaaaattgtatgcaaatgtttaattttccatctttacttggaagctcaagagcaaatgtttcttaatttgtatttaacacttagataacgaagatgatatcatgaagtacaattagaaatggccatttgaataaggaaaatgactcacagtcctttacatttcagtaacctgtcatcctgatctaaaaaaagaaactttaaaatctttaccaaatagtcagaactttcaatgttatatatttggcctgacaatcttctcatctttttgctcataaaatgtctactcaagattagaagttagatattgtgctgcagttgcctaaggcccagaaaacgctcaaaataggccttgtcacataaaaaattaattggttgctttgttcctacttagattttcattaatttgaggacataatataagtgacagttaactgtatcacctttgcttctccttgttaaaaaagaaatacctatttaaaagtctaattaagaaagtttcctgaaatatttatttttaaggcattaaccttcccttattatattatggaataacacaactttaaacatcagaaaagactggtatgttggttatctattgctacataacaatctactacaaaatttactgacttaaacattttatttgcttattattcttttgttttagcaatttgtgctagattcagctgggaagttcttccactgctttcacctggagtcaacatgtggctgcagttgtccctttgctcaatgagctggacagtccaaaatggtctctgtcattcacatagctgggggatgctgccagctcttggctgcatttctgtctccacatggctcatcttcaaagaggctcgtttgggcttctttaccctggcagccttggggcagcattccaagtgggcaagaatggaagctgcagaacctatgccaaaaaatcatggaaattacttctgctgtatactgtagattaaagccattcacaaatccagctcagtctacctcttgatagaaggagcaagaaattcacatcccaaaggagtgtatatacagacataggaggaatcatggccttttttctttttttttttttttttgcaatctaccacagactgctgtctggctgaaacttattcacattttttccatatagaaaatattctcattcccattccaggatctccatgggtctcatcccaatattgcatcaggttcacagtcttagatctcatgctctgcatcaggtgagttgaggatgaaaacccttggctacaactcctcaggtgtacactctttgtgagccagagacctgtgaatgaaaaagacaagttacctgctccctacaattccaacacatggtgatggaacagaggcagaataattacaataggtactgccattcaacatggggaacaacaagaagactgtagcagtcacttgttcacattaatctgaaacccagctggtcacatgcttcaggctccttcactccagggtcaaaaaacctaccttgattagttatctgtttctgtttcctactttgccacatgccttaaatttttagattcacagaggtcaataatgtgactataattctaaaataattgtacaaaaccatctgtaggtagttaagtgcttcttgacaaagttaccccttcctcctgaagtttttaaccatgcagattttcatacctttgagaatacttgtttgtttgacccacctcagaaatttcataatatatgtaaaaaaaaaatggaaaaaccatcttccttgcctttacttccccaaaagtagtaccacatacaaagcatcattataaaatgatactgattttgagaatcttcaaattacaaaaaaagttaaaatttatctataatataacctgacagtttctggaacacccagtggttctctatgggaatcacatgatttacttatttacttggggcctagagtagagcatgagacagaccaagccctgccctcacagagcttgcagtctgtagggggagaggggcagacaacaaaaatgtagacacatccccacctcatcccagctctatttttaaaaattttagggagtaaaacataagagaataaaacagggtaatggaggagagagaatgagtgacagagtgagagagagagattattggggcaggagagtgactatcttagctaggatgatgaagaggtgacatttaatttgagaacaaaatgttgggaagaaacaagttgtgcaagaatctaagaaaagcatgatcaaaagccctgggcagtaacagtctgggtttgtttgttcagggtcagaaaacaaattcaatgttgcttgtttacaatgagcaaagggaagaaaggagataaggtcattggtatgggcaggaaccatgaaggactgtgtggaaaggtgaagtcattgaagagttttaactggaaaagcataagatcttattcattttttttaaaaaatcattgtggttgctgtgtagaggatggacaaaagagacagtgaaattagatagtacagttaggaagctattgtagtagtcctagaaacaactttgcagtaggagggtgagaaagggtcagattcaggataatatttgggaagaggagcccagagaccttgatggattggatgttgggcataagagagagggtcaaggatgcatctcaagtttgtgacttgtgaaattgggtgcacttcagttccttttttttccacttttattttaggttcaagggtacatctggagaaaagggaactctcatacactgctggtgggaatgtaaattagttcagccattgtataaaacagtttggtgatttctccaagcatttaaaacataactaccatttgacccagcagtgcccttttttaagatggaaaagcctaggggaagaacaggtttttcctttataagggtccagatcaaaagttctgttttggaaatatttggtttgagttttttcttagacatcaagcgagatgtcaaacaggcagttgaatgtgggagttcagtcatttaccagcaagccttgatgacttgcctcatcaatactttatagtctcactttgtgactatctaaccctatccttgggcaactaagacatggggaccctcatttcctgacaagtagagactcaatgaattacccaaggacacacaactaaagtggaagagcagggcttgaaccaggtcttctggcaacctacacatagtcctgtagggcactgctaacccctcctctactctcctgcttattgtaatcaaggggagatgcagggttttaagataccattctggaggcagtgggtgtgccacatcctcaaagtgtcacccatgacttaggcaattgtttatccatgctgttcatatagtatccaccagccacatgtagctacttaaatttaatttttaatcaattaaaattaaactaagttaaaattcactttcttagttttactagtcacagttcaagtgctcaatagttacatgagtaccatattggatagcacagataaagaacattttcatgatctcagaaatttctattaaacagtgctggagtctagattaatctaatgttcccttcagttatattaatttgtgaagaaagtgtagtcttatcctaaaagctgtgatctaagaggaaagtttaggaaaaaaagaaagttacctgctttaaaattagcatattttataataagctgattttagatccagcattaatgagcacctttccccagctcacacccttgaatatttgtgtgtttctcatgttatctatgaaggtgtaggttcctctgaggagagaaactaggtttttttcacctttgcattcccctctcaaaatatataaatatacaacgcccatgcccatatatacacaccctcaatacatattgctttgcacagaacaaacataatatttacttgttaaatgacccagcatatcacagcattttacaacactactgtggacagttggccacaggaagaacctatcaatcagagcaaataaactccaggaggtctgtaactaaaacccgattgcgcagcgtatttatttctcatttctcccttcctagcaaaaggaatattgggacctcaatcttccaccaccccgggtgaaaacgaggttgctcactaccctagaaagcataaaggtcgagcctagaggagagtcagtgggaagttcaggccctggtctgcccattacttcatgagcaggccagcaaggtcttcctcatggggtgtgatggagatatgcagaaagcccttcacacacatgcacacaggcagacctgggcccctcacagttcccttcacaaacgcaggagaaaatttggagcaaaacagatgttttctgaattcctccttgccacttgctgtttgtgtgactttgggcaaattacattagcccgtcaaagtagcaggataaggagatgtgtggatataggccttgatcacagagttgatgctacacccattcagcagtttattcccctcttcaccgaatttcagggggaatgtgagagcaaacctagaacagaaatgtgctttccttttaagttttctttttaaaaatattttcaaatgttttttaagaggcagaatctcactctatcacccagactggagtgttgtgttcatagctcactataccctctaactcctgggcctaagggattgccctgcctcagcctcctgagtagctgggactataggttcacaccaccacacccagctaatttttttttttgtagagatggggtctcactatgttgccctggtcttgaacttctggcttcaagcggtcctcctgcatttgcctcccaaagtgctgggattgcaggcatcagctactgcacccagccaaaaattgcagttttttaaaaaatgtgtaatagtacttacacatggtaaaaatttcctaagtatgtacaatgaagttttcctcctgtctatccagccacccagttctccccagaggcaaccaatgttttccgaggtgtatgtgtcctcccatagtcattctgtgcatgcacaagcaaatatgcctatcaacatattcatatgcatgtacttcctaatatgtgcacattttcctctgacacaaatagctgtgtgactgttttgaaccttttctccttgtcctgtcttggagatttttttagatctacaccaagggcccttaatctatttacaggtgcagaatattccactgtagagttgtaccataattttcttatcctatcccccactgattaataatttaggttatttccaggcttttgctattataacccatgccataatgaacattgttgtacatctgtcactttgcacacgggtaagtatatttgtagaatacatttctaaaaaaagaaatccctagattagatggtatgtagtgaagatatatgcgtagttttgatagacctgaccaaatggcccttaaagagtttgtatgtttgctctccccctagcagtgcatgggagtggatatgagtttacaagccaatgtgaagccctggtcagagactgagccccaagcctcatgtttgccagagttgcttagcttacattgtgtgcatgaggggatgggggatatgtgtgtgtatgagagagagagagagacttcatttggagaaagctgtggctaactgtgagaaccatgatatggggaatcatcactgttccttctcataatcctccagtttgaaagaatgacccagaaaatgaaagtgttccacaccccgcaggaagatccttagacatgcagtgtggaggcagtagttcagctgatagctagaagagatggcaagagcaagagcagaggccaaggtataaggagatgagatttagtttcatagcccctgtgttaggttatttgcattgctataaaggaatacctgagactgggtagcttataaagaaacgaggtctattttggccacagttatataaacctgtacaggaagcatggcaccagaatctgctcctggtgaggacttaggaagcttccaattgtggtggaaggtgaagagagagcaagcatgtcagatggcaagagtgggagcaagggcaaggtggggcagggggaagtggggagccacactcttttaaacaaccagctcttacataaactaccagagtgagaactcactcattaccatgggcgtaacaccaagacattcatgagagatccacccccatgaaccaaacacctcccaccagaccccacctctaacactggggattccatttcaaaattagatttagaggggacaaacatccaaactatatcagccaccaacattagctagtgttcttcagatggtcagctcatttgatccaactttaagtgtttatcatgtgctaagccctttacctgtgctggaaatacagagatgagcatggccggtttctgccctcaagaagctcacccaaggaagtgggccatgtgggcggacagctttcatggaatgtaatagaaactacagcaatgatgacagctaactctgagaacatcttcaatgccagccagtgggctcagcactgcgtgtcatctcacttaattgtacaatagccctgtgaaggtgattacagtgttatccccatttcacagatgaggaaaccaagacccagaaaagttgagggatagccctaaaaccacatcataggtggcactactggagtatatgctgaggtctgtctgactgcagagtattgagataaatcagagtgttcagcatactcagagctaaaagtcgctcctcctcctccatcagtggttctttgcttccttctctctttatagcatcacattagttgttctcacgctgctaataaagacacacccaagactgggtaatttataaaggaaaggaggtttaatggactcacagttccaaatggctgaggaggccttgcaatcatggtggaagatgaaggaggagcaaaggcacatcttacgtgttggcaggcaggagagatcatgtgcaggggaactgccctgtataacaccatcagatctcatgagacttactcactatcacaagaacagcactggaaaaactcacccccatgattcgattacctcccaccaggtccctcccatgacacatggggattatgggaactatgattcaagaagagtgtggggacacagctaaaccatatcaagcaccacactgcatttcagagtgagggcatggaagtcaagccagggcctctggggaagatatggcctgagctgagatttggaaacaaatgaataaaaacctggaaacaagagcaatctggacagaggaactctcagctgacctccaggagactcagcctccaggcctcaggaagtagctggcagacagaggcaagcgagcaaacagagtcaccacaggggtagcctttggagccagactgcctgagttcaaatgctggttcagcccttttttagctcagtgacgttgggtgcatcacttaacctctctgattcttcacctgtaaaatgtggctaataagtactacttcccttatgggttgaaatagggattgaataagttcatgtattgagactgtttagaatagtgtctggcacatgccctgtgtgtgtattcctctacagaacctccaggctccaggtacagcctagatgtaaggaaaagaaaaacaaaaatttgaagcttgtctgtggtgcttattatagagaacatttacatgtgctcagaaaatgtaatgtgatgctataaaaagggaaggaagcagaaaaccatttaatggaggagggacatgggcttttggccttcaattttcttgtcaagcatagttgtgcttctcagctttcagttatcatctagaattgtgaggcaaaatgtgctttttatttattgtctatttctttatgacatctttacttggtgttaaaatataatggcctgtctcaaatcaggtgaaaaagcagaggaagataaaatacaaagaaacacattcagtgagactctcggttttctcctcttcctctttgatgctgtaaaatgttttcagagataaatgtcagataaatgctgcagcatcctcatttacccacacagcgtttatcgctcatccaccaactcaaattacctttctccaagagcggtattcagtaagagaatccaagagaagtaaaagtgagagaaaaatacttcggtaaatcagttctcatgatttactttttgtctccatattccctggcctttctttcctttatctgttatcccaaagtcacatttccagccctgtttccaaaccaaaccccatgcttggactactctttctcgaggccaattttttctcttcctctcattatttgaacaactcctgagaattcatttccttgaagaaaaacatttagcaaattccacatcataaattaccatgaccctcacatacctgtgtaccagccactcaccggatccctgggctacagaagtgatgattcagccctttgtcctgaatgagctcatggtcttacatggaaggaaaggcatgcagaaggaggttgaccttgcctttctctggcatacactcacattcatttccttgatgctcttgcttccccactatactgtaagcttctcaaggacaaggattttatctgttttgtttaccactgtataatttgtaccttaaaagagtatcctcagtaaacatttgacgaacaaatgaaaaaaaaatgacaatatggaatgatcagtaaattgatgtgcttgcaaaataagaaatagcacaaaggaaggagtaactgaatgctttgggggacagaagtgtagttggaggggtggggagacttgctggaggaggtgacttctgagctgagtgttggggaaaatgcctacatttatatgcctttgcatgatgtccagcttataggaggtgcccaaggaaagtttgcagggttgataaactttataatttatgaaggagttacatatacagtatctctaatattctaccattttttgcattcgtaaaaaggggaaacatggccatttcatgctggattatgtaaacctggaagctctatctgctacctagaaaacctcttagtagggtacaagcacctactggaaagccgtgtgtgtgtgtgtgcgcacacacacatacacacacatacctgcacatgcacccttgacaaagtagagactggctagggcacttgctgggaggcaaatcaatcttaagtgtgtgctttagaagaaagatcctattcacgaaagaacatggaaaaggtaaggacagaggtgatttccagagactggcctctcacctcacctgtgagccagaccacagctcattacctaactcctatatccaccacccaagccagttttatatcttaaaatttctgaaaatccattgattatgccatgggagagcctgaggtaggagagaagaggagagaaaaacaaaatgaatttttagttgaattaatataatgagcttactgagaaaaaacaagatacaagacctagacttgctattagtttatttttaggtttcttaactttgtttagctccagctccttcctagcatgaacgatgttgatgctgaaaaccaaaactactcatacctatgagcctactatcctggtgtgatctctggctccctcaggctgttccagacacaccctgtctatgactgactgaagacatctgcatctgagcaacaccaaattataacaaaaattagatccttcacctccgattaattctcaacttgtatttttaatatatgtatgcagcttcatcatacacaacaaagaaacgttcttcaacaatgccacaagaagtagaatcgtgcatcacattttacaaagaataaaatatgaagaaggaaaaaacaagattggtaagtagtatgttagtataacaaactacatttggcatttgggaattacagacttcttcccttggttttattaagtttgtatcaattctagcaatgcttgtcacttataaaacccctaactaatcctttgatgaataattcacaagtgtaaaatcttcgtcgcatccttaaatatcttctttaaatagcatgttgtctcatttgtctaagatcatggagaaattctctcattttagaaaatgttgtgtgccaggcactgaactagatgttggggagatatgcatagttctgatctggagcttgtgttcaagaaattaaaagcagacaataaaccaataagtaaatacaataacatgaagaaattaaactggatgatgatacagagataggctggtaaaaggtgggagtgagttcaagctgagatttgatgatgagggcaagcttcactgagaagctgaaatttgaactgagacctgaatgctggggaaccagtgtgggaagatcgaggggtagggtgttcccatgcagagggagctgtaagcacggagatgagctgtcccacaaaagcaacttctccagtcatctcctccattaaatagcctctaccatatatattttaggcatttttatgagaatgtgtccatattatattacacatttcctgccttattaaacagattattatatatcaggaagggttgggtggctttgttcttatctctttttccagcaagttttttatcaatagttttaataatgacctatatcagtcagggtctaatcaggagacaaaggcacaagtaaattgaacagagaaagttttatataaataattaactgtgacaggggattggagtaatggagggttggctagtcaagggtaagaataactctaaagaatacaggaatagcagatgttaggagcagctaccacctctgagaagactcctcgctacaatgctaagctgcagatcctgctggaagaggtacagccatggcagtgcagtttgctgggggctctagaaatctgccctctggagtactgggggaagctgcctcgagtggctccaaggaagtcattctttgggagttgctacatcagcagcactactctgtgaagccccccaaggggatactgaaaatctgcctttgaggagtaccatgtgtttccagccaccacgcactgcaggagctgggtactgtagaagtatgtgctacagaagcctgctgagatatcatactggtatcaggaagagaaaccccttcctcctccagtgtccctcccagtgtcttctgctggcaaagcttaacattgaatcagctgacaaaggagaaatagttacaatagttacattattgcaaagcaggcaatgaaggtgcatttggagctgaggggaaataagttaatatctggtgcatagcccagatgacctgctcatcaagctttcgggtagggtgaaactagaaggttgcattaaatgacaagactcagtagctggcactcagccaaatccagcaagatgacatttaataattttgcgttgaccatttctaatgtgtattttcttttcctttcagtcttttaaaaaatatttactaattcagtgaaaatgttatttaaacatacatttggttattaatgagatttgagatttttcaaatgcttattttattcatttacatttgttcgaatagaaaaggaagtacataaaattttacattaatatcactgtaaaaaattaaaaaaataatttttaaggtaaagtcttacagtcaaattcagcaaaacaactaccttggtacagtgtgggagaaatgttgctcaacatcataagaggaacagatttgagagttgagctgaatgcaagcttggtgtgagtcactagcataatgactctgccaaaaaaaaaaaaaaaaaaacacctactttgatcccaagctgcataaattaaaatataacatggagaaatagatagctttctagtccagatctgattacaactggaatattatgttttgtgagagtcaatgtatgggggtatggtgaagtcaaacctgatttaggtctttcttaactttgatggattttagttaaacacattcccatttctctgcattagtcatccttccttgaaacacattccttcaataaagtcctctgtgaccattccagcttgaatgaattcttctctcttctgaattcctatggcaactatttttggagtctatttgatagttagtcatatacaactcttcttttgttgtcttgaactacattcaataacattatgaaaatctaccacataaagagaaccactcataacatttgcgtactgaataatttaaatgttaccttagttacttttatatcttaatttcttattcattcatatggtttttagaaacaaacttaggatgtgctatgcatcctttttacgaacttttttcagttaacattgtaccataaacatactagaaagcaagtgagtgaaagtgaagttattattgcagtagctgttctgaatcacttcataaaatgcaaataactccaaatggcatcttcactaataatggtattatcatttgcagtacaacttatgactcttttttttttgttgagacggagtctcggactgtcacccaggctggagtgcaatggcaagatctcagctcactgcaatctctgcctcccaggttcaagtgattctcctgcctcagcctcctgagtaactgggattacaggtgcccgccaccatgcccggctaattttttgtatttttagtggagacggggtttcactatgttggccaggctgatctcaaactcctgatcttgtgatccgcctgcctcggcctctcaaaacgactctttatgagacactagtgtattaagaatctgcagctgaatgctgctcatctggataataagatccttaactgtaaataaactgccttatttatctttatatcatcactgcctagcacagtgcctggcatatagtaggagttcaataaaggcgtgctgaactgaaaagcttttaaattattgtgcctaattttgcgtctcaaaatgtgggatgcttttataagcaaaagaaggacagagacagtgatttttaaatgttctgaagaagcacaggaagtgtagtattgttgctagtcagaaagggtctttataaaagtttctttcatttgatgaaataaggagttttctattcaaagacctccatgtgttgaaaattggtaataggccaggcacattggctcatgcctggaatcccagaactttgggaggctgaggcaggaggattgcttgagcccaagagtctgaaaccagcctgagcataatggtgaaaccccatctctacaaaaaatacaaaaagttacccaggcgtggtggtcagtacctatagtcccagccatcaggaggctgagatgggaggattacttctgggaggtcaaggcggcagtgagctgagattgtgccactgctctccagcctgggcaacagaacaggagtctgtcacaacaaagaaaaagaaaataataaaagaaaattggtaatgatgaactggaatcatatctaattagaaataaccaatcagatagtaaattattaagccacaaccaagcattatgctgaaaaacatggagcaaaactactaatggcctgtagattcaatatttcattatcatctttggttttgtaaataaaagaaataatatgttagaagaaattttaatttcttgatagaactaatgtttatccagtattattttctgcctgaaactctttctgaaagtggcatcttgcatgagccaacatcgattagaaataacatgaaaatactgatttgtagacatgattcataaggatattttagtggaatgtaaactgccactatgtacatttttcaacttcactctgaatttatttcaactgtaaaaatcaaacctggtgaaacccactttcaaaatagagccatttaatagctcaacaaagatttatttaacaatgtgggtgcatacaataaatcttgaaattgatttgtatttttgaatttggtgcttagaggagaaattagtaaagtgaaaaagatttcaaatattggctactttctcactttgcaggactttgataaattatgataaacttataaaagttatcatctgaggccaggcacggtggctcatgcctataatcccagcactttgggaggccaaggcaggtggatcagttgaggtcaggagttcgagatcagcctgaccaacgtggtaaaactccatctctactaaaaatacaaaaattagctgagcatggtggcactcacctgtaatcccagctacttgggaagctgaggcacgagaattgcttgaacccgggaggcagaggttgcagtgagccgagatcgcaccactgcattccagcctgggcaacagagtgagactctgtctcaaaaaaaaaaaaagttatcatgtgagtctcttattaggtccttatgaatcctattttttctaacatctgggatgtttgaaagttattgatgagatatgtagaattcccaatagagactccagggaatcaaagctttctacatagtaattcattacaaaggtatttattgagggcctctggtgcgctagacaaactataaagccttgtgatatttggatttcaaatgtttttcttagatatttagtattaatgtgaagcatcttaaaacatattaatgtgttactatgattaaaagcatctaaatattgattgatcctccatcaatgaaaagtgaatcagtgcatgtgccattttccagttaggctaaacctctagattctggtaaggatctaaagcataggtagcattcctctcaagccacttgagaaattatgataatctcctttgaggtgtattttaggaagtagcagaaatcttgatctgaaaggagctttaaagatcaacatgttaaacttccacttctggccaagatggagcaacaggcacaagatttactctcccacctgaaacaatcacaaaagaaaaaacagacaaaatgtatgaaacaactattttcaagacactgaatattgggcaacccaaaacaaggatctctgagagacagaaaacaaatgaaatgagccctgctgggccctatcttaccaccttgacatagtttctagacagcaccatgaaaagtgagaatgtaggcaggacctgaaagactctctaagttgagaagttgttgctaggagttgggaaacaaaggcagcgagagttcacagaaagaagtaccggaaggcagcgagagttcacagaaggaagtaccagaaagcagagaactgcacagggctagaaccttgaagatctgtagagggtctccctcaagtattcagcaagtgctgatcagtgcatacatgtccggagaatacccaaggccagagaaagaaccatccaaaagaatttccagtaagactggaacacctcataattcacagagcagtgaggagaatactcagaaaagtctttcctcctgcaaacataaagaaaatttagcaaataaagtttaacaatgtataacaagggtaatacatcatgaccaagtagaatttatcctggactgcaaggttggcttagtatatgaaaatcaatcaatataattcaccatagtagcaaactaaaaaagaaaaaccatatgttcatatttatgaacatgggaaaagcatttcacaaagttcaacatccattacagataaaaactcagcaaactactaatagaaattatcttcctcaacctcataaaatacatctatgaaatgcttatagttaaaattatgcttaatgataaaagactgaatattttcctcccaagataatgaacgggacaagtatgtctgcacttgccacttgtattcattttactatccagtgcaataaaataaaaagaattaaaactgtcctaattatcagatgacatgatcacctataaagaaactcacaatggaatccattaaaagggactaataggtgaatgtagctaggttgcaaaaaatgagattgatataaaaactcaattgtatttctctcaatctgcaacaaacagtgagaaactgagattttaaaaaccaaatcacttataattagcccccaaatatgaaatattaaatacttaaggataaatcaaacaaaagatacttaagaattgtacactgaaaactacaaaacattgctgagataaatttaagaagacccaataaatggagacatatactatgtttatgagtcagaagactcaatattgttaagaggtcagtcttaacaaattgatctatagattcagcacaatccagtcaaattcccagaaggtgttttgtgtgtgtatatgtgaaaattgacaaatgaattcaaaaattcatagggaaatgaaaggacctagaatagccaaaacaactctgaaaaagaacaaaaagtcaagtctttgacttgagacaaagggtcgaagtcaattcagtgggtaaagaattgacttttcaacatatgatactgaattcaaacccatatgcaaaaaaatgaatttaggaaaactcgtatacaaaagttaactcaaatggattatagttcaaagtgtaaaatttaaaaccataaaaattctaggagaaaatagaaaatctttgttaccttgggttaaccaagggtttcttaaataaaagcataattcataaaagaagaaaaaaatggataacctagacttcaaaattaaaacttcccttttcaaatgatgttttcaagagaatgaaaagaagggtggggccaagatggctgactagaaacagaagtgatcagaggctcccatcaaaaagaaccatcattaatgtgtgaatccttcattggcaaccaaggtatcttctcatcagaactgactaggtggctagacttgatccacagagaggaaggaagagcagtgtggtgcggcagcccgtctgagagccacacggggcaggggagcccccactccccagccaagggaggcagtgagtgagtgtggtacccagcgtgggaaaccgtgcttttttccatgggactgtgcaacccacggattagaagatcccactcaggaacccacgccactgggacctagaatgccaaccccagagctgcacagattctcaacaacctctcagctggaatctgcctaaccctgcagagctcctgcggggaggggtgaccagtgccacagctgctgctgcctgctgcctaagccatttgagctccttgggggaggggcagcagccagcactgggactcataactgcctgataagctaagctctctgtgggggaaaggatggcatccatctctataactccaggccatgcttttcccctgctggagccagggaggctggatggcttggtccccaagagtggtcccccacagctcaacacactggctgtggcagactgcaacaagagcgcctcttcaggcactgacatatccttcctcacttcctatatggtggggcttccctacaggaactccaataactccagccagagactcagggacagaacctggatctccctgggccttatcccctagtgggaggagtggctgcagtctctgcagaccagcagacttagcccagaatgccacccagcaaggcacactccctccaccaagagacagtgaaaatgcttcattaaatgggtcccatttcccttgtcacccaaataggtaagaccttccaacaggggttgtcagataccctatacaggagtgatcctactggcatcaggttggagcccctccgggttagagatcccagaagaaggagcaggcacccatctttgccttctccagcctgcttgagtgacatctccaggtgcgggagcgaaccagataaatagggcctaaagtgaacccccagcaaaccacagcagccctacagaggagggacctgaccagtgaaagaaaaacaaacagaaagcaacaacaacagcatcaataacaaaagaagtcctcacaaaaaccccatccagtggtcagctgcctcaaagatcgaaactagacaaactcacaaagatgagaaagaatcaatgaaaaaatgctgaaaacccaaaaggacagagtttctcttcccctccaaatgattgcaatgactctctggcaagggcataattgggtgaaggatgagatggacaaattgacataagtaggcttcagaagatgggtaacaaaaaactccactgagctctaggagcatgttctaacccaatgcaaagaagctaagaaccttgaaaaaaggttacaggagctgataactagagagagtttagaggggaacataaatgacccgatggagctgaaaaacacagcacaagaactttgtgaagcatacacaagtatcagtagctgaattgaccaagaggaagaaaggatatcagagtttgaagaccacctcactgaaataaggcatgcagacaagattagagaaaaaagaataaaaaggaacaaacaaaacctccaagaaatatgggacttcataaaaagaccaaacctacaattgattggagtaccacctgaagcagacgtgaagaatggaaacaaactggaaaacaaacttcaggatattatccaggagaatttccctaacctaggaagacaggccaatatgcaaattcagaaaatacagagaacaccactaaagtactccacaagaagatcaaccccaagaaacataatcatcagattgtccaaggccaaaattaaggaaaaagtgttaagggcagccagagaggaaggtcaggtcacctgcaaagaaaagcccatcagactaacaatgcacctctcagcagaaactccacaagtcagaagagattgggggccagtattcaacattcttaaagaaaataattttcaacacagaattttatatccagccaaactaagcatcataagcgaaagagaaataaaatcctttccagacaagcaaatgctgagggattttgttacccccacgctggccttgcaagagctcctgaaagaagcactaaatatgcaaaggaaaaactggtactagccactgcaaaaatacaccaaaatataaagaccaatgacactatgaagaaactgcatcaactagtatgcaaaataaccagatagcatcatgatgacaggatcgaattcacacataacaatactaaccttacatgtaaatgggcaaaatgccccaattaaaagacagacaggaaattggataaagactaaagacccattggtgtgctgtattcaggagacccatctcatgtgcaaagacccccataggctcaaaataaaggatggaggaaaatttaccaagcaaatggaaagcaaaaaaaatgcaggggttgcaaacctcatctctgacaaaacagactttaaaccaatgaagatcaaaaaagacaaggtcattaaataatgataaagagaacaattcaacaagaagaactaactgttggctgggcatggtggctcaaacctataatcccagcactttgggaggatgaggtgggtggatcacgaggtcaggaaatcaagaccatcctggccaacatggtgaaaccccatctctactaaaaatacaaaaattagctgggtatggtggcatgtccctgtaatcccagctactcgggaggctgaggcaggagaattgcttgagcccgggagacagagattgcagtgagcctagatcacaccactgaactccaacctcgtgaaagagcaagtctccgtctaaaaaaaaaaaaaaagagctaactattctaaatttatatgcacccaatacagaagcacccagattcataaaacaagttcttagagacctacaaagagacttagactcccatacaataatagtgggagactttaacactccaccatcaatattagacagatcaacaaggcagaaaattaacaaggatattcaggacttgaactcagctctggatcaagtggacctaatagacatctacagaactctccaccccaaatcaatagaatatacattctcagtgctacatggcacttattctaaaattgaccacataattggaagtaaaacactcctcagcaaatgcaaaaaaactgaaatgataacaaacagtctctcagactacagtgcaatcaaattagaactcaggattaagaaacttattaaaaaccacacaattacatggaaattgaacaactcgctcctgaatgactcctggttaaataatgaaattaaggcagaaataaagaagttctttgaaaccaatgagaacaaagagacaacataccagaatctctgggatacagctaaagcagtgttaagagggaaatgtatagcactaaattgcccacatcagaaagctagaaagatctcaaattgatacactaacatcacaattaaaagagctagagaggcaagagcaaactaatccaaaagctagcaggagacaagcaataactaagatcagagcaaaattgaaggagatagagacacaaaaaccctccaaaaccaggaactgtttttttgaaaaaaataagaaataccactagctagactaataaagaagaaaagagagaagaatcccataaaaaatgataaaggggagatcaccactgacctcacagaaatacaaactactaacacctctatgcaaataaactagaaaatctagaagaaatggataaattcctggacgcagacactctcccaaggctcaaccaggaagaagttgaatccctgaatagaccagtaacaagttctgaaattgaggcagtaattagtagcctacccaccaaaaaaagcccaggaccagacaggttcacagccgaattctaccagaggtacaaagagaagctggtaccattccttctgaaactattccaaacaatagaaaaagagggactcctccctaactcattttatgaggccagatcatcctgataccaaaacctagcagagacacaacaaaaaatagagaatttcaggccaatattcctgatgaatatcgatgcgaaaatcctcaataaaatactggcaaaccgaatacagcagcacatcaaaaagcttagccaccacaatcaagtcagcttcacacctgggatgcaaggctggttcaacatacataaatcaataaatgtaatccctcacataaacggaaccaaagacaaaaagcacgtgattatctcaatagatgcagaaaaggccttcaataaaattcaacagcccttcatgctaaaaactctcaataaactaggtgtcgattgaacatatctcaaaataataaaaactatgacaaacccacagccaatattatattgaatgggcaaaagctggaaacattccctttgaaaaccagtacaagacaaggatgccctctctcaccactcttactcatcatagtattggaagttctggccaggacaatcaggcaagagaaagaaataaagtgtattcaaataggaagagtagaagtcaaactctctctgtttgcagatgacatgattgtatatatagaaaactccatgatctcagccaaaaatttccttaagctgacaagcaacttcagcaaagtctcaggatacaaaatgaatgtgaaaaaatcacaggcattcctttacatcaacagtagacaagcagagagccaaatcatgaattaattcccactcacaatcactacaaagagaataaaatgcctaggaatacagctaacaagggatgtgaaagacttcttcaaggataactacaaaccactgctcaaggaaatcagagaggacacaaacaaatggaaaaacattccatcctcatggacaggaaaaatcaatattgtaaaaatgttcatactgcccaaagtaatttatagattcaatgctattcccatcaaactaccattgacattcttcacagaattagaaaaagctactttaaatttcatatggaatcaaagaagaccgcatacagccaagacaatcgtaaccaaaaagaacaagctggaggcatcatgctacctgacttcaaactatactacaaggctgcagtaaccaaaacagcatgataatggtaccaaaacagacacatagaccaatggaacagaacagagacctcagaaataacaccacacatctacaaccatccgatcttcagcaaacctgacagaaacaagcaatggggaaaggatctcctattcaataaatggtgctgggaaaacgggctagccatatgcagaaaattgaaactggaccgcttgcttacgtcttatacaaaaattaactcaaagcaatggcaacaaaagccacaattaaaaaatgggatctaattaaactaaagagcttctgcacagcaaaagaaactaccatcagagtgaacaggcaacccacaaagtgggagaaaattttctcaacctactcatctgacagagggctaatatccagaatctacaatgaactcaaacaaatttacaaggaaaaaacaaacaaccccatcaaaaagtgggtgaaggacatgaacagacacttctcaaaagaagacatttatgcagccaaaaaacacatgaaaaaatgctcaccatcactggccatcagagaaatgcaaatcaaaaccacaatgagatatcatctcacaccagttagaatggcaatcattaaaaagtcaggaaacaacaggtgctggagaggatgtggagaaataggaacacttttacactgttggtgggactgtaaactagttcaacccttgtggaagtcagtgtggcgattcctcagggatctagaactagaaataccatttgacccagccatcccattactgggtatatacccaaaggactataaatcatgctgctataagacacatgcacacgtatgtttattgcggcactattcacaatagcaaagacttggaaccaacctaaatgtccaacagtggtagactgggttaagaaaatgtggcacatatacaccatggaatactatgcagccataaaaaatgatgagttcatgtcctttgtagggacatgaatgaaattggaaatcatcattctcagtaaactatcgcaagaacaaaaaaccaaacaccgcatattctcactcataggtgggaattgaacaatgagaacacatggactcaggaaggggaacatcacactctggggactgttgtggggtgggggaaggggggagggatagcattgggagatacacctaatgctagatgacgagctagtgggtgcagcacaccagcatgtcacatgtatatatatgtaactgacctgcacaatgtgcacatgtaccctaaaacttaaagtataataataataataataaaaattaactcaagatggattaaagacttaaatgtaaaaccccaaaccataaaaaccctagaagaaaacctaggcaataccattcaggacataggcatgggcaaagtcttcatgacaaaaacgccaaaagcaattgcaagaaaagccaaaactgacaaatgagttctaattaaactaaagagcttctgcacagcaaaagaaactatcatcagagtgaacagacaatctacagagcgggagaaattttttgcaatctagccatctgacagaaatcgaatatccagaatttacaagcaacttaaagaaatttacaagagaaaaaacaaccccatgaaaaagtgggcaaaggatataaacagagacttctcaaaagaagacatacatgcagccaacaaacatatgaagaaagctcaacatcactgattattagagaaatgcaaatcaaaaccgtaatgagataccatctaacaccagtcagaatggcgattatttaaaagtcaagaaacaatagatgctggtgaggctgtggagaaataggaacacttttacactgttcttgggagtgtaaattaccccagccattgtggaagacagtgtggggattcctcaagtatctagaaccagaaataccatttgacccagcaatcccattactgggtgtatacctaaaggaatataaagcattctactgtaaagacacatgcacacatatgtttactgcagcactgttcacaatagcaaagttgtggaacctactcaaatgcccatcaatgatagagtggataaagaaaatgtggtacatatccactatggaatattatacatccataaaaaggaatgagattatgtcctatgcagggacatgtatgaagctggataccatcatcctcagcaaactaagacaggaacagaaaaccaaacactgcatgccctcactcataagcaggaattgaacaatgagaacctatggacacagggatggaaacaacacacaataggcctgttggggagtaggagggtgaggggatggaagttagaggacaggtcaataggagcagcaaaccaccatggcacacgtatacctatgtaacaaacctgcacatctgcacatgtatcccaaaacttaaatacataaatagaatgataagagaagccacacattaggagaaaaaagttttcaaaaaatatggctagtaaaggacatctatatcttgcctctagaatacataaagaacactcaaaactcagtgaatccaaaaatcttattgagcataagatatgaacagacatttcacaagagaagatatacagatggcaaacagcacacaagatgattttaaatattattcattaaaaaatgagaattaaacacgatgagatatcacaacacacccatgagagtggctaaaatttaaaagactgaccataccatgtggaggaccttgaactctcatatgctgctgatggaaatgtaaaattgtacaaccacttaagaaaacagtgtggcagtttttcaaaaagttaaatgttcatctactatatgatctagtggaatcacttctaggtatttgctaagaaagttaaagcatatattgatgcaaagttttgtatatggatgttcataacagcttaatttgtaatagcccccaaactataaaggacccaaatgtctatcatcaggagaatagataaacaaattattacatgtgatggaatactactcagcaataaaaagaaatgagctactgatatttgcaacaacatgaatgaatctcaaattatgttgagtgatgaaaaagagtaaatgttatatgattccatttatataaaactctggaaatttcaaactaattgatagtgacagaaagcagatcagtgtttgccctggagatagcacggggaagggtggcagattagaatgtggcatgataaaactttggaggcaatggatatgtttagattcttagtcgtactgatggtcttatgagtatatacttatgtcgaaacatctaattaaacaacttatgctgtctattgtatgattgttatacctcagtaaagctgtttttaaaaagatctgcgcatcccttcccattttatggatgaggaaattgagtcctgaggacaagagaacttttccaaagtcataccactagtccaatgcagaggcattaggtttgtccataatgaagcttctgaatgaaaatagaagagctcctggtgtaattccagggagctgaaggccattatcctaggtgaattaatgcagtaatagaaaaaccaaacaccacatgttctcacttataagtgggagttaaacattgagtacacatggacaaagaagggaacaggagacactggggcctacttgagggtggagggtgagaggaggatgaggattggaaaactacctgtcagtactatgctcattacctgggtgacataataattacaccaaatcccccaacacacaatttacccatgtcacaaacctgcacgtgtactccctgaacctaaaataaaagttagaaggaaaaaaatgttaaaagttaaaatgggcagagaaactgaatagacatttttccatataaaacacacaaatggccaacaggtatatgaaaaggtgctcaatatcactaatcatcagagatatgcaaatcaaaaccacggtgaagtatcatctcacacccgttagaatggctcttatcaaaaagtggtaagtgttggcaagtgtgtggagaaaaggaaacacttgtgcgctgttagtaggaatgtaaattggttcagctgtgatgaaaaacaatatagaggttctttaaaaaataaaaaatgaactaccgtatgatacagcaatcctacttttgggtacatatcccaaggaattgaaatcagtatcttgaagagatatctgcacgtccatgttcattgcagcattatttacaatagccaagatatgaaaacaacccaagtgtcccctgatggaagaatggataaaggaattgtggtacatatatacaatggaatattgttcaaccataaaaaagaagaaaatcctgccatttgcaacatggatgaacttggaaggcatcatgctaggtgaaataaaccagacacagaaagacaaatactgcatgatctcacttatgtgtagaatcttaaaaagccaaactcttagaaacagagagtagaatagtggttgccaggccctggggatggggaacatggggaggtgttgatcaaagagtataaagtttcatttataaaatgaatgagttctggggatctaatgtacagcatgggtggagatagatgtgttaattaatgtgattgtggtaatcattacataatgtatatgcatatcaagtcatcacattataaactttgaatagattcgatctttatttgacggtcaaatattttaatttttttagtgaatttcccagcccttgatcccaatttcacggcagcagagctttttttctaactcttggtgcccctaagagggttgatagcctagattgtttcctccaaaaagcaccacacttatatttgttttgaacattgtgagtattcaaactctgtattaattcaaatggacttatttgctgttttaggtctgaatcgtttgcttaccaatggctcctatgaagctgcgtttcccctgcatgaggtattgtgctgtctttaatctttatctttctttcaatcgtttgttactaaagtcagcttctagagatagtcaataattgaatttgttgacatttgctcagaatgaatttaatttgttcaatgggtaattagggagggtctacttcaattgttatatctcttcctcagcatagacttatttctatatatcttttcatgtaattgcgagaatacttaaatcaatagtcatgcagcatgaattcataggaatggcttagagactttaagtcttaaaattaaaaaggcattgacaatttgcatgaggcaccaaatccacaagaagaatgttcttgaaatatatagtctttgcaacaaataaatgtatagctattgcttaaaagagtgggaggaagccatcttgaaaagtctctggtaaccaacgggtgacaaataaaaattaataatgttgtactcatcattgttcacctaagatgtataaatactgtgactctatttcctacatagtctccatcatataaattactttcgcaagtgtaactgattaccccagctctactttccacagaattatttaatccagaattcccctacacctgggtttttaggaacataatccctcatgattattgagaaattattgtcattttcatggtgtggcacccctactgtggtcactatatggcacagagaatacaaagataaatgtcatagcctctgtcctctgggacctcacaaagtagccaatgtgcagcaactgttagctgatgttcagtacagcctgttggaaacaatggtaataatttgtcaatagactttggaagacggttccaactctccgtaaatggcaagtctttccaaaacatacttttttttggcttacagtggtacttctcttaattttaaacactaagagggtgcaaaagatgaggtagatttttcagaactttatttattaagaaaaccagaagctgccatctgaaactctgtttagactgccaggaaatgtgtttggaatgctccatttactatgacagaagcaaacattttgacacaaaggtttgctagagccatacgcaggtgtttctgaactctaaagacatactgttccccaaaacatcatgtggcttcatcatgtcattgttagttggcattgcccagaaaagggttttgtgagaactgcatcctccctgctctcagccccagctcatggtatgggctgtgtctgatatggtaagtggcagaagcgtctgtgcaggggagtgggtgggtgggcatgggagtgtctgaggagatgcagctacaaagccccacagagtgactcatgcctttcacaatgactttcctatctcagtaaagccctgtattctatgagaagttccaaattggtaatagcagcagcaatcattgcatcattgcttttctgactttttactctcagtttaacttgattatattatttaacctcagaggcaaaaaggcagaaggtcagatattgctgctcttgtttcacgttaaagatttagatagaggtttagagaaaggtgaaacctccttaagtcacacaatgagttggtggttgatctgagactcacctgagtttctttctcctagccctgtgttctttccattaagaaaggacttcttatcaggtgtggtggctcaggcctgtaaccccagcactttgggaggccaaggtggaagtattgcttgagttcaggagttcgagaccagcctgggcaacatattgagacattgtctctagcaaaaataaataaataaataaataagaaagggcttctccacttaatatgaataattagcttgcctccagaaagtaccgtttctctttgtgaaactatcattgccacaaactaacctcagaaaaacatgcacttctctggccctttgtctcctcacttcttcaatgaggaggttgaattaaatttgaattacaagaattctgaagtgacttccagcttttacattctagaattttcttgtcgataacattgtgacaaggttacaactatggctgtttaccaactatcctatcttgaaagaagtgggaagagaggccaggcacagtggctcacacctgtaatcccagcacattgggaggccgagggggacagatcgcttgagtctaggaattcgagactagcctgggcaatatggcaaaaccccatctctacaaaaaatacaaaagttagccgtgcatggtggcacatgcctatggtcccagctacttgggaggctgaggtgggaggattgcttgagcctgggagtcggaggttgcagtgagctgagattgcgccactgcactccagcctgggcaacagagtgaaacccagtctcaaaaaataaacaaataaataaataaaaagaagtagggaagagaactaataagccttgggcatggcccctgggccagacactttattcattcaaaccacataagaaaccaaatgggacaaatattagttccactatggattaggaaaccaaagctcagagcatttagggaacttgcccaggatcttctagctgaaaagtagcagaattgaatttgaactcagttcaaaccttcctgattatagcaagcacgtgcattttactagatatcagcagtagcaagacaatgtccagaataactcatcaaactgcctgccctttaatagagaggattcatttctttctcataccactcctatcacaacacctgctgtaagacacttacattaccatcagcatttccttgtgacttttgtgagtactacctcactggcagtggtgtttttatcccagggaagttatagaagtaaaaactccattcgaacccatggagcagaaaaccaccgacatctactctatgagtgctgggcctcctggggcgtgtggtataaataccaacctttggatcttgtaaggtgagtttttaatcagctgcaaatataaagcttgcacagaatgattagggcagactgtcagctgggacaagctcccaatgaagcaaaaagagcctgaagtgtacagctctcactcatatctggcttcttcacaagaggaaactcatctgaggacatcagctgttcttggtaaacctaccatcgctctgatgaggatggaatttcccccaaaaagagtcttagagaggggcccaggaatgggcatgtgagatcagccaggcctgtcacaagacttcgtaagaagcgagtcacccatgtgagtcttattgacaaaccatcttgtacaaaggtaacactgcttacatatattactgacaaagtaaaatatttactactgttagcaaataggacaaatggagtactgtcattccaatacatttcaggcttagttttcattcagaactaataacctttaaagattgttttaatctgcagatcaaaaagtatatcagcttttaacctatgataattgtgaagtggaaatgtatgtttttttattattattatactttaagttctgggttacatgtgcagaacatgcagttttgttacataggtatacatgtgccatggtggtttgctgcacccatcaacccgtcacctactttaggtatttctcctaatgttatccctcccctagccccccaccccccataggccctggtgtgtgatgttcccctccctgtgtccatgtgttctcattgttcaactcccacttatgagtgagaacatgtggtgtttggttttctgatcttatgatagtttgccgagaatgatggtttccagcttcatccatgtccctgcaaaggacatgaactcatcctttttttggctgcatagtatcccatggtgtatgtgtgtgtaaatatatgtgtgtgtttttttttaactatctatatcttcccaaccttctgccttggcagcattattctctgacatctctatttatttagaggctggttattaagattgggtaataacaacccacatttcctggattccttattaaagagaaagtcatgtctcatttcctagactagctagatgtgttgtttcacttaaataccagggccataaaataaaatgagcccagaggggaggacaaacaaaagacaatgcactttatatttgagcccttatcaccaagtgttccaagggcattgatgaattgtgatccattccttgtgttggtaacagataatccagataatcttagtgaatggaaaatattttctgagataagatcattttcctttggtcagactcagtgtatgataaacagtggggggaaaaacaaaagtaaattctcttcccagcctcggtgccatgttacaggattacattgattagaaatcacagataattgctgtaggcagcacatttcccattcatgacagtattttgattaagattttgcggttttggttagtcaatgcatattaattaactgtctattgtgtatctagtactgtgctaagtactattggcaaagccaaacagacgccaaatggtctctggctctgaaaaactcagttttcctcagcaacacaggccctgcatacttgaaacatcgagaaaagaaaatacaaggccatgcataattaggtaaaatgtgtgacagaggccataagttttacagtaattcagaaaaatggaaagaacggatgtggcagcacccctgtggaagtctctggagagctgagccctgaagaacagtggcatttatgttgggcaaataaagggggatgaaaagcacaaccaagccttgagtagaatgaaagttgtggagcatctagggaatgtcatctcttagacagttcctatcctataggttttacttccaccatatctctcgaatcgggccccacctcagcatctccactgccttcacttgttacctggactatgacagctgtgtgcctggttggtctccctttgcccactccggccccttccagtccattctgtcttctcagaataagcttgtatacaaccatgttattttatggaagggctaattctagttctgctatagagtagtagtagaagaaatgtaagcccagatcctagatttgatgggatgttcttttatcttggcttaccttgcttgcagtttacctcgtaaggccgctacaaagtaaaatgactatacgaagtttcataatgcttaactttacacactgcactgtaatttgcaaggccgttgtgtctttaacaggcggtactttggagagaagattgggttatattttgcctggttgggctggtacaccggcatgctcttcccagctgccttcattggattgtttgtctttttgtatggcgtcaccactctggatcacagccaagtcaggtacggggagctcttggatgagtttgcctttgtttagtacttagaggtggctgtttgcactttgggggtattcacagattgtggagacatttagcttttcactcaaacttcctaccctctcatggaaaaactcaaagtttcagttcactaggacctctccatccattgtccttgctgccatggtcttcagataccatgcaagtaaaagttaccttttcagacatacaagccactatatatccacagaacaagccgccttcattcactggctataagtgctctctttttttactttttcactttttttcttagctgatactgcaaaatagtgaactaacaattctctcttatgaattctgtgtttttacaacttgagccagaaagacatctcaccagcttgctagtatcttgggagcggttcagtgtcgatgaccattatcttggttgtctcaccagaatataggtcaaggtactcacagagatcttgttgcaaggctggacaatgatcttaaattgtaaatatgccttttaaatgtgattgcaaaaataaaagtgagtgattaagccttccacctacgaaaacattttactttctggtgaaattgttaatgtgttagttaaatatagttttcccccaggatagggctagaatctctagtcatttatgttttgttttccatattagttttaacttatcatacacatagagatcaagataagtatctttatatatcttcttactcccttaattcagtatgaaattgcttcagacctttgaaaagtgaaggacatttctataatttgggatataacaatcaatgtttggcttcatgtattttcctgagtttaacttattaatacataaagataaggaacagcctcataagtaggtttaccaaattatttaaatgggcaagaacttgtttacattaataacagataaagctaagatgcttctaagggcaaacatttaacctactggatcttatttactagttgaacattctggtgaagttagaaaaaaatgttccatgtcatcaaaaagcagtcctttctgttctcttttccagtaaagaagtctgccaagctacagatatcatcatgtgtcctgtgtgtgataaatactgtccattcatgaggctgtcagacagctgtgtatatgccaaggtaatttcaaactgtagcattttagatgaattgaatttaacatacaccttcctgagggatggtgggtaactctattctgtcatttccagtctttgattttcaagtgaatgttgtaggatagacttatctccatcattcagtattctaattcccatatctttgttaattgtccatgtatttggaaggcatggctctagacatcatccatggagctgcagcatggcacagtgtgaggagcacggtgctggagtcagagaaagttaggtccaaattttgactctgctgtttaccatttctctatctgggaataagatatttaacttctttgagtctcagttttctcatctgcaaaatggagaccatgatgcttgtttcacacggagttaaggtgtatactgagcatagtgcttggtaaatagacctcagtaaatgacagctatcatcatttgcctcctcttcatcatcattattgtcaaaatgacctccaattaaggctagctcagccacttacctctttagccctgaaatgtgccccctttctaagaaactcttttttcatagaaagaagctcagtcttctgagctttcttgtctctaaaatacaggaaatatgtgtcctctctgtcctaccctattggcatgacgtgaggactaaagaagagaatatatgtgaaagtgctatgagaaaaaaaatacatgacaccactatttctattatgtgttattgcatacctctttctcgtgatatgccttactttatttcttagacatattcctcacattcctagagttttttgatacttaggtggtggtgtccataacacaaaacaatagctgaagtttgagtttgcgaagacttttccaagagctactgccttttggcttgcccagattcagatataaatggcattggcagattttatccagcttttgtaatcactgaagcctggatctatctaattactctcttggcattgcagagttttgttcattttaaacaagggaacatttgataggcaacccaggatcccgcctatctataatgtctttagtactgcaggtggccggtctgtgtaggaggagcccagactgcagcagtgagcagtggttttagaaagatttgagctcttatgttgcaagggacaaaaaaagcacaaaatgctctgagccctatctttaggaaacactcagatagacctgagtggataaggataaatttaacagagtgactttaggacatagagatttggtgagcatcaagagctttgtcagtaatataattttgtttaaaggtcagatataagcctgaatgactcaggttttaaaattctgcttctggggaaaccccaaaatcagaagccaatttttttttttaatgtggaaagatatgcttgagtaaaattctctttttaggagatccttaataattcttttaaagaatcgtcatgaatagtttatgagtgctcagattttataggggcttattttgggagttattctccctaacttaagacctagaacaataataattataatagttacagctataataatagctagacaatctacattgattatttctaattctcacagcaacttcaagataggtgttattatttccattttattcagagactcaaagaggtaaaaattactcatgcatggtcatgcagcaataagtagctgggccttggtttattgcactgcaaaacatgccttctttaccactgtgccctgctgagccacaagatgtttagattctgaatttaacatttggccttgcctagaaacttagtaaaatgaaagataaaaagccttagaatgacagaattggagttatacagggtttcctttagaaatatttattagagatgtcagagtgatttcatgggactgtggatacacagaaatattaaatcagattggcgctgggatctagtccaatcagtggctgttctgctgatagggatgctgtatccttgactcttgtgtttgcaagaatcagaaacccaactcctactggcttagtcagaaagtgatgtaatggtacattttgccagaacagatactggggtggctcacgctgtgggatcatgagggcctcacagcctggaactgttcctccagggaccccggtggccctgcccacatgatcattctgtagactagttctctgtacaatagaaaagatggctaccagctgccttggctccaggcttacgttttccttcccttgtctccttaagtggatttttgtgcttattttaaactcctggtctgctgccacactgtgtctatgggaatcttctttggaggggaggggttgttgtcttccccatatatttcattattttggcctgttgggtacttgtcctctggaggcgtcagccactttgagtaagggtcagaggccaaggccaagtttgtcagtcctagtgagttacagagaggacagcgtgccccaggcacgactgagtgctactgctctatcagaggacttttctggtcagtttcatttttaaacctgcttagaacaaagcagaattgggcactttcccttgattgtaatctgccaatgctggggtttaagaggaggtggactatggagtgaatgccccagggcagctatccaggtagcacctgcttttcacccatgtctaacagagcaggactttgagcattccctgatattgctccaggaataccagcacctgtggtgtggcctgcttagctgatttctgagggaggggaaactaattgtccaatggccatttgagggagagaggctagagtagagcttatgtatttctctaacctgtgctctcactctacctggtatctacaacctacctctccccacacaccaccaccatcacacacataccagttcaagataacctcccatctcccctgaggtttctcagggtctttgttttttgtttttgtgttttgttagttcctggaatctactaccttgcttctccaggactgattttggcagaaggtgtcatcagcttaagctaactgactatctcattgggaaccggagcccctataaccttacccctcctcattcatatattgtcaaattgataactgcagcagaaagctgtctgtctccaaatgtttgtgtatcagccccagggcagtattctgattggttctattttgagccatgtgtcccttgggaccagcaggagttacctggagaaaggagaatggaagacagatgatctgggtagccaaaacaatgataactgcagtccattccagaatggacactgatggtgcaagctacactttctagcaactctcagtaaatactctgatagaggctgggcgcggtggctcacgcctgtaatcccagcactttaggaggccgaggcaggcggatcacctgaggtcaggagtttgagaccagcctggccaacatggtgaaaccccatctctacaaaaatacaaaaattagctgggcatgatggcgggtgcctgtaatcgcagctacttgggaggctgagacaggaaaatcacttgaacccaggaggtggaggttgcagtgagccgagattgcgccattgcactccagcctgggtgacagagtcagaatccatctcaaaaacaaacaaacaaacaaacaacaacaaactctgatagatagcacagtccagtcaaataccgctagaaccttcaaggttggtttgatactgagtgcccaatatacagcttaacattccctctggcatatgaaatagattagcttcagacatttgtctcacagtaggtatttgagtgctgcccatctctcctctattcaaagaaagagaaacttctggaataatctgaaatacttcacgttctgatataacatgaaaaacctctttatatttggtgcattctcgaaggaacaataaagtatactttataggtagctataaagtacccccaaaaaaggttattctttatgaacctatcagtcatcatttcaatttgtcatggacattggtattatttatactagaggcaggaatgagcttggcagttttgcagtaaaaatggatatttttgctttcttctgtggtgtttgcaatagaatatattattctagcaataaagtattgctagttgtctttgtgttatgtgcagtaggtaaatatagtgattacccaaggctttaataagggtagagttggatttagttaatggttctgctcttttttataaggctgaaatccagagggcagcccagaaaatgtttgctcaaaactgcataaacaaaatagccatgttttcaaagtgaataaatgaggcattaaaaacagtgcttgggaagttgaaaacctttaaagcagcactaacaataccttcctggtcctaaatataactatatccatacacatatgtacgtgtataagagttttgttgtgcacaaaaggggattcttagtagcactattggggatgctgataaatgttcaactagatgataaccacataaagagaacaaattgtatcctctatatatgaactaccttgcaattagaggaagccttttcttatttatggttcaaaaggaatattccccctacccaaaacaaagcctgtaaaactcattatataatcacagctatttttacagaacttgaaaaaatttgaattggaatatcatatatgagaaattaactcagcaccgattcttattattcacaggtaacccacctttttgacaatggagccactgtcttctttgctgttttcatggcagtctggggtaagtgttctataaccataaaacttgagttttcctcatatgccctatgatatattcctttagaagtttcactttggatgtgaaagaaagaagcttgagtaaatggaattagctttcctattagtagaaagttggtaaataatttattgggtttattttaaacgatattgtagaagagagacatgtctgatttctcttaaaccttcaacaatgtcattagcactctgttattagagtagaatttactttctgttggacacagaaataaagcttatggtacaactttagtttaggtcaggggagaactgaaacaccatctcagtatatataggactttctattgtaagtggctaatgtgtgagtacccacctttagctttcttctagctctgtacaaaattacccctaaaaacaaggtctattcacaggactgatttgagctttttgatataatttcaagctaacagccccatcacacaaggtgtgatggaaacagtcaaatatttggaagtaacaggacttgattgaaatctcaactccctttacacactaggctgtgtgatttttggcaagttatttaacctacctctttgtaaaatgggttaatatataatagtcaaataattataaagcttcaatttaatgatatagaaaaacatctcacaaattcatggaaagcagttaatggcagttacctttggaaaggaagattcatggaagagtaagtgaacaacgaggagagacaaactttatgctatatatttttagtctggtttgaattttttacaattatacttttctcctataactttaattgccaaaatctgaattttgatgtaacaaaattctactacctttagacttaggctcatcttgttcattatgtctgctatgaatattggaatcttccccatctttcaggccccagctgaaatgtcatctgctccagccaaaagatgtctttctcctttgaatttccatggcattttgttcttagggcacttaaaattattttcacagataacttgtcttgcctagtagatttatggtccttgaggaccattatgattatcagagatctcatattttttttttttttgagatagatggaatcagtaagtttctgttggatggatgggtgggtcaatggatagataggtggatggatggatggatggatggatggaaggaaagaaggaaaaagagaagaagaaagaaaaagaaattaccaaaagtatttatttatgatacagtgaatgtatttaagaggtcttttttgataagtggaaacataaaaccttgttcacttgagggagcttgttcttgatatattgtgtcttttgtacctagagactgtcaaaggaaaattgtcccacccatcacagctctgttgaagggacatgttttgaaccccatgactccagtccctctcagccagtaagcatttgaaccaagatcagtcaaaccacaggttggtgagtggcctgggaaaaggcctgaggttctgcccagacaaggactggtagggccacccagattcttattctccagaatgtggactagaaaatgtaaagggaaatagggagttagcagcaggaatggacactgaaaaatacagagggcaggagggagggagaaaaagaaagattaaaattgaccattgggtagaagtagggaccaggaggaattaggaggctgaagttatgagaatcagaacctagaaatagatagaagcaaagaactagtggaaaaattagagggcgaaaaagccaactgggagaaaatgtaagacaaccagagggaagcaaagagagaatatagccaagtcatgttactagtggagtgtcaggatgaagacccagactctcttgtggctgaggcctctctcaagcttcgggcttccatatcctgtctctgaacaggccatgtattttttcctgtaggattcctgcctcccttggtggaccttgtgaaaagctttcactgttcatgctacccttaatgcttctctgtcccttgcaaacaaactaaccctaacagaattttgattacaggcctgagctctcagataaagaatgcgtatatagttttactagaatctattagtatcatacaccgtgattcggataagccatataatgcttaagctttgccatggtcacaaatgaggggactctggaaatatattcatttcctaaaccagtattataaatactaaatgtattctgtaaaccttaatgtatatagtattctgtaaacgtaaatactaaatgtatattgtaaacctaaatgtattcatttcctaaacttttcaggtcatagcacacataaaaatgaaaatatttacacagcagctgctgtacatggaggagcctcctcatggccatggatagggctgtcccaaacaccccagcctcagaagccacaagggttgaaaggggcattattgttattcctggcataggcatttggaagttctgccttgggctgctaatttactgtgcaatgagttaatgcttctatataagagtggtatcctggtggtatcctggaagaattaaaacacaaaacttccttacccacttcaatatttcaccaatttcaaatatactttgaattaaataatggtttcttctcacagtttacctcctgagactacatagaagtaaatttttgtatgatgacatttgttcataaggcagaggttattactctcccccactacctccattataaaatggattgcataccctctttgcaagttgtgttttatgttatagatgacaaataggttttgttttatccccttgccaacctcagctgattggtgctggctgcctggagcatggagttgagaagtttctgaggttgaaagtgggtggattggagatttaacagcccttgtggtttggagtatactttgtaagactctgatggatgttttataataaactttgggcacagaggaacattttagggccattccaggcaagacatgcctggaataattcaccctctgaattgctttgtcttagatgacaacttattgcttaaatcccacattattcccagaaatgtgctagtttgagaaaaagaatgagttgccccaagtgtttctttgtagatagagataatgccttttgcagaaatctgaaagagtcaacaatattaacagttatattaatagcattcatttccgagggattactatgtactaaatgcagtcctaagcattgcccatgtatcatctcatttaatctctccagcaagcttttaaaaaggtactgttcttatcctcatatgacagataaggaaactgcagcagtagctagaaagtggcaaagccaagagttaaactgggcagtgtgagctcctctgctctactgctagaatcaggtattgtttgttaccatttccttctgttttagagacctgaaccttaaaataaaggactgctatgcctgtcctgagcctcatttatcctgctttgagacagtaatgttctataaaaatgtgtcagttctaatggagctcagtttaatggtctcaggatcatctcttatgatcgacaagttacagcattaaagaaaacaaatgcactctattttcaggaaattgctagatatggagctgatgagaacagatgtaagtggtttacaagacttctgaagggctgggcttgacgtgttcattttgttacctttgctttgtgtgttcaccggaaaaaaataataaggctccatctgtaaccagtttgtagcaactgggagggccttggcattgggttaggaatcctgacagaactctactacctttgttcaggtcacgtctgtgtgagtgcagggctccctcgggatccctgaggtatgctgtgagcctgggtctcggctggaattacagtgtggctcattcctcaatgctcatttttgttcagaaaggtccaagggtcagaatgattatggactaaataactcctctcccgagggaaaaaatgagtcatcagggaactagatgttggcagagacctgtcggggaaacagattatttccctctgttctgtttctggtttggtttgttttttttctctctctcccccttgtttttcattttttacttctaggattgccaaaagttaagttatccccagtaaacacaccaagcaagatccacaaagctctttaatcaaaatgacaagatggtaattatttagtgtgatcctgttagtaattggtgaatgaagtatgtctcatttaaaaaaataaattttgcaagaatcagccttttgtttctagatatttatgctaactttatattttatagtcttatctacatgttccacaaaaaaatggtaattgtatgttgaaaaaggtacacatttactaaaggcctaccatgtttgtatgcacattcacataggatacctcatcaatttctcatcacccattagaaagaaattactaacctcattttatagatgaggatactgaggctcagagaggttatgcaacttgcccaggattccagtagctgataaggtgtggagcctaaactttaaaccagatctggtctgtttcactccagagtcattccaaagtgtgtccaccatgttgtgcatcttctgtgaagtgtgtcaattaagatctcattaactcatacacaaaaatgagttagatgtgatctctgctttcaaaaatctcagtatattaaagaagcgttgataattataatacagggcaagtccaatttacaataggccaatgagggtttatgtagtcaacttcctgaggcaaaaggaaaagcagaaaaggttcacccaagaagagatattggaaagaagtcttagctttgccaggcagagtagtggggttggaaggagacatagataacattcttaggtgacaagagtatttgtaaagctctgaaaaggaagaattggctgttcagagtgatagggaggttgagtgtgtattagtttcctaggactgctgtaacatagtactacaaactgggtagcttaaaacaatagtttattgcataacagttctggaggctcaaagtccaaaatcaaggtgtcagtgggattctgagggctgtgagggaaggatctgttccatgccagtctcctggattctggtgatggctgatggtccttggccttccttggtttgtagatgcatcactcctatctctgcctctgtcttcacctggcatttgccccgtgtctctgtgtcttcacatggctatcttcttctcaagacggtggtcatattggattaagggcccagcctactccagttatgaccccatcttaactaattacatgtgcactgaccctacttccaaataaggtcacattgtgaggtactgggaccttttttgaggggacacagttcaacccatagcagagtacctgttgaaggctgagagctacttatcacagaccacttgagctacaacagaacatggcttcacgctgtaagcaacagaaagccaactggagttataatccgggaagggacatcatcaattgtatttgggaaataactctggcaacagtgcagggagaggtgaaagtggaggccaactggtggcaggcaggccccttagaaggcattctagtactcagtcaaaatattacgcagaacttggcttcagaaaagatccaatttccagaataaaaaccacacgtgtaaaatgttttcctagctttagttatttataatatgcaaaatttgtgaacaacgtaaatgtccaacaatagaagaacggtttggtaaattataagcagctattataaattgctctttcaaagcatgttgataatacaaagcttgtatttaaatttttttaaagtagggtataaagtatacaagtaaaacacgattttgagtatattaaatgtaaatgaaaacagaaagaaatgatgccataatattaatggtggtttgctttatgtggtgggattgtgggaagatttttttcaactttaagtataatttatgtgcaataaaatccagcaactttaagtgaacaattcaacaaattaggtcaaatatatatagtcatggaagcatcaccataatgatgatatataagagaactttttttcttttttttgagacggagtctcgctctgtcccccaggctggagtgcagtggcacaatctcggctcattgcaagctccgcctcccggcttcacgccattctcctgcgtcagcctctcgagtagctgggattacaggcgcccgccaccacgcccagctaatttttttgtatttttagtagagacggggtttcactgtgttagccagaatggtctggatcttctgaccttgtgatccgcccgccttggcctcccaaagtgtgggagccaccgtgcccggcctaagagaacatttttatcctctcaaaagtttcctcatgcctctgcagtcagtcccttggcaacctgaaacctgctttttaccactgtagtttcagctgttctagaatttcatgcagattaaattattcaatatatagcattttgtgtctggctactttcacttcagttaatgctgttgagattcatttatgctgttgcctgtgtcagtagctggtttctttttagtacagagtagtattccagagcctggctatgtcataatttgttcgtctacttaccagttaatgaatatttgggttcagtatggtttttaactactataaataaacctagaaactattggctcttctagttttttgtttttgtaaattttcataaaagcctttgtagccattcatcttggatgaataattaaaagtggcattgctggatcatgtgataagtgaatgcctaacttagtaagaaattgtttcccaaagtggccatatcgttttgtagtcaatatcagcatgatatgagaattccaggtgttccacattctcacaagcacttggaattgtcagtctttataattttagtcattttagtgggtatatggtattatcccattgcagttttaatttgcatttccctaatgagtagcgatgttgaacatcttttcatgagcttatttgcaatctgcacatcttacttggtgaagtgtttgctcagatcatttgtccatttgttattgggttgtctgtcttatttttaagttaaaagagtacttttatatattctaggtagaaatgcttcatcttacaggtgtttgcaaatttttttccctgtctgagtcttgcatttttattttttaatggtgccttttgaaaaccaagagttttttctttttatatagtctaatttaaattttcttctgcactcattttttgttttatttatgaaatctttgccaaactcaaagtttctaagattttcgtctatattgtcttctaaaaagcttatcgttttagctcatatgtttaggtttatgacttatttcaagttggtttttgtatatggcataacgtaaggggcagatttatttctttccatgtagatatccagttttcctagtaccatttgtcaaaaacgccgttcttttcctttttgaattttcttggtacattttggttgaaatcaatgggccatatatgtatgggtctgttttcagaatttttattatgtttgatgtgtatgtgtacacatggcaataatccactgtcttgattattatggcataataactgttaaaatcatatttttcttttcaaaaattgttttgctgttttaggttctttgcatttccaaaaaaattgtagaatcagcacttaaatttcttcaaaaaaagtgttgatattttgattgggattaagttgaatcaatgtcagtttggaaagattgagtgtcatttagctttttgtttatttacatattctgtaatttctctaagcaatgtcttattattttcaatgtacaaggcttccagatattttgttaaatttatgcctatatattggattttttgagttttttacaaatagtatttttctgtaatttcaattgccagttattcattgctactacatagaaatacaattaacttttgtatattgaccatatatcttgtgacttactaaactcagttattagtgcttctagcttttttatagattccttaatattttcaacatagatgattaagaaatttataaaataaataagttttctttctttctaatctatatgagttttatttctttttcttgccttatactggttaggacctccagaataatgctggatacaagttatgtactagacatccttgccttatgcccagtcttaggggaatgtgtttagtctttcaacattaagtatgatagaaaccacaggttttcatatatgtctgttatcaagttgaaggacattccttctattattaggaactgagggttttaaaaatcatgaatgggtatagaattttgccaaaagcttttcctgtattaactaagacaatcctgtttctttctttcttttatttttttatacttcaagttctgggatacatgtgtggaacgtgcaggtttcttacataggtatacatgtgccatcgtggtttgctgcacccttcaaatcgtcatctacattaggtatttctcctaatgctttccctccccgatccccctatcccccaacaggccccagtgtgtgatggtccctgccctgtgtccatgtgttctcattgttcaactcccacttaggagtgagaacatgcagtgtttggttttctcttcctatgttagtttgctgagaatgatggtttccagcttcatccatgtccctgaaaaggacatgaactcattcttttttatggctgcatagtattccatgttgtgtatgtgccacattttctttattcagtctatcattgatgggcatttgggttggttcgaagtctttgctattgtgaatagtgccacaataaatatacgtgtgcatgtgtctttatagtagaatgatttataatcctttgggtgtatactcagtaatgggattgctgggtcaaatggtatttctggttctagatccttgaggagtcaccacattggtttccacaatgattgaactaatttacactcccaccaaaagtgtaattagtgtaaaagcgttcctatttctccacatcctctccagcatctgttgtttcctgactttttagtgattgccattctaactggcatgagatggtatctcattgtggttttgatttgcatttctctaatgaccagtgatgatgagctttttttcatatgtttgttgcctgtgtaaatgtcttcttttgagaagtttctgttcatatcctttgcccactttttatggggttgtttgtattttcctgtaaagttgtttaagttgcttgtagattctggatattagctctttgtcagatggatagattgcaaaaattttctcccattctataggttgcctgttcactctgatgatagtttccattgctgtgcagaagctctttagtttaattagatcccatttgtctattttggcttttgttgtaattggttttggtgttgtagtcatgaagtctttgcccatgcctatgtcctgaatggtattgcctaggttttcctctaggatttttatggttttaggttttacatttaattttttaaccgatcttgaattaatttttgaataaagtgtaaggaaggggtccaatttcaattttctgcatatggctagccagttttcccaacaccatttattaaatagggaatcctttccccattgctgtttttgtcaggtttatcaaagattagatggttgtagaaatgtggcgttatttctgaggcctctgttctgttccattggtctatatgtctgttttggtaccagtaccatgctgttttggttactgtagccttgtagtatagtttgaagtcaggtagcgtgatgcctccagctttgttctttttgcttaggattgtcttggctatatgggctcttttttggttccatatgaaatttaaagtagtgttttctaattctgtgaagaaagtcagtggtagcttgatgtggatagcattgaatctataaattacttggggaagtatggccattttcacaatattgattcttcctatccataagcatggaatatttttccatttgtttgtgtcctctctcatttccttgagcagtggtttgtaattctccttgaagaggcccttcacatcccttgtaagttgtattcctaggtattttattctctttgtagcaattgtgaatgggagttcattcatgatttggctctctgtttatctgttcttggtgtataagaatgcttgtgatttttgcacattgattttgtatcctgagattttgctaaagttgcttaccagcttaaggagatttggggctgagacgatggggttttataaatatacagtcatgtcatctgcaaatagagacaattcgacttcctcttttcctatttgaataccctttatttctttctcttgcctgattgccctgaccagaactttcaatactgtgttgaataggagtggtgagagagggcattcttattttgtgctggtttttgaagggaatgcttccagcttttgccccttcatatgatattggctgtgggtttgtcataaatagctcttattatattgagatacattccatcaatacctagtttactgagagtttttagcatgaagcggtgttgaattttatcgaaggccttttctgtatctattgagataatcatgtggcttttgtcattggttctgtttttgtgatggattatgtttattaatttgcatatgttgaaccagccttgcatcccagggatgaagccaacttgattgtggtggataagctttttgatgtgctgctggattcagttttccagtatttcattgaggattttcgcatagatgttcatcagtgatattggcctgaaattttctttttttgttgtgtctctgctaggttttggtatcaggatgatctggcctcataaaatgagttagggagaagtccctcattttctattgtttggaatagtttcagaaggaatggtaccatctcctctttttacctgtggtagaattcagctgtgaatccttctggtcctggcctttgtttggttggtaggctattaattactgcctcaatttcagaacttgttattgggctattcaggggttcgacatcttccttcttctttttcttcttcctggtttagccttgggagggtgtatgtgtccaggaatttatccatttcttctagattttctagtttctttgtgtagaggtgtttatagtattctctgatggtagattgtatttctgtgggatcagtggttatatcccctttatcattttttattgtgcctatttgattcttctctcttgtcttctttattagtctggctagtggtctatgtattttttaatcttttttaaaaaacaattcttggattatttgatattttgaagggtttttcatgtctgtctccttcagttctgctctgatcttagtcagccttcttgtcttctgctagcttttgaatgtgttttctcttgcttctctagttcttttaattgtgatgttaggatgtcaattatagatctttcccgctttctcctgtgggcatttagtgctataaatttccctgcaaacactgcttccgcagtttcccagagattctggtacgttgtgcctttgttcccattagtttcaaataacttatttatttctgccttaatttcgttatttacccagtagtcattcaggagcaggttgttcagtttccatgtagttgtgcagctctgagtgagtttcttaatcctgagttctaatttgattgcactgtggtctgaaagactgtttgttatgatttccgttcttttgcatttgctgaggagtgttttacttccaattatgtggtcaattttagaataagtgcaatgtagtgctgagaagaatgtatattctgttgatttgcagtggggagttctgtagatgtctattaggttcgcttggtccagagcagagttcaagttctgaatatctttgttaattttgtgtctcattgatctgtccaatattgacagtggggtattaaatctcccattattattgtgtgggagtctaagtctttttgtaggtctctaagaacttgctttatgaatctgggtgctcctgtattgggtgcatatatatttaggacagttagctcttcttgttgcattgatccctttaccattatgtaatgcgcttctctgtcttttttgacctttgttggtttaggtctgttttatcagagactatgattgcaatccttgctttttttttctttccatttgcttggtaaatattctccatccctttattttgagcgcatgtatgtctttgcatggagatggatctcctgaatacagcacacagatgggtggtcttgactctttatccagtttgccaacctgtgtcttttaattgaggcatttagcccatttacatttaaggataatattgttatgtgtgaatttgatcctatcgttaggatgctagctggttgttttgcctgttagttgaggtagtttcttcatagcgtcaatagtcttgacaatttggtatgtttttgcagtggctggtcccagtttttcctttccatatttagtgcttccttcaggagctcttgtaaggccagcctggtggtgacaaaatctctcagcatttgcttgtctgtaaaggattttatttctcctacgcttacgaagcttagtttggctggatatgaaattcagcgttgaaaattcttttttttaagaatgttgaatattggcccccactctcttctggcttgtagggtttctgcagagagatctgctgttagtctgatgggcttccctttgtgggtaacccaaccctttctctctggctgcccttaacactttttttttttcattttaaccttggtgaatctgacagttatgtgtcttggggttctcttctcaggagtatctttgtagtgttctctgtatttcctgaatttgaatgttggcctgtctttgtaggctggggaagttctcctggataatatcctgaagagtgttttccaacttggttccattctccccatcactttcaggtacaccaatcaaatgtaggtttggttttttcacatagtcccatatttcttgaaggctttgtttgttccttttcattcttttttctctaatcttgtcttcacactttatttcattaagttgatcttcagtctctgatatcctttcttctgcttgatcgactcgactattgatacttgtatatgcttcacaaagttctcatgctgtgtttttcagctccatcaggtcatttatgtcctctaaactggttattctagttagcaattcctctaaccttttttcaaggttcttagcttccttgcattgggttagaacatgctcctttagcttggaggagtttgttattacccaccttctgaagcctacttctgtcaattcgtcaaactcattctccatccagttttgttcccttgctggcaaggagttatgatcctttggaggagaagaggcattctggtttttggaattttcagcctttttgtgctgttttttcctcatcttcgtggatttatctacctttggtctttgatgttggtgatcttcacctggggtttttgagtggacatcctttttgttgatgttgatgctgttcctttctgtttgttcgttttccttctagcagccagacccctctgctgcaggtctgctggagtttgctggaggtctactccagaccctgtttgcctgggtatcagcagtggaggctgcagaacagcaaagattgctgcctattttttcctctggaagcttgagcccagaggggcaccccccaaatgccagctggagctctcctgtatgaggtgtctgtcgacccctgctgggaggtgtctcccagtcaggaggcatgggcatcagggacccacttgaggaggtagtctgtcccttagcagagctcgagcactgtgctgggagatctgctgctctcttcagagctggcaggcaggaacatttacgtctgctgaagctgccccgacagccactgcttcccccaggtgctctgtcccagagaggtgggagttttatctataagcccctgactggggctgctgcctttctttcagggatgccctgcccagggaggaggaatctagagaggcagtctggctatagtggctttgccaagctgcagtgggctccacccagttctaacttcctggcggctttgtttacactgtgaggggaaaattacctactcaagcctcagcaatggcggacacccctccccccaccaagcttgagcatcccaggtcaacttcagactgctatgctggcagcaagaatttcaagcctgtggctcttagcttgctgggctccgtaggggtgggatccgctgagctagactgcttggctccctggcttcagccccctttccaggggagtgaacagctctgtcttgctggcattccaggcaccactggggtatgaaaaataattcctacaactagcttggtgtctgcccaaaaggctgcccagctttgtgcttgaaacccagggccctggtggcacaggcacctgagggaatctcctggtctgcaggttatgaagactatgggaaaagatactaatctgggccagagtgcaccattcctcacagcacagtccctcagggcttctcttggctaggggagggagttccccgaccccttgtgcttcctgggtgagacagtgccctagcctgctttggcttgccctccgtgggctgtacccactgtctaaccagtcccaatgagatgagctgggtacttcatttggaaatgcagaaatcacccaccttttgcactgatcccacagactgaagctgttcctattcagccatcttctgttctcaatcctgtttcttaaaagctggacaatatattaattaaattgattcattatgaaataataggatgatcttgcattccaaggatcccacttcatcataatatattaccttttatgagtgttgcaatatttgatttgctaaaatactttcaggatttttccatctatcttcatgagggttattggcctgtaactttttacttctagtgtctttttgttattgaggtgatgttggcctcataaagtgagttaggaaacgtactttcttctagaaagtagaaatggtgttatttccatcttgaatgtttggtaaattgtaccagtgatgccacctgggcctggagttttctttgcaggaaggcttttaatgcaatcttagtcatttaatggatggaaggttgtccaggttatctttttttttttttttttttttttttttttttttgcctttgaaagagtcaatttgtgaatttattggcataaatttgtttataatattctcttatcttctttctaattcctataggatgtgttatgatatcatattggtcattcctgaaattggtaattaatgtcttctcttttcctgttcattctgtctaaaagtttatcagttctattgatcttttaaagaaccagcttttggttttaatgatgtttttctattgtttttatgtttcatttttcattgatttttgctgttatctttcattttgttcctcatgcttgctttgcatttaattgctcctttttctaatttcttaaggtaaatgcctaattatttatgtgaggtctttctcattttcaaatatgagtttaatgctataaatttcctctaagcactgcttagctatatcccccaaattgtgtttttatttttaatcagtccaaaatattttctaatttcctttgtgagttcttctgtgatctgtgagttactatgtagaagcgtattgtttaattaccaaatgcttgggagattttctaaatttccacttgctgttagtttctaacttcattcaaaggacatagtttgtgtggtttcagttcttttaaatttactgagaaatgttttatgacccacagtatgatatcttggaaaatgttccaagtacatttgaaaagactagtagttccccacatggacacgcggaggggaacatcacacaccagagactgttgatgggtgggaggctagggaagggatagcattaggagaaatgcctaatgtacatgatgggttattgggtgcaacaaaccaccatggcacatgtatacctgtgtaacaaacctgcacattctgcacatgtatcccagaacttaaagtattataataataataataataataataataataataaaagattagtagttcccctttttccacagttttgctttccacagtttcagtgacccactatcaacaacggtccaaaaatattaaatggaaaattccagaaataaacaattcataagttttaaattgtgcacaaatctgagtagcatgatgaaatctcacattgtcctgctccctcccacatgagatgtgaatcattccttgtttggcatatctacaccgttcacactacctgcccattagtcatttcgtagccgtcttggttatcagatactgccactgtatcacagtacttgtattcaagtaacccttattttacttaattatgtcatcgaagtgcaagagtattgatgctggcaatttgggtatgccaaagagaagctgtaaagtgctttgtttaagtgaaaaggtgaaagttctcaacttaataagtaaagaagaaaagaaaaaatcttacactgaagttgctaagatatacaactgtaagatatattcttacagttggtaagaatcttctatgcatgaaattgtgaagaaggaaacagaaatttgtgcaatatatatataaggttcagtagtatctgtggcatcttctgagggtcttggaatgtattacctgtggataaaaggggactagtgtatattctgctgttgttaattatagtgttatctaaatttcattgattattaagagagaagacccaaataaataaaatcagatatgaaaaaggagacattacaactgataccacagaaattcaaataattattagaggatactatgagcaactatatgccaataaattggaaaatctagaagaaatgcacaaattcttagactcatacaacttaccaagattgaaccatgaggaattccaaaatctgaacagaccaataatgagtaacaagatagaagccatactgaaaagtctctcagtaaagaaaagcccaggacccaattgcttcactgctgaattctaccaaacatttaaagaagatctaatagcaatcctacttgaactgttctaaaaaatggaagaggagggaatatttccaaactcattctatgagtccagtattaccctgataccaaaaccagacaaagacacatcaaaaaaagaaaactacaggccaatatctttgattaatattgaatcaaaaatcctcaacaaaatattggcaatcaaaattcaacaatacatgaaaaagatcattcattataaccaggtgggatttattccagagatgcaaggatggttcaacatatgcaagtcaaccagtgtgatacatcatatcaacagaatgaaggatgaaaaccatatgatcatttcaattgatgacaaagaaagaatttgataaagttcaacatttattcatgataaaaaccctcaaaaaactgggtgtagaaggagaatacttcaacataataaaagccacatatgacagaccaacagctagtatcatactgagtggggaaaagtgaaaacacttcctctaaaatctggagcataataaggatgtccgctttcaccactgttattcaacatagtactggaagtcctagctaaagcaatcaaatatgagaaagaaataaatggcacccaaattggaaaggaagacatcaaattatccttgtttacagatgatatgattttatatttggaaaaaacctaaagactccaccaaaaatctattagagctgatacattcagtgaagttgcaggatacaaagtcaacatacaaaaatcagtagcatttctatatgccagcagtgaacaatctgaaaaagaagtcaagaaagtaatcccatttacaatagctacaaatacaatcaaagaactaggaattaaccaaagaagcaaaagatctccacaatgaaaactatagaacactgacgaaagaaatggaagaggctttttctagagatgccctgctgggagagtatccatggctttgcgtccccatcatggccctgcggtcggcggcctcctcctggagcacagcaaggtcaggtggcacctgcttgagtcctgcgttgccatggccacagttcctgagttgctgcagcagcaggaggaggaccacaggaagctgagatctgtatctgtggacctgaatgttgatccctcacttcagattgacatacctgatgcgctcagtgagagagataaggtcaaatttacagtgcacacaaagaccacactgcccacatttcagaatccagagttttctgttacaaggcaacatgaggactttgtgtgactacatgacactcttcatgtaccctagaacttaaagtataacaaaaaaaaaaaaaaaaaaaagaaagaacagaccatgctgggcttattgtgagtgttttagaaaatcaaataagctagttctttctgccttgctattcatttagtttaaagagacttatatccactttttataatggattgtgaaaattttgatttcatctacctactagagtatttgctaactattgggtaagtggaaaatatgtgaaggaatagtgttacagctttgaggtaatgcatacaggcttacattatttatgttgtaaagtggtataaacagtgtaatgactttagtcttatttacctttaggtttggtttttctctggtatgttctttccaatgtcagtagaattgatttctaggaaacattagtattggtaatagtatgtgataagatttctcaaaagtgctgaaggaggccatgcctgtaatcctaacactttgggaagctgaggtggatggattactgagctcaagatttcaagacctgcctaggcaacatcatgagaccttgtctctactaaaaatataagaaattagctgagcatggtggcacatacctgtagtcccagctactggggaggctgaggcatgagaatcacttgaacctgggaggtagaagttgcagtgagccgaggttgcaccacttcactccagcctgggtgacagagtgagactctgtctcccaaaaacaaaaaagtgctcaaggaggcagttttcagcccttgattgttaattcttggctgcaggaacagaggcttagctgattttaaaggagatttccatgcattttgtcctgccatgcagactgaagaatctgtccaaatgacaatttcttaataattgaacaaaattagtactgaagcttatatttagatatgttctgttcattcaaaatcaaagtccttgattatcctttgggattaggaaaaaaatcctttggaatactggagacttcataatcttgatggctaatcattggtgtttagcatttgttgtactagttttaggccaacattgaagcagtatagacactgttgtgctctgaacgattgtctgtaatggataaactgggcaaatgattgccatcaaagtgaatacaggaagatacctccttttaaatggccagaagaaataaggaaggttaagaaaaaacaggagttgacttttaaatagccccataggagtggagtggttgtctcctgtggaccagcaagagtagaacgaggcaccagctagaaaacatcgcttctgggacaagagactcatgagttcctgcctctgctgcagattccgcctgctcctacgaaggctgacttcaatggtccttgagagaagatgcagaaactgggagaaggtaaagggtctttgaccaaagaagaatttgccaagatgaaataagaactggaagctgagtatctcgctgtttttaagaagactgtgtcctcccatgaagcctttctttagtggctttcttctcaccctgttctcagtaaagatcgcaactttcatattttcctggaatatgatcaggatctaagtgttaggtggaaaaatactaaagagatgtttggtggcttcttcaaaagtgtggtgaaagtgctgatgcagtcctttttactggagttaaggaggtagatgacttctttgagcaagagaatgacttccttattaactattagagtaggatcaaagattcttgtgtgaaagctgacaaaatgaccagatctcataaaaatgttgccgatgactatattcacactgcagcctgcttacatagcctggctttagaagagcccacagtcatcaaaaagtatctattgaaggttgctgagctatttgaaaaacttaggaaagtagagggttgaatctcatcagatgaagatttaaagctaacagagctcctccgatactacatgctcaacatcgaagctgctaaggatctcttacacagatgcaccaaagccctcattgactatgaaaaatcaaacaaagctctggataaggcccagtttaaagagcaaagatgtcaagttggctaaggtacactaggaggagtgctgccagaaatttgaatagctttccaaatctgcaaaggaagaactgataaatttcaaacggaagaaagtggcagcatttagaaagaatctaattgaaatgtctgaactggaaataaaacatgcgaggaacagtgtctcccttttgcagagctgtattgacttgttcaagaataactgatatgccttcactctgaagaaaagaaatgaatgtgaaagaaagccaaacatcacttgcacttaaatcattaccagcggaagatttattgtcttcaactttagtttaaaattatgtgaataaatattttgatttctacaaatcttaacatttaaccatgttggtttaaaaatattgttgcttgctatttggacataactaatttttccttgtgcatttaatacctctgggcagaatctaaatactgagttctcctgtagtatgtctttagttactaagagaggatgtaggagacatatgccttctggaaacaagtagaagcaatcatctggcccatgtcctacaaacccatgaatgtcagggaggtgccagttacagcaggtgattcagcaacttgaggcaggtaacagaccttccattcctcactgaaggtggggtttgtgtttttgttttgccccctgttactcccctggtagtcatctggtgtttgtactataacaacagcaagaaaatctcatttgtctttatgtactcttggcacctcctttttttaaatcgagatataaatatttgaggggagaaaagtatctacgggtatatatggaaactgataatgtggtctactttataagatggccagatctacattaggaaaagtatgagctccttccatagtgtctgtgggaggtgatggggggagaggggacagtgtatgtctttggcgtttgtttttttataaagtatataataaaataatcatgctactaaaaaaaagaaattgaagaggacacaaaaaatggaaaaatagtccatgttcatagattggaagaagcaatattgttaagatgcccacactacccaaagcaatctacagattcaatgcaatccctataaaaataccaattatgtgcttcacagaaatagaaaaaataatcctaaaatttatgtggaatcacaaaagactcagaatagccaaagttatactgagcaaaaacaacaaaactggaggaatcacattacctgacctcaaattatactgtagatctatagtaaccaaaaaggccaagtactagcataaaaaaacagacatatagaccaatgggatagaatagagagccccaaaacaaatccacacacttacagtgaactcatttttgacaaagttgccaagaatatacattggggaaaagtcttttcaataaatggtgctaggaaagctggatatccatatgcagaataaagaaactagacccttatctttccgcatatacaaaaattcaaatcaaaatggattaaagacttgaatataaaacctcgaactatgaaactactaaaaaaaagcattggggaactctccaagacatgagactgggcagagatttcttgattaataccctacaagaacagtcaatcaaagcaaaaatggacaaatgggatcacgtcaagttaaaaatcttctacacagcaaaggaaacaacatgaagagacaacccacagaacccacagaaatgggagaaaatatttgtaaactatccgtctgataagggattaataaccagaatatataagcagctcaaactactttgtaggaaaaagacctaataatactgtttaaaaatagccaaaaatttgaatagacatttctcaaaagaagacctacaagtggccaacaggcatatgaaaaggtgctaatatcattgctcatcataggaatacaactcaaaactacaatgagatatcatctctccacagttaaaatggtttttatccaaaagtctggcaacaacaaattctggcagggatgtggagaagagggaacatttctacactgttggtggggatataaattagtacaaccactatgaagaaaagtttcgaggttcctcacagacaaaaatagtgctactgtatgatccagcaatctcattatcaggtatatattcaaaagaaaggaaatcaatatattgaagagatatctgcactcctatgcttgctctagcactgttcacaatagccaagatttggaggcaacctaagtgtccatcagcagatgtataaataaagaaaacgtggcacttatacacaatgaagtactagtcagccattaaaaaaaaaaaaaagagaatgacatcctgtcatttacaacaacatggagggaactggaagtcattatgttaagcgacataagccaggcacagaaagacaaacttcacatgttgttctcacttatttgtgagatccaaaagtgaaaacaattgaactcatggaggtagagaatagaaagatggttaccagaggctgggaaagatagtgtggttgggggtggagggctgaagaggaggggggatggttaatgagtacaaaaagaaatagaatgaataagacgtagtacttgacagcacaacatggggactatagtcaataataatttaattgtactttttaaaataactaaaataatataactggattgtttgtaacacaaaggataaatgcttgaggggatagatactcgattttccatgatgtgattataatgcattgcatgcctgtagcagaatatctcatgtaccccataaatatatacacctactaagtacccacaaaaattaaaaataaaaaaattaaattaaaaaaggtacagcattttaacccttccttggaacctaagctatgcatctgaaaggggagtttttaactgtataagtctgtctaaatgccttagtaacgtgatgaattatagtaactcagtgttttttcctccctatttgcagaatgttaaccattgctatgttttccagaaaaaccctatattagttaggatgagtaaagttagctgctataatacacaaacatcacaacctggtgtttgatagagcccagtcagatgttcctggttggcagatggttttccttatgatctttcatatgggtggatgagttccttccatcttgtggctgcatccccttctggatcttcagcattctctctcttcattcagctaaagtataaagagagcacagggaagatatacctacttcttaactctttgtccaaaaatgacatatatcacttcttactttctattagcctaaacttggtttgtggacacatctgagataaaggctgcaaaaatataatcaaactatgcctaggaggataagaaatcattttggtaaatgcacagcagcctgccacaaatttatttgaaattgataataattgttctatttaagaaaataccataaaaaccctagaagaaaacctaggcaacatcattcaggtcataggcatgggcaaagacttcatgactaaaacaccaaaagcaatggcaacaaaagccaaaattgacaaatgggatctaattaaacaaaagagcttctgcacagcaaaagaaagtaacatcagagtgaacaggcaacctacagaatgggagaaaatttttgcaatctacccatctgacaaagggctaatatccagaatctacaaagaatttaaacaaacttacaagggaaaaaaaaacatcaaaaagtgggcaaaggatatgaatagacactctcaaaagaagacatttatgcagccaacagacacatgaagaaatgctcatcatcactggccatcagaggaatgcaaatcaaaaccacaatgagatatcatcttgcaccagttagaatggtgatcattaaaaagtcaggaaacaacagatgctggagaggatgtggagaaataggaacgcttttacactgttcatgggagtgtaaaccatttcaaccattgtagaagacagtgtggcaattcctcaaggatctagaactggaaataccatttgacccagcaatcccattactgggtatgtacccaaaggattataaatcatgctactgtaaagacacatgcacacatgtttattgcggcactattcacaatagcaaagacttggaaccaacccaaatgatagactggattaagaaaatgtggcacatatacaccatggcatactatgcagccataaaaaaggatgagttcatgtcctttacaaggacatggatgaagctggaaaccatcattctcagcaaactgtcacaaggacagaaaaccaaacaccgcatgttctcactcgtaagtgggtattgaacagtgagaacacttggacacagagcagggaacatcacaccccaaggcatgtcgtggggtggggggcagggagagggatagcgttaggagaaatacctaatgtaaatgacgagttaatgggtgcagcaaaccaacatggcacatgtatacatatgtaacaaatctgcacgttgtgcacatataccctagaacttaaagtataataataataataataataataataataaaagaaaataatagggtgtggcctgaagaacattcagccctgtcccttttgtgtctgtgatgggccttatgagacacccttctcaacggtctgtgattctgaaccaagagtgtcctggtatctgaacactaacctgcctgaacactacccctgatcctacctttacttagagagtggaatcctcagattttcctaatatgtcgactaacgttgtgagaagattgctatttgggattggcattattaacacctcagatgaactttatttgtgggtatgtttttatttttatttttatttgtgggtagattttatttgtggataggtaggtacatggtggaggtgaaggtagaaaatggagcagaaaaagcatgcaaaactctgtcttgtaaatacaattaatcgagtgtcagatgttgtggcttgagagtgtccttttctaagatctgtgagggaaatggtagacaggttgtttcatcttcatgccttcaatgcaatgtcttagtgaccaggtgacttcatctccattaaggtaaaatgcctatgttcattaagataaggttagatcgctgtagcacaaaggcagtggctttgaaaaacacagaaattaatttctatcacatgtataagtatgaagtgagcattccaggctggcagacagctccactccacatggtcactcagggactcatgttcctacaaaagagctgtttcccataaccccagagcctgtcatcactttcacggtctcactgggtcacctgggttctacccgtccagaaggggaaagtggatacggaaaaagcaccccgcaatgttttaagaagtcaacaggcaagtactacacatcatatcacctgtgctcatatttcactgctgagaactatcctttggtcacatctaatgcaagggtatctggaaaatacaatatatgtaggcaaccatattctcagcaacaatcattttattgtggaggaaagcaagaaagaatcttagaggacagtcagtagtctctgccacagggtccatacaaccaaataatgagagtgatagttagaacagaatcacacttttattgcaagacaaaagagaagcataataagcttcaaacgttgatactattattaagttatttaataggccctggtgtgtaaagcattcagaaagtgtagctgcatattcttcaaattcatatcttaatttcttataagcatatgaaaatatttagaaaattaagaatagttttccacatttgctttcattctcaggacagcatttcatttatgcatttatggagcctctctgcgtgccagttgctgtgctagactctgaaggtataaagacaactaagatacagctctgctctcaagaagtccacaaactagtcatagatatgatctgggtttgggtttttattggttttgtttttacagtgctgaatggtgtgattagcgctgacctagagttgtgtgcacaactcagcatgggtgcacagggatgattcagggggcgtagttacagaacacacggggctaaacctgaaagtgagggtaggagttgaccagatggacccaaatagggaaaaacattactcgctaaggaaatggtgtgggcaaactgagaaagtataaaacagctcatgtgtgaaagtgttagtgagttagcctggagtctgaagtgcaagtcagggcagagcgagttgggcttatgagctttgcatcgtgagctgctaacagattttattctataggtgatgtggctccactgattcccaagacacctggttggatctggatttagagaaatcattagcaatgtaaaatgatagattggaatctaaggagttcaaaatgccagcagtaaggctaaacatgctgatgctttagctgagaaaattcttgtggaaagagttccatgtgccaaaagaaaaaaaaaaaaaacacttgacaaaactcttaggaatttcgtcttttgagaacaaagtcataaaagaaatacactttttaatcaaacttatcatagtgccaggtagtataagagaaatatatatatatacacacacacacatacacatatatctttatataaaacataaagatacatatatctttatataaaacaaatatatatatctttatatatatatatataacaaaaatatgtatagcataaaccacctttgaaggagacaagaaagtgtgagctcatgacataagacagtgtataactaggcacactgaaagtgcaggggctcccaaggctgtgagtattcagaggagggagtttaaaccatggcataatgagggattggaactttgccttgaaaagagacaacctgtcttggtttgactacgtttcataggtacaaatagaggcagattcttcttcctcaaatgaatgggcatttcacccaaacataccgacaagggaatggcagttgcacaagcagctaatttcttcttctcttcctattgagtactataatggaagaaaggagaggattattagccaaaaaagggaatattatagtgtgaatatttatgttcccccaaattcatatgttgaaatcctattctttaaggtgaaggtattagtaaggggggcctctggaaagtgattagggcatgagagcaaagccatcatggttggattattgtacttataaaagagaccccagagagctaactacctctcccaccatgtaagggcacagctggcaggtgccatctaagaaccagaaagcaaccctcaccagacaccaaatctgctggtgccttgatcttatatttcccagtctccagaccagtaagaaataaatttctattgtttagaagctacccagtttatggtattttgttacagcagcctgaacagactaacacagggaattaatggttagaatctctgtttcctccaggcaggattcagcaggaatactgaagaagggtgatggaataattgtgacagccactggctcatcttagaagtcagttccctcagatgagaaccatagagggttggtagggcgtagtgagagcagcagctgccagtaagacagactggatgtgaatcctatggcctgaggctgtcccagaatggtcccccatcaagtgtctttatgctcatggaggtacctttgtgatttttatggaaaatagccacatattcaggggctgggccacttgtctcttcaagaacagggagaccctagagaccaaggagggaaagtctttataaagtggcatttgcttgaggggctagaggacctgataaaggaaatatcccagggactctgtgcaaagacagtttggtgaggcagagggcaagcgtgcagcaaagagttaacacagcaggcctgctttagaaaggcctgcttgcaagggtggcccttggctggtgtctgggaacttggctttcaagacagtttccaccaccctgactgctaagggtaactcgtgatgcataaactacatgtgccaacaatacaatttatgctttctccctgaaactctggaattttagtacatgctaagcagctggtgcctatgtgaccagcccccaataaaaaccctgggcactgagtttctaacgagcttgcctgtcaaacagcatttcacatgtgttgtcacagctcattggggaggaattaagtacatcctgtgtgacttcactgggagacgacttggaagcttgtcctgtttcctccctactttgctccatgcaccttttccctttgcagattttgctttatagtgtttcactgtaataaatcttagccatcagtacaactgtattctgtgtcctgtgaatcttcctagtaaatcaaacctggggatggtcttggggattcctgagacagcaagactcactggaaggactccagtagaaaacagctgctcagcattgacacagataagcacatatatttgttttaatttctatcttccagaataagacatttgattattttaggtgtatcttccttaacaactgtaactactcagaatctttcagattttaggaaggcactgaatataccatatattattaaatgccccaggaggcctggggaatacatactaatgtactcaaatacattagtatggctgcttttaatacatgaaaagtctcactaagaagaataaatagaggttatatgtagcctcacatcagtccaggtcagggctcaccaccagatgagtttctgccaaacttaggggaaaaacacttaaaatttttagagcattttgaattttcgcattgcagataagggattgtggacctgtattaccctccttcttttgcttatccggaaattaaggcttagaaaagttaattgatttgccaacagtagcacagcttgtatctgatctggatttcaaatttaggactgtctaggctacatgcccgagaactcttatctatcactctagactgtctttctagctacttattttaagaatatgtcttcagtgtctgcatactactaaggaggaagtaatgtgtgaacaagggagaatagaaaagaagaaagtaattatatttttttgacatggccatttacataatttactttccttcatgaaatggattcctaatatatatttattgttaccttctgtaagtctaactgcatgacaaggcccaaaagagaaatatccacccattctctctcctagggtatgtctgttatatccttatagtcattctcagagtgtgagtgagagagtgtgtgtgtgtctgtatgcatgtgtgtgtgtgtgtgtgtgcccctgtatttgcattttgccttccaaggcagcaggagtgtgtcttattttctctctgtttctcttttattgcataatgctcaataattcatttaagttgatatgctttcattaaattgagtagaaaattaccttggctgaatgaagataactcccagatttctctgcatggggaggccagccacctcgcacttactggagaaagttcttaatagacttacccacttttaccctcattgtggcaacaaagaaatggtttggagaaaagagaaacaacaggactccttccagtaaaacaggaaaatatattttacataggtatttgctgtgaggaggatttgaagggacaggaaatcactatcaaatacatgtgaactgccaagtttcattttgacttttctgctcctacctgcctctcactttaaaaaataagtgcttgcttacccatgtttaggcaatagaaaaaataaaataaaaaaaaataaatgctgtatcaattagatagatgtcggtaacccagttttctgaatcctgacatcccagaatgtaagaatttgtcattctaataagtctgttctgcctcaacttgtaaatcagcttaattcaattctaagtgaaatctctcgtttttcattatgtctgacacaagcttagtaattctcagaaaatagtccttgtgaaatgaagctcagctggaaattctgatattcgatgatgcttacactaacaactgtcattcttggcaatggcttcattattcagtgacacagttaagagccttgttttacttttattcaaaaatgtctttgtctttctctgcttgttccagcaacagttttcctggagttttggaaaagacggcgagcagtaattgcttatgactgggatttgatagactgggaagaagaggaggtttgtatcatttacctcagaatgttgtaaaaagcaaatcacccagaaccacacgacccccccccaaaattgtcactctctgttctgtgacggaagtcaggtgtactcataaagcattttcaattgccttttcagaaaatttcaagcagtataaaaatggactgacaatttttgtaaatttttgattccttagtggaatcaaatcccttgattaagtggagaattccacttgtaggtagaggcaccagaagaattggtggtgtagctttttttttccattttcttaaaaatcatccttttttctctaacttcagcagaaaaagagcattcatttgacatctccaggtacatggaagcaatccttccaagagaattacccaaaggcagtgtgtctgtgagcagcacccaggaccgtgcccaggtgtgcacaggctctgaagtatgacatcaagtgttccgtgctggggacaatccactctgaagcggccaccttgggagacgtggttaaatggagggccagctctagacaaaactgccaaggagggccagactcagcccaccactgtcccttagcgtcttctaggccagtccgttgttctcctcctgacctgtcttgttctaatagtctcttcttgcccctattcctgtcggaagtctgaagtacccacactaggcgtggtcaccacggtcccctcttggaccctgcttcccttgacagttggtccaggcctcagccccactctcctccctctcgttcattatctcttacccctcctgagtctcatttcctcagagccttgctgtgccagtaaatcagataaaccactcatatgtgtaatagttttttgatcatggctattaatatgtgttttccttgaagggaacacatgtatatattttcatgtataaaaaagaatctttcagaaatatgaacgatgtgaattttagccctgtggtaggcttggtgggggaagtaattctgagaggtatttttgttgttgttgtttgtttccttcacactatgcctcctcaatggctgcctgttccccttctcccatgaacatgtttgggtagttttttggtttggtttggtttggttttgaatgtacttcaggtgtacaacaggaggttttgatacatgacactgagattttcagcaatccttgttctcctgataaggctttctttcatgtttttataaatattctccaggccaggtgcggttgctcacacctgtaatcccagcactttgggaggccaaggaaggggtaccacttcaggccaggaggaggatttgaggatagcttatagatggccatcttctccctgtgtcttcaggccaggagttcgagaccagcctggccaatatggtgaaaccccatcactactaaaaacacaaaaattagctgggtgtggtggcatgcagctgtgatcccagctacttgggaggctgaggcacaagaattgcttgaacccagaaggtggaggttgcagtgagccaagattgcaccactgcactccagcctgagtgacagagtgagaccctgtctcaaataaataatgtgtatatatattttttctaggttctagatatatatatatatatattatatatatatatatatacatacacatatacatatatataaatagattttcttcaagtggccaattttcaaacatatatatatatgtgtatatatatctagaacctagaaaaaaaatatacatatatatatgtatgtgagtgtgtgtatgtgtgtgtgtgtgtgtatacatatatattctaggtttgaagaagcttcccaggctgactatgacatctattggtagcagccggactgcattcagaaattcctcttgtgtggtgccattctgctgtttctggttatatgtgttcatgggaacagttcccagtgggatggaaaatattctttcctgggaatcaccttgggcaatttacttcacctttggactttaaaaatctctaatgaaaagaagtgggactaaattttccccttctatctgtaaagtgtggccctatttgagtaactttgactaaaccagtctacaatcattgttggcgtttgtggtgggcccctgatgtgggcacccttctggggaacgtatgtatcccttataagtgtggagccttctgtcttcccagcccctgataaaaagcgtggagtgctgaattgtcctctcactctgcatacctttgtacaggagcctacatacgtagccattcccagcttgggattccttgtggaaatgcctcacttctagcccatgatttctaccttattgtgcagaaaaacccagactcgctgcagaccttctggggcaacctcgcacattagtttgtcagggctgccataacaaagtaccacagactgggtggcttcaacaatagaaacttacatgctcacagttctggaggctagaagtccaagccaaggtgtcagcagggttggttctttctgagaaccatcagggaaggatctgttctaggcatcttttcttggcttatagatggccatcttctccctgtgtcttcacatcgtcttccccctgggtgtctctgtgtccaaatttcctcttcttataaagacaccagtcatattggagtagggtccaccctaatgacctcatttgaacttaattaccactataaaaaaaacctgtttccacatatggtcacattcagtactgcgggttaggacttcagcagatgaatttgggggaagcaagacacaatttggcctataacacccagcgatatggtttggctgtgtccccacccaaatctcatctttagttgtagctcccataatccccatgtgttgggggttggacctggtgggaggtaattgaatcatgggggtgggtttttcctgtgctgttctcatgatagtgaataagtctcttgagatctgatggttttataaaggggacatcccctgcacatggtctctcttgcctgccaccatgtaagatgtgtctttgctcctccttcaccttccaccatgactgtgaggcctccccagccatgtggaactgtccattaaccctctttttctttataacttacccattcttgggtatttcttcatagcagtatgaaaatggacagatacatccaggaacacagacctgtctccatgattggccttagttctcggatgactagctcaagggctcttgatgacacttatggcccaataaattgaaagtttcccaaagaagcagaagattctaggtctgctatgtttatctcctcaagtataactgcctaaaataaatgaaagacagagcctgctcctaatgtatctcctgctgatcttacccatgacctacccctgagggaagtccagccttgggctaattcagtggcaggagccaggctgagccatgtgaaggccatccttcatgctacatgggcaggctgctgccaaactgggctctctctccatgacctctcttctgtcagctcgttccttgctttctgccagtaccttcatccgaatcttgaccatttctgcctggattaactcaatctccatttcagcagagtttctgctcatttgccatcctctcccaacactctcaaacataatgcatgcttaattaacgggaaccacatcaggttcccttgctgattgccttttcctaatctcataattggtttttagtcagaagcttttcacattcaggaggctcagctaaatgaaataaaatctcagtttgatttagaattggaggaaccttgattttaactggttttgaaaggtgcttaccttgttttcaattaagaattaagaatatacctaaagtctattggttaaagatgaatgactcctataggaacttattaaaaagtagattcaccatgtttttagtgaactaaacctaaaaatgcaaaaaaaaattgctggagaaaactaagaattatattgtcattataacttacaaaatggattttgaacattttcctgtagagaagccttctttgtcctggtgtttcttatcactctctggtaataaaagtaaaagcttattagttgttccaaaccattaggacaggacagcttgtcccttttaaaataccattctcagggtggttttttcttcaaggttagttttataagataacagataaatgtaactgttagtccaaatttctttgcttttgatgatagtaaatcttgatcttcactctttagattttcttcaagtggccaattttcaaacatttaagcctgggcacccaaacccacttcattggttgactaattagtgtggcagctgttgactctgttttatggtggggtaaaatgatatttctttttttattgtgtgagcacctctttagtgcattaaaatgtgtctgcttgtcctttaggaagaaatacgaccccagtttgaagccaagtattccaagaaagagcggatgaatccaatttctggaaagccagaaccttatcaagcatttacagataaatgcagcagacttatcgtttctgcatctggaatattttttatggtttgaaacttttaaaaaaatatttgtttcataaaatacaaacctatagcataataacagtaatcatattgggcatttgcattgttctacaaaatatttttgcactttgttatttattcctcacagtaacttcgtctggtggtcagggatggtattgctatccccatattacagatagaacaactgagactccaacaggttatggggcttgcccgaggtcagccagtaggtagctaagagctgagaccctctaatctgatattctttcctcttgccatattctactgtgtgatgctgaaaggagtcaaaaatgtgagacaggatgtacagtagtgtttttcaaacttttcaccatgcccatacagtaagaaatatattctctgtcataaccccgaatatgccaagcaagtagatgtataaaacagtgtaagtaaaacagtgctcacctttataatatgcataagctctgattttgttttattatagtatatttttaatgacagattagcctcctaaaattaatttcctgactcactaatgatcatgtcagtttgaaaaacagacctcagtttttagcttttcctaaaaagcagtcttagtaattaactttaacactgttaattactgaacaaaacatatgcagatgtttctgaaatgtcattttagaacagtaaaggatgattaggatcctcctttccttttttcaaatgatgagtatataaatatatgcctagaccattagagtaggaaggacaagactatagcaaattcagacaggctactccctttttccagtgaagaaactggggagatgaagggctgggcagcttacccagactccttggctcagaccaagattcaaatccatgcctgtctacagatactgcttttaagcaactgtgtcatgctttgccttctatgtacatattcatatttattgtattgtttcttacaaagacccatagacatagattaagcttttcctgttctatggatggggaacttggaacacaggaggctggagctatggaaaggacaagcttgcccaaggtcacactgctgggtgatagctgagctagggctctaatctctcttctgactttgaatccagccagctgtccatcctacctcattgccatccttgtctgaatttcagcatagattttacctgtctcctgatcaacagcactacaattaagatctggacaggtttttgtttattttattgttattttggccagtctgagctaggacttgtacttgagcttttagaacatatctcccttaaaagtaagcagaaaataaattatgtgcaaaacaggaatacttttgtgaagaaaggaatctctaaatcagcagaggccttcctgaggcctggcttcaaggtctagcctttgataattaagtgggttaaggtctctaagacatgttaatattaggtaatcatctaatgaaagtcacaaaactttttggagtctcagatttgcattaaagtcagccctatgtgtctgtgggttctgcatttatgaattcaaccagccacagatggaaattttttttaaaaaaaggttagttgtagctgtactgaacatgtacagctacatgtcattatttcctaaacaatacagtataactatttacataacatttacattgtatcaggtattataagtaatctagagatgatttaaagtatataggaggttgtgtacaggttatatgcaaatactacactattttatagaatggacttgagcatctgtggattttggtatcatggtgttggggggtggttctgggccaatccgtcatgaggatactgagggacaactgcatttcatagagaaagaagatatgctgtattgttctcaaatgccatgaaatcttcagggaaacatgcttcagtctgtgtgaatatcagattaacaagatatgtacctatcacgtagttggttcactcaacagcaaataactgagcacttactatgcatctgtaattatgctaaggtgctgtagaaaccatgtgagcaaaaaagactccttccctgtccttatggagcttactttctagtaggggagcctgagaatagtcaaacagattgttagaaattataagtagtgtcctgaaaaagatgtaaccatatggtatggctaccacatgacaacacgaaaaacaaatagtctgggagtcatgaagaacttttattatgaagtggtgtttgagctgagaagtgaggaaggatgagtaggtgttaactaggctgtgtgtgtgtgtgtgtgtgtgtgtgtgtgtgtgtgtgtgtgtgttcggcaagagattgggtgggtaggtattacaggcaaaggaaatagtcttggcaattaagggtgcttagcccgtttgatgtaatgagagaagctgtggggaccccagagggaaggaagaatggtgcccaaaggggctagagagagggtcttgcaggctgcgtaagggttttgcttttatcctagaataataggaaactaataaacaattttaaaccgaagagtgacatgataggatttccatatgaatatttgtccatctgctcaatgtatattctgcattaaaaagtgttgtcccatagcttacacagattctcaactttcaagcgtgtagttcttttattttaattaaaaaaaatagaaaaaggcaagagaaagtattaaccacaatgaaaagtatgcatttgattgtgatctcttgagcagtactgccatggtgttacttccttttcccatcagaggatgttccaggaatgtgaatcctcttcctgtaacattccaccaagaggttcaccgggtgtcttgtcttcctgccagatctgcgtggtgattgctgccgtgttcgggatcgtcatttaccgggtggtgactgtcagcactttcgctgcctttaagtgggcgttaatcaggaataactctcaggttgcaaccacagggactgctgtgtgcatcaacttctgtatcattatgttgctgaatgtggtaagtgagctgcagtggctagccaaacggatcaaaatgtgtgggctgcaagtgacagttttcttctgttgctaaggggatctggcctcagagaggtgggccattcacatagcactgatgtcctggcagcgaagtgcctggcatgaagatgcacttgggtctgagtgcttaaaagtcttgattcaaatctagactccgggcttttctgcagtataagattgggcaaagcacataacctctctgaacattagttcccttatttatccaataagattatattgtgaaccccttaagtaaatttagagaaagaatttagaacactcagaacctgtgacacagcattgcaatgttggttcctgtttctttttgattatcaatgataggaagatagacagtatccaaagcattcctggctaggtacaggggctcatgcctataataccagcattttgggatgctgaggccagaggatcgcttgagcccaggagttcaagaccagcctaggtaacatagtgggaccttgtctctacaaaaaaaaaaaaaattaattagctggtcatggtggtgtgcccctgtagtcccagctgctttgtggggctgaggtgggaaggtcacttggttcaggaaagtgaaggcttcagtgagcagtgacagggccactgcactcagcctgggtgacagagggagaccctgtctcaaaaaaacacaaaaacaaacaaaaaccaaagcattccttgatataaccctgcaaggaaaccgccaagctggtacatattgcttttgttgatttccaggctttttcagatagcatatttcagcccagatttctttcctgaatccccaaactcacacgttaaactgcctgcttgaccatctccacctaacactttcaaacccaactcctcatcttccctccagaatcagctcctcccacagccttcctaattgtacttgcccagactaaaagtcgtggcattctactggactcctctatttctctggctgtctaaatgtatccagaatttgatcactttctgcacatcccgaagtcccaccctggtccaagtctgcagtgtctcttgccgagattattgcagcagcttcctaactggtctcccagctttcacattgctcccttcaatctaggctcaacatggaagccagagagagcttcttacatgtaagtcagttcacatggctcctgtgttcacaaggtgtagtggctttcctctctctcacagtaaaagcctgcgaggccacatctacacagtggcctcacgggctttcgctcatctggtctgtgtgacatctctgacctcatcttttcttttactcactgtgattcacctgctccagccgcacttgtccttttgatgctctcaccccaggactttttttatttgctgttctctctgcctggagccttttcctcccacagggtctgcatcgcttagtccctcacctccttccagtctttgttcaaatgtcacttctctagtaaatgcttccctggtcactctgttttaaattgcagcccactcctgctatctgacaatttcccatctgcttgcctgtgttttttctatagcatttatcaccatctaatatgctatatattttacttatttattttgtttatctgccatttcttttggaatgtaggcccataagggcagaagcttttctttattttgtttgtttgtttatttttttttcactgttgttattccctagtgtctggaacagggcctggcacatagtagatgctgtgtaaattgttgttgctattttttgtagaacaaaagtagtgcctgacatggtcggctgctgaggtcaacctatacataaaaatatggccaggcactgtggctcatgcctgtaatcccagcaccccatctctacaaacaaaatttttttttaattagccaggtggcacacctgtagtctcagctacttgggaggctgagatagggggatcacttgagcctaggagttcacgactgcagtgagtcatgattgcaccactgaaccctagcctgggtaacagagcaaggacctgtaaaaaattaaaaaaattttaaaagctgaccttaaaggtttgtagtgtaaataagtaaaacaatgtacatagagtgccaaggacagttgttaggcatggagtagatgttcaattaattatagttcccctatccttatttatactgcgtcttaaatctgggccataatgctgaaatgcttacatctttgaaaaaagattttccaaaggccaactaatttaatactattatccatacaggtttatctatgtagcttatcatttctagttctttaaacaatcctgagttccataaccaataaaacttgagtgattcctaagagaattcaacctacccaataacaaagaacttaatttatgatcactaggttaactagtaatcaatgagctaattaaatgcaggtagctcattattagtattaaaatacataaaacatctttattattttaggaaaaaagtttcaagactcagaagtaataaaaaaaaaagggcagttgctgatcattttgacgtgatgtttgtgcgacagcttagcaagtggagattgaaagtagatggttagcacttcctgtacctcccccttttgaccccccaccaggactcggtctgtgttaactgtggaatacacattgtaggtagagagtgattcctagtgaaattaaccaaacagccataggtgaaatgttttgcatcccattaggatgcaatgaattaatgcctactatattgttatcatctatttcctccaatgtcttaaaatttaatttatacatcttcttaacaaataaatgcctgtgtggcatgggcaaaggcttcatgactaaaacaccaaaagcaatggcaacaaaagccaaaattgacaaatgggatctaattaaactgaagagcttctgcacagcaaaagaaactatcatcagagtgaacaggcaacctacagaatgggagaaaatttttacaatctacccatctgacaaggggctaatatccagaatctacaaagaacttaaataaatttacaagaaaaaaacaaacaaccccatcaaaaagtgagcaaaggatatgaacagacacttctcaaaagaagacatttatgcagccaacagacacatgaaaaaatgctcaccatcactggccatcagagaaatgcaaatcaaaaccacaatgagataccatctcacaccagttagaatggtgatccttaaaaagtcaggaaacaacaggtgctggagaggaggtggagaaataggaaagcttttacactgttgatgggactgtaaactagttcaaccattgtggaagacagtgtggcgattcctcaaggatctagaactagaaataccatttggcccagccatcccattactgggcatatacccaaaggattataaatcatgctgctataaagacacatgcacacatatgtttattgcagcactattcacaatagcaaagacttggaaccaacccaaatctccatcaatggtagactgcattaagaaaatgtggcacatatacaccaaggaatactatgcagccataaaaaaggatgagttcatgtcctttatagggacatggatgaagctggaaaccatcattctgagcaaactatcgcaaggacagaaaaccaaacaccgcatgttctcactcataggtgggaattgaacaataagaacacatggacacagggtggggaacatcacacaccagggcctgccgggggtgtgggtgaggcgggagggatagcattaggagatatacctaatgtaaatgacgagttaacgggtgcagcacaccaacatggcacatgtatatatatgtagcaaacctgcacattgtgcacatgtaccctagaacttaaattaaaaaaaaagaaagaaagaaatgcctatgtacaggaagtgaatctgtaaatacacacttgcccatatgtttcgagcaggtgccagtgttgtcagagtaaaacacttcatttaactggaaatcattgatccagcaatatctatttcaagacacagcctagataagaggaagtaaacaaattcaaaatgaagacgggagcatagggagtggcaaaagtacgtagttgctgatgttacaaagcacctgctatatgctgggagctaggctgctaggcattttacatcttttgtctcccagagtgttttagactagccaacatggatgaggtagagttcacactcgaaagctaacacatattattcttagggatgcccttgtggtttttcatttattttagatataacatgaacatctttggtactctgattttcagccaacatcaaactagaataacataaggttgctaacgcaagaatactgatgagaacagggaatgacaagccatagcaaagagagggaaagaaaagaaaaaatgtacataagaactctaaaagcagcatcaaccaggacctctttgtgcaggggccagttatcttaccctcctcagctatctgtgatgatgtctcatccccgcacacacatttacactcctgtcccctgaggttttgtgggtaccattatgagggcaaccaaatgtgtaatatagttggaatggtttcatcagaacatcttaaaaaaattttaagtcgtttctatcagcataagggatgacagactaaaggttgtaatatagctttgaccagttcagaagtaaactctccagtggcttctgaaattactcaatgtgagatattatcgtgacccaatatagattttttacagctgtctattgttttcaactacttaacatattgaccatacttttcttccaaaggtaatcattatttagacattaattattaataatttttatcaactaaatataaaaaccttgagagctagattaaagactctgattttttaataattattataaatcacatatcccatttctgactttttgctagatttgtccagtgctaactaaaataactaaaatatttttatatagtatttactttaaaatttatattatttttacaaaagccctctaggtcctaatgaaatattatgcctcttaatggctggttaaggggcacttagtagttcacattttattccgtgtcttgaaaaataaatatttcaaagatagagtgaatagaagtgaataggatggaatttcttgttcccgatcatattgtctcaattctgttctgcttcactagtgaccgaaaaacatcccaatatggtggttgcaagccaaataggccaacaaaggctatatcccaggaatagactaaaaagttattatcatcctttttatccagccatgccaatctgaatcagatatttaattatactataaacacatctcatcttccaaaaaaaaaaaagtaaaagtacaccagataatatagcttgcatcagagcaagtccacatttattgatcagcctggcaagataaaagtagaagtacacacagcttccttttggacatatctgtaagatcagaaagctttctgccggttacagatattcacaatgagaatttgcagcatccagtttggaaacttagattttccactgctcttagcagaacaaacttcccgtggtttatctctcaaccgtctaatgagaaatcagacatttttccagaaaccactcatgtggagatctctgagcggctgtgagtccctctgtgtgtgtgcccttccctcctgcatcctgtccaatgtctcacagtccatatccttatatgtatatccttcagcatatatatgaagtagtcacagatgccatggatccctactgtgtccctgtatgctttaccttatttttcacaaggttaatattactcatatgttgactcttatgttgttcctttttttaaaattacaatgttttcagtgttcacacccatgtaacaaaggcatatcctcagctccgagggccttttagacaagtgtgcaaagtgaggtactgtgacctacacatcattgtgaaagacataaaagataaaccagttaatcaagaattgtatttttgagaaaggttgtctcatcagtcaaattaattttccctgataattacataattaaataattgtaatgttataatgccttcgtaatacattgtaatattaaaatatatttgattagaacatctgttcttatctgttgtttactaggattttgtttttatgatcaaatgggtatgactaacctatgtcacaaggtttcttatggaaaatgacaccaatctccattaccactggactccaagagtctgagatttctagacataagatttgttcctatgccatattaatatatcctaatatagcaaaccataattgttgctgaaagtttggagtcatacatacagattatgttgtttatttctgtaattagcagaaatctcagataagagaattcaaaaattaagcaggacaggaaggtcagtaagttcaatacccatcctgcccacatataaagaaaaggatggtctgaagaagagataaggaacttgccaaagtcctgtagcttgctggatggtcaagctgtaattccagcctgggcaattttaaccagtgtgtttttactactttcatctaaatgtgttcttaatcttcatattgttccagtctattaaactacttttccttttcattttcacttaccgtcttttgttttagaaacagcacttgatgtttcaattatacccactctggggaatttcctagagctggatttaccctagactatactctctgctccttggtacacacacgcacacacaaacacacatacacacatgcatacatgtaccccaccctcagaaccatctattgaccagatggctgggtgagttaaggatgcgtgagttaaggaggcatcgggtccaccaatggaaaagtggagtaccataagctctgggaatttccagtaatgtttaatcacttcagtgcttttgaatgctgtaatctagagtttacagcagtccataaagaataggattgcaggatcttaccatcagaagcgggcttagagattttacgttcaagatgcagaggttcagcaatattatgactacccagcactgcctagaaagctggtaatgaatagcagctagccttgttgccataaaattattcgccccaaaataagaagtgagattttataaatagttagataggaccttgtacatttctttcttgccctgaaaattacgctaatctccattaccaatggactccaagagtctgagatttctatacacaatgttttcattggttgagcaatggatgcttaatgaaattattttgactcgtgatttgactccctatttcctttgtgattatagattttataatacgtgcagttcatttattaaatgcatgaaatttattttacagctctatgaaaaagttgccctgcttctgacgaatttaggtgagtggaatcctttctatttcatagaactgtactgtgggctagagagtatggttcaaagattcctttctctaatactgctggaaagaaatagtccctttattttaaaattcatacaacaagttttttctttgccttcaacagaataatttaaatatgtctagtaatttttctatataaatctttaaaatctgtcacaaacattatctgtcatgagctaatgtaatttaaggtagattttctcttcatgcacaaaaaatagcattacaaaagtacatttgtataaagtatccagtataatttaggaaagtgttcatttgctattgcctataatttttgtttaattaaaaatgtatcaagtttttatggtatataaactcacagcaaagttagtttctttgaagactggaaggccaggcatggtggctcacatctgtaatcccagcactttgggaagctttggcaggaggattccttgagtccaggagttcaagaccagcctggataaaataacaagaccctgtctctacaaaaaaattaaaaaattagccaggcatggtggcatgtacctgtagtctcagctactccagaggctgaggcaggaggattgcctgagcccaggaggtcaaggctgcagtgagtcatgatcatgccactgcactccagaacaatctggtaaccagtaataacttgtacatttatcacattttcaaaataaagaaattgtcccaattttattaacaaggtattggtcattgtgctccatgcagtttgagaaaattacatgctcccgtccacaacttgctttaatgcattccataagaagcttgtccagaggagaaaaaactcacaaaagtgttcctatttttattcatcattctgacaacagatagcatttactgaaactttctatgagctggatacagagctaggcactttaccttatctcttttaatgtcattgaaatcttccatcaccaccagttcttgcccaaaaagatagaagaggtttatgtccatggaagaggtaactgcccattggtagacaatgtaccctgtggtagcttgatccaggctagcagaaatgccattggaggtacagtcctggtccatccacggtggggacacctgggaacctagctggtgaccaggagacctttccatgtaaccaggagttcagtagcagaagtgaaaccctttaagaaaaccctttaagaatcctgtgtctttttggccctccgcaacagtatggccttgtcctaaaactgacattttaaaccattttaaatcagatttactttcattctcccttcccttctcagacatgctccctaaaagcattttgagttataatttgtggaaatgaattgattaaatgaagtattaaatgagaaatcagacactcagggaatgtggaagcagacaaaatgctactgtattaaatacatttcattagacattgcttgctcatagaatgtagctcctgtgaaaggataaattcattcgacatgagatctctagctggagatttgatcttaagggcaaatggatccatgttttggttcacaccattatgtccagagaacatttgctttatggaagttgaaatatatggagatgagattggcccctgactgaggtcaggaaattataagacacagatggtgatatgaattaaaacctctaaagatgatgccacctccttgatatttgtccatgagaatggaaaatgggggataagggtaaaagcaaatgagtcaaatgctcttagccttctatgataggcatttgactccctcttaagcagtaggttggtataatatgagaactagaagttgagaccaaggaactctttggagctgggaggaactaagcctgcatagattaagaggaaaagaaaaggctactgcagagagccacgactgggaatgaggcctcgacagcctggctgtctatgctgctggctctccaggtatcctgtaagagtggaacagtctaggtattcaattctatcagattcttccatagccacttctcatgagacccttgttgggtctggtctgtgagcttgaggatcctatgagtggtctgttccaccacacgccatccgtgggtaaactggagtctcctgcagcctcctcaggactcctgcgtccccaccctgtgtgtgtggggagggaaagagagggagttgagaggggatgagattcagcctttcaaactctgctcaccttttgtccacagaacagcctcgcacagagtctgagtgggagaacagcttcaccctgaaaatgtttctttttcagtttgtcaatctgaacagctccacattttacatcgcattcttcctcggaaggtaagaacctgacccctgcacacctccccaagctgaggacagaacacttagaaggcactgactcgtggggacagagaagccctcccttagggtgatttatacaaagtgtaaaaagggaagagcatcctcctcccttctcttcccaaatctcaaaaccacctggcatcccagggaaatcatctccactcaaaactgtctgtgcaccttttgttgctaagataagcagaggaaaatagtttgtgcatgtgagtgatgcattgaaaacttctggcctctgtctgcacctgaatcaggcccctggctttcccacctatgacggcaggtggtacaacggggagggggctgtagcatgtcctggattcctgacttcacttaaaagggaaggacatcctgacaggaaagggggcaaaaatgggatacagaggatgctgggtaacttttaaatccagcagttatgaggatttgggaaagattccctgggtagtggtaatgtcgcatgaattcccttacatctggaggcatttcagaggagatgggaacctgggaaggaccaggtatagggttttggtgagatcaacacagcagtctctccttcatttctagctattccagcagcacaaaattctaggcaaatagttcaataatttttttaacagcatgactattactcagaaaaatcaaatgtgtttaaatccaggagtaaaacttctgcttacacaggtcagagcaattgatatgcagcagaaaatgttgaaagtccacagcaagcagcaagaactggcttctgctttaggcagcctgacagaaaggccagaagagacatgtgccctggagaattccagaagctatggttatgacagatctggagggtttcctaattcccccagacctactacttatagtagcagtcattcacattggagaatgtgctaaactaaatgtaatattcgctgaaagcttggacctagagcactaatggcttgtttttctctgtgtgttgaagatttacaggacacccaggtgcctacttgaggctgataaacaggtggagactagaagaggtctgtattctcccatcattccttgtttccgacagacttgcattaaacagccttagggcaactttgtgtagattataaaccagacaccctttcttcctctccattgattctggaatttctgtgtttgcttaccttgcagtgccaccctagtggatgccttattgatctgtgtatgcaaatgggtattataatggtgctaaagcagacctggaataatttcatggaacttggctacccgtaagtaccttagtatcaataattgagaggcagcattgctcattattggcttttctaggtgtggcaagtaagataagcaatgcagactcagcagttaagccagtgcgtgcacctggaactaagtgctcacatttagacatccaaaggcagccatgaaaatcataaacattggctcttctgggagatttagcacaattcacatgaacaaacgtgaatattctttaaggagactctttaggcccctaaatattggatacttgcttgtgagccactttaaatacctctgacctttcgggctccagcattgcaagtccttagctatgtatgacacattaactacatctccactctcccatcctcatggtaaggctggtgataagatgttgacaacaatgagcaaaaccttgcatcaacttggtaaggatgaccttgaattctgctgtgtttgctcagttatggtcagttaagttttaatggggacataaatcaacaatgcttctattctgctttaattccacacctattggtttccatgtcagctcaatgtctctgtagagacaaagaaaactcaaggtttcagggaggaccactcagccagaacgattagtgggaacttggttcacttcagaaaatcttttcttagctctctgtcagaaccaaagccagtaattttctgttcttagatttatttttagaaatcttgttccaagtatttgatgttttctataaaacttttaaaaaataaaacattaaacaaaaattatcagtgttgtattctactttaagatataaatcacaattaaaatgtcatagacatcaagagaattatattttatcttctgataataaggacatagagcaaaattgtaaagtaggcagtttgtctttgatgttcattcctttatttgcttcatttcccatgtgttttgttttttggcccttctactcctggatatccttcaactttttccttgtcctgtacagaacacagacctgcctccaatctgtcatttcctcaatgctttctcatattacaaaatgcactcctgaacactgctaagggttcctgtgctaaccttaccaatgccgggtgcattttactgggagtcagagtccctgtggagagctcatgccaaaagcaaacaagtccagttgtagaactgcaggtgtttgtgtgccaagagaggaagcattttgtgggtttgcagatctttaggcccctgatgtcagagtatacagctcagcacccatgtagcaagactgctcaagggtcctaaatcaagccacttaagccagatattcctcaagatatcttggtgttgcctttgtactggggtatccatttatagatattctcagtcctctattcaaccctcataggcaatgcccaacatgagacagtttcatgaatgattaaaacaagttcatcaatcattctgtttacttgcaaatataaatacttgaagtatagactccattgttattttcttcctaacctgaggctttatttctttgatagcctgtcctgaattttttcaaactattgtttctgtattcaaactctcctttttcttattacctaagtcatatgatcagttacattttttgtaagaaattgatctttttgcccaggttaattcagaattggtggactagaagaaaagtacgacaagaacatggacctgaaaggaaaataagtttcccacaatgggaaaaggactataaccttcagccgatgaatgcctatggactcttcgatgaatacttagaaatgagtatggaaatattctactttatcttattaattataaattttagatctccaggtatattcaactaaacatatacccgttatcatcaaggtcctcagtgcgtagggattcctaaggcaaacagagaggaaggcatgtcctgcttaaactgtgctacacttacatttaaggaatcagatttctctggaatcaaaccgaagctatttctcttagcacgtatctaagaccatgggctttggaagtaaattatctgggttcaaatcccagccctatcatttattaacggtgaaactttgggcaattacttaatctctctttgtctcagtttcctcatctctaaagtgggaataataataagaggaaccatttcataaagtctttgtgtggattaaatgagttaatgcatgaacatgacttagagcaatgcctagctcactatgtacttggtacatgttacttatatcattattattctcttattctttttgtcttctggagggaaaggcaaataaaatatcttagataaattaagtatgaatatattttctttcattattaaattgaatatgtatatatttcctttcattttaagctctaacataggagtggaaatgagggaagggctgggcaagaaccatttcttctaaaggtagcagttctttctggtcaaattagaaatttaaaggaatagtagaattgatgcttaatgtttcttaaattgcttatgttctaagtatctacttatgtctttagagtttcaattatagaatggaagaatgatataacctagggaagaaatcaatttggacattaaaaataaaacttaataaagagaattcattaagagaactaaccactttgagatccttaatggattcttctcccataaagaagacaatgaacaataatgttggtatattgagtgcttaaaaagaaccttttatgtggctagaatttggtagtgctccaaatcctgaagtatctttgcaacacaaaacaaatctcagaagtatcacaagcagactgatgagttctaactgctcacttctgttcttttgtttttgctattttcttaataacttccccactttgttatgtactttaaaatgtattcactgaagtataatagtggaaaagtgtatataagtgtagagaccaatgagtttttgcaaatttacacacaaatgtaaccaaatatatgtagatgagaggttggcaaactattgcctgcaggtcagattcagcccactgcctgtttttgtaaataaagttttattggaacacagcaactcccatttatttacatattatttgtggctgctttggcactgcaacagtagagttgggtagttgtgtcagaaagtggctggtctgcaaagccttctttatttctagaaaatgttgctacccagtgagctagatcaagaaatagaatattatcaatatcaaagaagacttctttgtcccctcttccatttataacaccctctctaaccactttcctgacttctaacaccatagattaactttacctttgttattctccatttaaatgtaattgtagagtacataccctttgtagttggcttgtttcattcaacatcatctttctaacattctcccattttgctacaggtagtagaacttcattttattgctgtatagtattcctagaatgtagaccaggagccaaattatgaaacaggagtttgtctttgacacccaccctcatctttccttagtcatgtgggtttttctgtttgtttgttttgttttgtttgcatttccactcccagatgagccccaactttgtcccctgctgccctgacacagcacacagacccctataccaccatcaatccctcaaccctccacatatcatgaaatgtactcctgagcactctaaataataatatgctaggtaactgcattttaacaaaagcaaagcctctgccaagcttgagtcaggaaaaaaaaaaaggcaaattcacttgtagaagtgaagacatcagtgagccaaaagatgagctattttgtgagtttgcagatcttctaggctcctgaataataatgtactgttattgaccaggcgtggtggctcacacctgtaatcctagcactttgggaggccaaggcaggtggatcacctgaggtcacgagttcaagaccagcctggccaatgtggtgaaacgccgtctgtactgaaagatacaaaaattagctgggcgcagtggcaggcgtgtgtaatcccagctacttgggaagctgaggcaggagaattgcctgaacctgggaggcagaggttgcagtgagccaagattgcaccattgcactccagcctgggagagagagcaaaactccgtctcaaaaaaaaaagaatgtactattatttatccatccattctactgctgatagacacttgtgttgtttccaaatttaggctcttataaataatacctttacggcatttttgtacatgtattttgattaacatacgtagatgtttttattaagaatttacataagagtggagttaggaggccatagatatgcatttgtttgtctttaataaacacttgaaaacagtcttcaaaactgggctgtgccagtttatactctggctaatagtagaacagttccagttattccacaaacttactaaaacttgcgttcgtattttagccatttgggttggtatgcagcagtatctcatcatgattttaacttgaaattttatgataactaataatgctgagcaccttttcatatgcttatagttatttggataaacttgtgaatttatattcaagcccatgttttttttgtgggtatctgtcttttccttagggatttgttatttatatattctggatatcaattatttgtcagatatatatgttgaaaattaaatatcacttctcagtggttggcttgacttctcattctaatggtgtgtttaaatgaaaagaaatttcagcttcattcttcttcaaaattgttgccatataagttttagaaccagatttctaatttctataaaaatcttactgaaatattagttgggattaaattgaactcctacatcaatttgaagatatttgatgtttccccagtccatgaaaatggtatacctttgcatttatttatgtctttttacatttttctcagcaatactttttgtagattttagtatataggttttgtaaaatttagattagagttgtttctaggcaccttaggaatctttgtgcaactgcaaatgatgtttttattgttttattttctaatgttttgttactaataatatacagaaatattgttgttttgtatgtttgcttatgcaaacttgctagcatctaatgtcaattagagttgcttatatattttttgagattttctaccatatatacataattgtatcatccacatataatgataactttacattttcctttttagtcattttatatatatatatatatatatatatatatatatatatatatatatatctttttgttcttgcctaaatgcactaagaccttttatataatgctggataaaattgatgatactggacatcattgtttctgacctgagggtgaaagtgttcaatatgttaccattaagtgtggtgctagctgtattgttttgtacatactttttattatttccttaaagaagttttcatatatccctaggttgctgagagttattatcatgactagtattacattatatcatgtcatttttctgaatctattgaaatgattatgtgattttttaaaaaattttactaatgtggtggatttcattgattattttttgttgttaaaaagttgttaaactaacctagcaaacttggaaaaaatgcccacttgggtcaccatgcatttttttaattactaagttcaatttgctgatattttgcttatgatatttatatatacattcatggaagatattatagtgtagtttttctttcttgtaacgtttcatttagatttgggtatcatttttatgatagccctttaaaatgattgggtaattatttttctcttaagcagtttacataagattactattatttctttcttacatacttggaagaatttacaatgaagtagcaggacttgaaattttcttcacaggaagaactttaattatagatttattttacttaatagatataggactatttcatttttttgtttcttctagcatctgttttcataagctgtgttttagtcatgtattttttcaagaaacttgttcatttcatctaaattttcaaacttagcagcgtaaaattgtttatatatctccttattaactttttatgtatctagggtgtatagtgatgccctttctttcacttataatttcatagtttgtgcttttctcccttttttaaaacagtaccttagaggtttattaatcttttcaaaagaaaaactaactttggtctttgttgatttttctctactacacatttgccttttggttcattcatttctgctcttatctttatttccctcctttacttcctttgggcttaatttcactttttttctcagcatctcaagatgctgattttcagattttctttttttctaatataggcattcagagctataatgttctctataaatactgctttggctgtatcccacaagtttttatatattgattttattagcaaaacattttccatttcccttgtaatttattttcgactatgcattttgaaggaatgcattagtatcaaaacatctaaagagttttgatatattgctctgtcattgattctaatttaattacactgttatcagagtatattctctacgttatttcaggcttttgataatatatatatgtgtgtgtgtgtgtgtgtgtgtatgtatgtgtgtatatatatatatatatatatatatatatatatatatatatataaataaaaagatttaccttatgctcctttataccatctatgttgatatatgtttcaagtatgttctgcatttagttgtttggtataatggtctacatttttatgtcaattaggcaagattggttaattgtgtttttcaaatcttctaagtccttgttaaatattgtgcctcttatctactagttacatacttgaaatccccaagtatgattgtggatttgtcttattctatttttagttcagtcaacttttgctttatgtattttgaaactgggttattatgtacatacaagttggattattctgacttactgttgaattggtgtttttatcattatgtaaagtaattattgaataatgcaacactttgaggatatgatgggcaggaggctgaagagctaaccttaaaacctttcaaagggcagaagtgagcctcttattgcctctcagagctaaggagatagggacccagcagtttctcaatcacagcaaaggaacaagaacaaatcaaaggtggagtaagctttacaaacactctatgccagcactagcccagcttaatctgtgaccagctttaagtgatttctcttatctgcctaacatcaccaggaggaattctttctttatggtagaaaagaacatcactgaaagcggagtatcacaaatttgttcctaaagaactagatagtaaataattttggctttttgagccaatggcaaaatcaaggctattttgtagacacttttacagccatttaaaatatagccatttaaaatgtaaaaactattcttagctcacagatggttaaaaaagaaaatcagatggttggtcaaatttggccacaggccatagtttgctgacccttgatctagagcctctacatgtgtggcatacaataaaaagattactaggtatgcaaaaaggcaagaaaatgtgactaataatcaagaggaaaaaggagacccaaagatgattcagaaattgggtttagcacacagagactttcaaatagctatgatttacgtataaaaatagaagaaaatactgacaaaaatgattgaaaaattaagacttttgaaagagaattaaaatctataaaataactctagaattgcaaaatataaatctggaattaagaactcatttgatatgtttaatagcagattgaggctgggtacggtggcccacgcctgtcatcccagcactttgggaggccaaggttggtggatcacctgaggtcaggagttcgagaccaacatggcgaaatcctgtctgtactaaaaatacaaaaattagcttggtggtgcgtgcctgtaatcctagctgctctggaggctgatgcagagaatcagttgaactgaggaagtggaggttgcagtgagctgagatcatgccactgcactccagcctgggcgacaagagcgaaactctgtctcaaaaaaaagaaaaagaaaaatgagcagattgacttagcgtaagacagtaaattagtgaacttgaagacaagtcaataaaaagaaaatccaaacaagcccagagaaaagaacagaaaaacagagcagaaaacataagaaacatgcaaaacagccaaaaaggctgaaatatttgtaagagaagtcctagaaagaattaaagaatgagaaaaagtgatatttgaagatgtaatgtctgagaaagggtaaattaaaaggaggtaaacttatatattagaatataaaacagttaaaagttgaactaggtctatatagatcaagataatatctcaaaattatcatgtgatatgaacagggcaaaaaaattgtaaataatgatattatgtaaagtttaggcacaaaaattatttacatgatatatgcactatgtataatttattgatatatggatattcatgtgtgtgtgtgtgtatatatatatatatatatataaatgaactggaaggatgcatgcaaaactcatgtcagcaattgtctctatgaagggagaggaaaccactcaagagcaaaaatagaggagaattcagttttatctatatagtatttattttatttataaaaagatattaagcaggtatgacaaaatgttaccaagagttaatactaactcttccatgggtatatggaagtttgttatatcattctttatgctttccaatatttaaaagttttttcccaaagaatttttaaaaattaatctacctctatgctacaagtctcttcccttgaaaaaaaaaagcagcagttaatgggcattaatcacttcaagaccaatatcatgtgggtcacctttgtgctatgtaaaaatgattggttggtttggttttaggccataatatttaactagataatgaaactcattaggtgtcagataaacaaaaactaccaatgaattaaacacattttctttttaaacttgcagttattttcattataaatataacctgaaagaactaaactctagttgctttttctgtccataacatccattactgttagtgattgtaagaattatctctgtcagttttatttctacctgataggttttctttgtgttctggccttcgttgtaattacatgtcagtcattgaaccagcattatttggtacctgacaagtccttcccatacacaaaacccctgtagtgagtatgtaggaaaaagaaacataaagaagttgctgtttctactttcatgaagctcactgcaaaaggggaaaaaggcaaaacgccgtaaaatcaagacaaagtaagttttatggtggtgagcagagttgtggcagctacagaggaggtagtagttaattacaattatgaaagactcaagagggtatatttgagtactcttgaaggtagaatgactacttcatcaaagtagtcatagcaacactgcatatatgctgtatccccataaaatcagaagactagtgtggccagagtagaggattgtttgggaaacctgttttctgtgtggggtgtatttggacatgaggcttggaagtttgcttggagtcaatttattgagatccttgaatggcatggtgaagtttcggatttattctgcagccagtgagaacctactgaaacattttgtgtagggagatgagtgatggggttgaaccaacattttaggcacactgacagcagaatgatagggaagggagctgaaagtttggaggcaaaaaagtcagttagaaaatcagagtctgaactcaagtggggacagtggagaggagggagaaatgagagacatttttgaagagtaattgtcaggactaggaggctaatggttctgaaggctaagctagcagagacctggtttttatgcaagttgattcagaagggaggaaacgagaagggacataaaaggataaatacgttcaaggatgaggttcagagattggtttggggagtgctgtttctgtagcattacagacaactggaaattccctgaaaagagtcagggttagcgatagagaattgagaacccttatcagagagataataatgaagtcataggagtagatggacttaccaaggaaagagagaaggcaggagaaaaataaaaccaaggttgaaacagaagggaacgcccacatctatttgtgggtaaagagccacctagcacaagcactaagtgtgaatgtgaccaaagacaggggacacctggaggtggcagtgtaaccaagatgaggtagatggactctgcagaactctggagctacaacgctgggattagagtcctttcttacttaacttgttttgggcaagttacctgacctctttgtgcgtcggtttccttacctgtaaaatgaggataatagtagtacccaccacctaaggttgtcatgaaaattaaatgagttagtgtatatgaagtaattagaacaatgcctgtttttacatagaaaatgctatatatgtgtagtcattgttttgttgttgttactttctaaaataaagtttgtaaatatattttttactatttttacagtcatatatgtatatatacatagtcattcaaacagccaaatactttttgtccatgatgcccagtaaattttatttttttattttccattatgatgactggttgttttgcatcagaaaccacctccttttgaaaaaatttttattttgcaagttgcaaaaagagtagtttctataccttacttttgctaatgttaacatcttacatatttattaaaacaagaaaagttaagaatacaatgctattgtctaatccacagaccttatttgaattttgcattttcccagtaataacttttttcttgttcacaatacttccaagatccagcattgcatttagatatgttgtctccttagtttcttttaatcaatgacaattcctcagtctgtctttgtttttcatgatcttgacatatttgcagagtatttgtcagtagttttggaaaagctccttcaattcaggtttgtctcgtgcgtttgcacaattgggttggggttattcatttttggcaagaataccacttaagtgatgttataccctcctcagtgcatcatatcggggtgtgtaacatcattatgtcttgttactggtgatatttactttgatcacttggttaaaattatgttttcggctgggcacggtgactcacacttgtaatcccagcattttgggaggccaaggcaggcggatcacaaggtcaggagtttgataccagcctggtcaacacagtgaaactctgtctctactaaaaatacaaacattagctggttgtgatggcgggcgcctgtaatcccagctactcaggaggctgaggcaggagaatcacttgaacccaggaggcggaggttgcagtgagccgagatcgtgctgctacactccagcctgggggacagagctagactctgtctcaaaaaaaaacaaaaaacaaaacaaacaaaaaagatgttttccaggttcctctgctaaaaagtttctgttttgtaattagtaaaagttatgtgaggagatactctgagaatctacaaatatcctagtttcttcaatacacttccccctactaattttagcattctttgatatttcttgcctacaaaaattattactgtgatgtttgactaatggtgattttttaattttcatagttcctcctatgttgattaattagaattctaccataaggaagagccaccccttatctcccatttatttatttaatcacttatttacgtaagtatatatttacatcagtctggacttagatacttagtctttgggtcataatcccatgctttcattattaatattctttcatacaaattgttccagatttggccgttaggggtgccttcaagtttgttctgtgtcctattggcatgtccccatcatttgttgagcatttccttcctttctggcatcacaagatgtcccaggcttctcttgtattgtccctaccgtagctctggaatcaaaccatcctccaaggaacactgattcctttggttagagaatgatatttaggaaacaagatctggatcctaggtgtgctcatagctcccaggattccgttgcttccaggcccaggaagtgcctctttttccagtctcctggccatctttctggaagagatatcccctgtgcgtctgtattgggaaaaatgggacttaagacaataacatattcagattatgatccctttgaaaatagtaatggaaaaccaatactctctgctctttttccttttttcttttctagttcttcagtttggattcacaactatctttgtggcagcttttcccctagcaccacttctggccttactgaataacataattgaaattcgacttgatgcttacaaatttgtcacacagtggaggagacctttagcttcaagggccaaagacataggtaagttggatttgggtatgtttttaaaaaacatattaaacatctggtggataaaattttaaaagccacaaactttagatttttaattatgttttccatttaatataattcacctaatttttgcaaagaataattatattagttttaaataatattagacaagaagtaaagctacctatttggaagtttataatttccagtgctagagaatttgtgcttaaatagagtctcaatttgattatttctatcttaagattctagaatctaaaatttagatttattatcacttatatcctttttaaaatagatcttccatttgcttaaccttgatttgttctttcctaaatgtttgcctgatttacatgaagtataatccagtttttctaacggcagagatgaactttggtctttgactagagatgctaagttgaatcagatgcagctcgcatgagagctgcctgagatcaaagactgtcttttattcatttctgcattcagtgcttagcacagagcaggcagtcacccagccaatatgtgtggaagagaattgcatgtggatgttattgttaatgacgtcttttaacctccacatgaaacaagcacacattctgtgagcacctaccctgggtcagtgtgttattggcagggcccacaaagatgaacagaagggaccaaatccatacccttaaggagctcccagtctggtggggcttgacattatgtgtgctgatcctatcagatggtattttggtgccttatcattaaccagaattctctgcctcatgtctgatcctgactattaagtcacaagcatatagacactcccatagaaactccctcaatgccaagttgtttgcacaaatctttcctcctggttgcaactgtcagtatttggaaagatgaagaaaggacccatgaaaaggacttttaaaaattaattccattttttcataattatcacctctgttttgtgtatggaactaacacaacacttctatttgaataggaatttggtatggaattcttgaaggcattggaattctctctgttatcacaaatgcatttgtcatagcgataacatctgactttatccctcgcttggtgtatgcttataagtatggaccttgtgcaggccaaggagaagctgggcaaaagtaagtttgctataaaaccactatacagtttctatttcctagccattttttgaggttggacactcagacagaagactgcactggagaatatggaatacatgcccagaaggagaggcctgtgataggggaggtggaattatgatttattataaataataataataacactgtcagccaaagaaaacatgtcctcatctaccaaagagttggaggacatacaagtcagacaggttttagatggaatccaatgtaagagtggcaattaatcattttccccacccctgacctctgcccactatgaatttagaaatgtgtgatatgctaatgtgtataccaaaacagtagcatatgatgtatatatagttatatcattttatgagtttgcaaaaggacagttacaatctgatttacattgtgtcattatgtgtaaactctgcagatcttacataggaaatacggaactaggtactgagtacccagtaggtcctcaataagtattcgtggaataagtaagtgaatgactttttcatgggtattgacctgaccaatgcctatattaccccaagcaagctgagtggactaaactccttgggaggatcaattctatggcattgcctcaatggtttgcaaagccagggcacgctatatatggtcagataaagataagtcaaaattataacatcccctagtttcattcctgtaccttggagaaagggcaagaagtcttaacatgctttaaaaatccctgtttggttaaagccaaaatagttaaactcttattatgggattttgatgtctataggtcagagtgaggtgtgtttggggatcacagggtcttcttaataacccagaaatcaccctacatgggctgctgtctacttatacaagcagccctggtttactagcctgagccagattgattcatcctctacagccattgtagctgatcgaccccaaggagttaagtgccaccaaagcaaatcaactgaactcatgcaaacctggcctgggtccaattcattatgaatcctacataaatgggctaaggtgtggatgattgaggaatgtcataaagctcacaatccagttatttgaaaaggcttctgtaaagttcttgactactataagcatgtggccatgacacactaattatctagcaacttttagtgagcataccatcccattttaagagaaatgtaaagacatgttattttgcccaggcatttctttctaattgcaactatcgttgacattctctgcttggcttagcctgaaaaagcttactttcactcaaaccactttcacatgtgtttttagttgattctcaaaacagccctgggagtgggatgtgcattataatcttcactttgaggagcaggaagagattaaaagaggttaagtccagaatcacaaggcatagtaactctgggagcccatgtgaaggtggagcctcgactcactctccatcccgcacctcacagcccttgaggctgtcccttaacagtaaaccccctggattttccgtcgtaatggtgtttcagttctttcccaaattcaaatatggtgaaatctatcttgttttagggggaaccaaaaacaaaatgggaacctttatgcacaattgatagtgaatcaaagatttagaattttaacaacctggtagatttaagacaatgtccacagtgattaaagtgtatctcatagcctccttgtatcaattttactgggctctttggagcttttcttttctttctttcttttttaacctttctctttgacttaggagccttctgccactttcaatttatggatctgccttttgttttctaatccattagtcatttttcatgttttcaagtagttaaatttatgtatgtttcttcatgaatcttattttctgcctcactggccactctattacttttcagattttttttatttttccaatttagaaatgctttagaaattattgaactcataagagtagcagaattgtcaaggtatagaaagtcataagcctttagggtagtacagtgattgctggctcatccctttcttatgtattaaaggattgaaaattataagtggtgagtggctttcacggtagaattctcacatttaaatgagtgtgtggtcttctcagaagttacatggaagagatatgcatcctaatccaaatggcactaccctgtagaagacattttctagatctttcttggaagtgcctacagaggccatctaccattcctttaagaaaactgactttatattcacaggaaacccttcgtctgttacttttttcttggtacttctcaattctccctgatcatcagtgtagcctcatctccctctgtctcattgagagctggtggtgggtcacagtgagggtatatagcattcctgccagtaaacccagtgatagacatgggctctctactacctgtgaccttcctgctataacaatgggtcagtgagttgacacttgcatgccactagctgaattttatacagcaaaatgtgataaatctcacttgcctgaattgatgacaactttcactatttgatattgacaatagctaacagtctacaaaaggtgaaaggaattagtgaaacgtctagctgtccgtgcatcttttcccccattatggaaatgatatggaaggaagatgtacacagctgataactgtgtgttcctgtactaggtacacatttaatgctttgcactcaggagtaaccaccctctaaagacacattttcaacttggatttatgactgtcattcatgcattaggtccatgaaacaggtgttttatttaaatttaaattttcttaatggagtttttgagcagaacaaccaatggacagtagcgttagtcttgataaagcctcggggctggtctgtgagataagagtgcaggaggggttatgaatattccatttcagtgctgggcctttttttttcaccagttcccagaacacctttcccttcccacagctcagatctctagaaagactctgctaaaacttactccctctctgtgacagctaatcatcctcaaggcactaatttattttcatgtccaggtctagacagttcctaggtaagggagacatcattccaaattaccctttcagtaggggagtcctgctgccagttggattaaggcatgttacacactccctgaccatttgttttcacccacgagtgacttgacaaatgggtccttcagcttggttcattttttttaaggccatgataaagccagtgatttgtcttgagcacgataacatgcagaacccatgtgttctcagaactgtgttcatgtcatcattttggtttagtgttcagcagcttggaataatcatgccagacttgttaatgaagagaatctgaagatcatgatttattcattcaatcagtaattacttattgaccccctgctagatgcaagaaataaataaaatgaataatcaccactcatgtttatcttacttataggctaagatcttatcacatgctatacattcattgtttaatataatcccctcaaggaccctatgaggtgggaacttctgtcactttaagaagttacgtaaatcgggtgtggtgacacatgcctgtagtcccagctattcaggagtctgaggtgggaggatcgtttgagcctgggaggtcaaagctgcagtgagccatgatcataccactgcactccagcaatgagcaacagagcaaggccctgtctcagaaaaaaaaagaagaagtaagaagttatataacgtgccaatattacatgactagaaaccagcagaactaagatttgaccccaaaacccaagcttttgtatgtaaaacactatttaaagaaaaatgtatacaggatgtatctaagtgctaatttcacccaaagtttcaaacattgttatttcagtaagtgcatgtgttaaccacaatgttcaatatgtaaaactgtttagagacttggagaaaagatgtttctaagagtgctacttgctatgatacttttaaaatgggctttttcttgaatggaattattgacagaatgattaaatcttgattttatctacccattcaatctagaatgatcaatagaatctcatactttagtttcctccaatcagatcgattcaatatttatgggattcctacactgcacaagactgtcctaagtcataggatacacaaatacctaagatacctgctctgctcccaaaaaattgcagtccaaaggagagggcatacatatatgctgccaactctagtacaagcgatctggtaatggtgaactaagtaagtatggtggcactacagagagagggaaaggagtgagatgttgtgactggagtgattaggttgtcttcctagtaggagtggtgtttcagttggccgctgaaggataaatactatttccacttgtaaaggaagaggtagggaattctaacagaaaagataacaagcagaggcatgaaaacatcagaagctttcagggaatatagtctaacaggactgtagcatgggatatgagttggggggatcatatgcacaccaatcatatttggaacattttgagaatatctataaatatatatgaaaccattaatgaggaactgtgtttatgtgtatcatcaacaaaagaagctgtggcttacatacaatttatgcccatcatgtaatgctgctttttacctatttcactgaaacattaattggggtagagatgttctatatgatgattctgcagaaaaaggatgagaaccaaaacaagcaacttgttcctgattcaacatgcccagggctttccagcgtatcccaacctgagtcctggttgacaaggaagggccagttaaaggcatttacaattgcagtgacgtctgggaagcagggtcttcagggaactggatacagagaaggtgatgagtgttctaatggtagaatgtgcctcctcttataggtgcatggttggctatgtgaatgccagcttgtctgtatttcgaatttctgactttgagaaccgatctgagcctgaatctgatggcagtgagttctcggggactcctcttaagtactgcaggtgagtgtggcacccagcgtggctctgcctgagctgggctggctccaccgtggggaggttttactctgaaggccccttctggctgagtgtgtttaaagcagtgactgtcaatctcaacagtgcattaaaagcacatgaagaattttcaagccttctcttgcccgggatacaacccaaaccaattaaaacagaatgtcagggagtggaactcagaaaccaggtgcagtcagaattgagaactgctagcttaaagggaaaaactaaaaatatagtagtgaaggttataccgctgctccagggactcagggacagacaatccccaggcgggttgagcgacagctgttgagggcacttgtctttgttctgcttctctctcttgcccagagtatatcacatcacatttctaaatgttaaacaactcagaagcctgtggaaagaggcccagttcatttcaggttccaccacagtagcctctgcaacatgtgctcattctctctttctttctctccctctaaaaggaaatgaattaaactgtgcctcttgatgtgtatctatacaaacgtacatgaaggagaatttgttgagcacctactctgtgccagaaactgttactccatttaatcgtcacatcagccttctaagttaggcaatattatctcatctgacaaatgataaaaccattcactaaaagctcaatgagattacttgtgcacagttcttgaagagtccagatggcacctttttctcttaatactttgacgttataagaattttgtgggctcacacctgtaatcccagcacttgaggaggccaagttgggaggatcacttaagtccaggcagtcaaggctgcagtgagctatgatagcaccactgcattcaaactatggagcaagaccttgtctcaaaaacaaaacaaagaattttggagattccctatcatgacattctatgttctccctgtaatcaaagccacaaggaagaacagccatggagtcctagatgctttgacatagggacttttgtaatgatccacttcagtccctcatcttacagaaggtgaaggtgagagaagccaggggctccccatttctgtgcagtgacagcataccctccacccctttaaacactcatgccaagttcccaggtctcattggctgtcacatctcatcagatggcttatttcctttcccacatggagtaacaagtaagatggggagaaagactggctggaatataatctagtgccgctctctgttggggtctagtggagaagcaagcaattaagcaacaattgatactttcttcagtagatttcccacttgcttgtccagaccatttcgtacatgaaattatttagcaagcattgttagacatatacaggatcctaagtatgaaatgcttcaaaataaaatgccaactattatttggagttaaaaactttgtaatcatttgaaaataagataaaaatacagagtctttctcctcttctgcttcctggctcataattcttcctgcctgtctcacatagtatcataaaagtatattccagaaattattaatgtgaatggaggtattaatgctggcaccattaagttaaattatgattgttttgtttagcatttttcttaaaagtcccccaaagaaaacattttaaaatttctaattaaaatcatgtaaaataatattttcaggtttgttttcagtcatatagcaggtgaggcacccagatcagcttgcgggctgaaaatatctaaacatgtagagaaaaatttaaaaacaccttctcaaatacattaatgacctgggaagaatatttggtattctaaggcagaaagaagtggtacacagagcattgcagccaacttttacccaaagggaatttgctgaagtgagtggactggagctttctttttatttatttatttatctttttatactttaagttctagagtacatgtgcacagcatgcaggtttgttacatatgtatacatgtgccatgttggtgtgctgcacccattaactcatcatttacattaggtatatctcctaatgctatccctcccccctccccccaccccacgacaggccccggtgtgtgatgttccccttcctgtgtccaagtgttctcattgttcagttcccacctatgaatgagaacatgcggtgtttggttttttgtccttgagatagtttgctgagaatgatggtttccagcttcatccatgtccctacaaaggacatgaactcatccttttttatggctgcatagtattccatggtgtatctgtgccacattttcttaatccagtctatcattgatggagctttctttttcaaagctttccatggttagggaaagtgaaagaaaatatagaggccaggtgcagtggctcaccctgtaatcccagcactttgggaggctgaggtgagtagatagcttaaggtcaagagtttgagaccagcctgggcaacatggtaaaaccctgtctctaccaaaaatacaaaaaaattagccaggcatttttgtgcacacctgtagtcccagctacttgggaggtaggagtatcacttgagtctgggaggcagagattgcagtgagccaagatcgcaccactgcactccagcctgggtgacagagcgagattctgtctcaacataaaagaaaagaaaatataggaatgaccagcctgtaagtgtatacttatatgctatataaaacaaccataatatagtcacactagagtctattatacagcaataaaaataaaccacatgcaataatgtgaatgaatcttagtgacataatagtaaaaaaagcaagccccagcaaactacatatagtatagtaccctttctataaagttcaaaaacaaactaaatagtacaatattcagacaaatgcatatacatataagttaaaaataaaaatgaaattcagggtaagggaagcaattgatgtaagttcctggtaatgttttagttcttgggcttcatagtggatttatgagagcttgttgtattattaaagtattactttaatggagtcacatggattaaagttctctgaatagtgcctggtccccaacaggtattcggcaaacatttgtggcattttatgccgactcaaaagtgatagctggaggatacattaggaaggactcttctagtggcaagtggcagaaatccagggtaaactgacttaaacaacaaaaaattgttcagttagctgggagagtcaaggggtgatatgagcttcagtaatggccggatcccaggcctcaagcagtgtcagcaggatgctgcctctctgctgtctctgctttgttttcttgacttccttctcaagcaggctctctctctccatacaaggccaccaggagtcccaggcttttgccttctgtgggcttagtgatcattcactaagtgatagttctggcagacatcttgatgatgtcactgatcaggtctggctcatcttttgagctgagatcaggcaggtggagggggaagtcctagtcaacccacacagatgattccccagagaagagatattattttatcagaagaaaaatgctggacaagcaaaacaacagatatctagtatagagaaacttcaaatttccctcctattgaatgaggactatataatgagaatggaagagatttgagaatcagaaaaatcatagtttgaatgcaacatttttctgtgtctttatagataccgggactaccgtgacccgcctcattcactggtgccctatggctacacactgcagttttggcatgtcctagctgctcgattagcttttatcattgtctttgaggtaagtttcctcagccaaattctttatttcctttgacataatgaagtcagtaggagtaatgaataaaaataagtgatggggattttgaatgtgattatctatatttccagaagtagtagtgtcatattatgtaacctctttttgatcttttttcttaattgaagtatttgatttttccaagacatatttgaaagtccatagttggtttttaatggacaaatctgaactcgttgctcctaaatgtaattttctggggccatagttcttaaactttagcaaaaatgcagtttttccatcctcactcccagatattctgacataccatgtctgtggcttgtttttcatgagctcgttgtaatgattctgactataggcattctgggaccataatttggaaacatttggaaaacatcagcccagtaagattcattctttttttctttttctttttcaacttttattttagatacagtgggtacatgtgcaagtttgttacaaagttacattgcatgatgttgaggtttggggtgcgactgaacccaccacccaggtagcgagcatagtattcaataggtagttattcagcccttgtcccctccccctctcccctctatagtagtccccagtgtctgttgttctcatctttatgtccatgtgtacccagtgtttagcttccactctaagtacgtacaataagaacttgcagtgtttagttttcagtttctacattatttcacttaagataatggcctccagctacatccatgttgctgcaaaggacatggtttcattcttttttatggccacatagtattccatggtgtatacataccacattttctctatctggtccaccattgatgggcacccaggttgattccatgtctttgctattgtgaatagtcctgtgattgacatatgagtacatgtgtctttttggtagaatgctttattttcttttgagtatatacccagaaatgggattgctgggttgaatggtagttaagccctttgttctttgagaaatctccagactacacagtagttggactaatttacctttccaccaacagtgtgcaggtgtccccttttctctgaagcctcgccagcatctgttaatttgtttactttttttttttttttttttttttttttaagactgattctctctctgtcgcccaggctggagtgcaatggcacaatctcggctcactgcaacctctgcctcccaggttcaagtaattctctgcctcagcctcctgagtaggtgggattacaggcacccgctaccacacctggctaatttttgtatttttagtggagacggggtttcactgtcttggccaggctggtcttaacctgacctcatgatccatccgccttggcctcccaaagtgctgggattacaggcgtgagccactgcacttggcctgactttctaataaaagccgtactgactggtgtgagatggtgtctcattgtggttttgatttgcatttctctaatttccttagagattctgagcattttttcatattattgttgtctgcttctatatcttcttttgagaagtatctgtttgtgtcctttgaccactttttaatggggttatttgttttttacatgttgatttgtttaagttccttacagattctgggtattagacctttattgggtgcatagtttgcaaatattttctcccattctgtacggtgtctgtttacttctttgacagtttctcttgctgtgcagaagctctttaattagatttgacttagcaatttttgtttttgttgcaattgcttttcaggacttcaccataaattctttgcccaggccagtattgagaagggtatttcctaggttttcttctagcatttttatagttgaggtcttacatgtaagtctttaattcatcttgagttaaattttgtttatgatgataggtagaagtccagtttcattcttctgcatatggatagccagttatctcagcaccatttattgaacaaggaatccttcccccactgcttgtttttgtcaagttggagattcactctttctaaatgtctccaattattgccatcatcattaccacacatattgaaatatactgattcatatagttaatttatgattttcaaatagttatcaggatttcccaacatgatcataagcattttccaataggactgggtattacaagtggtatttctggttgtgtatcatcacggaattatttatattcaagcatccaagtaagtatttattagctaagactcaaaatggaattataaagtaaaatctgtctagcaattgtctatattatatgtcaataaaaatatattatctattttctttcagggtttaagaaaattgctgtaaaaatagtttgcatttctatgactctagtcataagtggaaatttcatctcttgtcacatatattaaagccagattaataaaagccaaggttgcctctcggcttggatctaaagtttcctagacctcttcaagactattctatcactgctttttccttcagtccagggaaccaaaagaagaaaatattaagctgctcttccctggaaattatcttaccaatggcacactctctctttaaagaagatatttttaacccatcactgtcttaaaatttttcagacaaaacttcttgttgtttgtttgggatttttttattttaagttccagggtacatgtgcaggacatacaggtttgttacacaggtaaatgtgtgccacggtcatctgctgcacagatcaacccgtcacccaggtattaagctcagcatcccttagctattctttctgatgctctcccttcccccacccccacccccaacaggcccctttgtgtgttgtttcccaccatgtgtccatgtgttctcatcattcagctcccacttataagtgagaacatgtggtatttggttttctgttcctttgtcagtttgctgaggataacagcttccagttctgtccatgtccctgcaaaggacattatctcatccctttttatggttgcatagtatttcatggtgtatatgtaccacatttttttatccagcctatcattgatgggcatttgggttgattctatgcctttgctattgtgaatagtgctgcaatgaacatatgcatgcatgtatgtttataatagaatgatttatattcctttctaataagcgccatactgactggtatgagataatatttcattgtggttttgatttgcatttctctaatctccttagagattctgagcatcttttcatattatttttggctgcttgtatatcttcttttgagaggtatctgtttgtgtcctttgccatacaagttatagaattgctgggtaaaatggtatttctgcttgtaaatcactgaggaattgccacactgtcttccacaatggttgaactaatttatactcccaccaacagtgtaaaagtgttcctttttctctgaaaccttgccagcatctgttgtttctggacttttaaataatcaacattctgactggtgtaagatggtatctcattgtgatttttatttgcagttctttaattatcaataatgttgagctttttttcatatgtttgttggctgcatgaatgtcttcttttgaagaatgtctgtttatgtcttttgcccactttttaatggggttgcttggtattttttttgtagatgtgtttaagttccttgtagactctggatatcagacctttgttagatggatagattacaaaaatgttctcccattctataggttactgtttgctctgatgatagtttttttgtgctgtgcagaagtactttcatttaattagatcccatttgtcaattttttcttttgttgcaattgcttttggtgttttcatcatgaaatttttgcccatgcctacatcctgaatggcattgcctagattttcttctaggatttttatagtttggggctttacatttaagtctttaatccatcttgagttaatttttatataaggtgtaaggaaggggttcagtttcgattttctgcatatggctagccagttctcccaaaaccatttattaagtagggaatcctttcccccattgcttgtttttgtcaggtttttcaaagatcagatggttgtagatgtgtggtcttatatctgagatctctaatctgttccattggtctatgtgtctgtttttgtactagtaccatgctgttttggttactgtagccttttagtataatttgaagttgggtagtgtgatgcttccagctttgttctttttgcttagtcttgtcttggctatttggactcttttttggttccacatgaattttaaaagagtttcttctaattctgtgaagagtgtcaatggtagtttaatgggaatagcattgaatctataaattactttgggcagatggccgttttcacaatattgattctttctatccatgagcatggaacatttttccatctgcttgtgtcctttctgatttccttgagcagtggtctgtagttcttgaagaagtcattcacttttcttgttagctgtattcctaggtattttattcttttgcagcagttgtgaatgggagttcatccatgatttggctttctgcttgcctgttgttagtggttaggaatactaatgatttttgcacattgattttgtatcctgagactctgctgaagttgcttatcagcttaagaagcttttgggccaagatgatgggattttctagacacgggatcaggtcatctgcaaaaaaaagataatttgacttcctctcttcctatttgaataccctttatttatttctcttgcctgactgcctgggccagaacttccaatactgcgttgaaaaggagtggtaagagagggcatccttgtcttgtgccggtttttaaggggaatgcttattgagaatttttaacatgaagggatgttggattgttatcaaagaccttttctgcagctattgagataatcatgtggtttttgtctttagttctgcttatgtgatgaattacttatgcttatgtgatgtttactgatttgcatatgttgaaccaactttttatcccagggatgaagccaacttgatcatggtagataagctttttgatgtgctgctggatttggtttgccagtattgtattgaggctttttgcatcaatgttcatcggggatattggcctgaagtttttttgttgtctctctgccaggttttggtatcaggatgacactggcctcataaatgagttaaggaggagtccctcctttttaattttttggaatagtttccatagaaatggtatcagctcttcattgtacctctggtagaattctgctgtaaatctgtcagacaaaactttttaaaaggctgccttatttggcttttcaaatagaattttccattttcttttaatattttgttattaactatttgaaaatatgagaactatgcagaaaagcttcttaattttgtgccatccatgcatcaccaaatttatcaagttttaaataaaacgaagaatacttagcagtatcatttgaacatgatttagtctctatttaatactttagaattgtaatagcccttaaattgtcatctagtacttccttggtcaccattatatagatgagcagaagtgacagtgactctagaattccagctattagtatttcaagtaaagaatttgtgactgtttaccaaaaagaaaaaagcttcttcctgaaatgatcatttccctaggcccactgataattcttataaccaagatttgtaaagcacttgacagtctacaaggcatttttaaacattttctcataattctcacaatactcactttatagatgaggggaatgaggctcagataaattaaataattcatcctcaggtagacagacagcccttaagcagtgaaagctaccagcttcaacctgggttttctgactccacagaatacattcttctggctctcctttgaattaattatctgaccattcttttcccaccttccttccagactcctctttctattccttaggtggtgccatcagaccagttcaggcctcacctgtcctatcatcttgcattacacacgcctcccctggtcactttgcactctccacataccccagagggtccacatccttcttcagccaactctctaacctcattcaggatgcacagtagacctgacgctgttacattctcctctgttttagcacctcgtgttttgtataaagcacctcatttcatatctgatcccagacctcccaaaagacctaagggatcgaatgagaagagagaagtacttgattcaggagatgatgtatgaagcagaactggaacgtctccagaaggaacgaaaggagaggaagaagaatggaaaagcacaccacaacgagtggccgtgaccatgtaggtgagaggtgtgctcagcgtctgaggccattccgaggttgaatgggtgctttaaactccctgaagcaaagcttaccattgttgcagtaacagggatcaaaataaactccttagaagcttcccaatccaaaagaagcttgttttttactttaatcgttgcaaattttgcttgatcttcccctcccacataccttctgcaacacttctctgccttcttgccagactctggcctatcagtcaaggtcttcatgaattggcctaggagttccctgaaacaaagcgtcctctctcttttcctccagccgggctgttttctttaatatccccagggaaacatgccccttctttctaggtgggtgggaggcagacattagcaaagagaattcttcctgaaagcctcagcggccagagaccaaggtgcaacagggctgtcctgggctgcaggaccagtaactgatgaagaatttcttctggccccaccactactggctgctttcttcccaaaaaggccatttctaatttttgcttgaaagcatagtatctgcctgcctgtttctatttccccaatagttggcaggatgtgatgttgctttagactgcccttctgactcagtctgttcacccataaagcaagcataaaaatgtttataccatccctgactccatttggggttacaaattctttgaatgcctttggtgcatggtaagtacaaactattgcacctcatgttttaaagcaattgtgtatgcataagatctttatgccttcttttctctttccagaaaatagtccctttccaggccaaggacctgaattctgtttacttcttctggctgtgcaaaagcacactcaagtgaatgactaaaaatgcaaccacagtgcatgttgcagataccggcggccgcaggaggggcagcatccagtagaggactggcgttggagtcacactgctgtgaaatcacgttgcagtccagcgcacaattgctatctatccatagaccattcttgaccaagcaagcatgcacattatgggcagttacattctcaagtttttaaaatcaaggggaacttgtatactgggcctgtttttcagcctgtttgctaccttttttgcattctatcccatgtgaattttacagacactgggctaaaaagggtattcagacacatggacacacattcctagaatgtcatcatatggtcctaattccatgtcaccaacaacacagacaagaccctgtttacaactttttctttccttttttttaattttagacctttctgagaagattattatatatgacatatctatagctatgtgtatggccatagatgtatttctgtgtgtacatatgtatagtcatgtattcctgcatatgtacatacaaatacagagatatataaagtacatagaaattccttacttgtaaatagccaaaaagtactgacatgagtgaattttcacatttaaatagtcatcaatatgaagccatgattaatgcttgtataatgtgatgcaataaaatttaaaataaatttctgcacatggaatattttcagctg

SEQ ID NO: 1136 - DNA, 50666 bp, Homo sapiens
gcctcctcgcggacacgccctccgctcggctggcgccggtgcctttaagacctcagcgcgcggccctgattgagaaatccgcgcgcagcctccgccgctgcacactgcagcctctgctgaacccctgccgcgccgccgccttcgccagcccggaccggaccggcccgccttcccttcctccgctccagccggcctccggccccgcaacctcctcctcggcgaagtctccctggccgccccatgtcggccgcccccgcctacagcgaagacaagggcggctccgctggccccggggagcccgagtacggccacgaccccgcgagcggcggcatcttctcctccgactacaagcggtgagggagcccgccaggaagctcgcgggagggttggggccggggaccgggcgaggcgcgcgggcaccatggacagcgcccggccccagcgccggccccgccccggccgcgccgaccggaagcccgcccggccccctcctgcggcctggagccccggcccagcgcgggcagcgctggcaccccggctccaggggccggcctaggacgcggaggggggcagataggggctggcgggggatgggccagctcagtttcgagaggagaaaccctccggttccaggtgtttctccggtttgcggcgttgcgttaggggttcccttcctttttcgtgctaggcgggttggcttcccaaaaatgtgggggaggggtctgagtcagcgaacttgagcttgagcctggggcctcttcaggaaggcgggccctggatgtacttgcacagcctcccagcttggccctgctgcaaattcatttcccctccctctggtccccatctccatctgaccctcacatccctgctcctggcattgcccctgtagttcagctccaccttcacaccctcccccacctttgattcgttcgtttgtttcttcatttgtttattcgtaaattctgcaacaagcatttatgaaaagccaactgtgtcgagtcctgaactagtcacggaatacaactgtgaacatgagacccttcttgtcctcacgatgctctagaggggagcacagatgaagaagcagtcagggacagtcgagtgtaatgggggcagtgggagcagggagaggacctagtctctggcgccggagagaaggaagacaggagcgtgaggtatgttccaggcagaggaaagggctttcaggaaggttgagagccaggccacaatctgtgtgagccactggactgaccagaaaagagggtggggaggactcctgaaggattctaagcaggcgacataatcagatttatattttagaaggacgtcaggctgctgcattgtggagaagagattggaggtgggccagattgaacaagagacaagggaggtgggtcttgaagttcacaggcctggcatgattgtggcctagaccaggggagaggcagaagatttgaggctgtggaagaggtggaagcctcagacctgatgattaattggatattgggtgggggtttagagggacagggggagaagatgaggattttcacgcacgtccatgtgaagagaccaccaaacaggctttgaacaataaagctttttaatcacttgggtgcaggccagctgagtccgaaaaaagagtcagcgaagggaaatggggtgggaccgttttacaggatttgggtaggtagtggaaaattacagtcaaagggggttgttctctggcggtggggggacacaaggtgctcagtgggggagcttttgagccaggatgagccaggagaaggaatttcacaagataatgtcatcagttaaggcaggcacaggccattttcactcttcagttacttcaggccatctggatgtatacgtgcaggtcacaggggatatcatggcttagcttgggctcagaggcctgacattcctgtcttcttttattaataagaaaaataacataaaatagtgttgaagtgttggggcagcaaacattttggcggggggtggtatggagagatactgcttctccatagccttgaagggctgcttcgagcgggattggggtggcgtgggaacctagagtgggagagattaagctgaaggcagattctgtggtaagggatgatattgtggggttgttagaagaaacatttgttgtataggattattggtgatggcctggatacggttttgtatgaattgaaaaactaaatggaataagagaaggagaaaaacaggtattaaaggactaagaattgggaggacccaggacatccaattagagagtgcccaaggaggttcagcatagccctgccagcaaagattatttatttactttaagagggagttaagactggcagtttggggatagcaccaggagatatcagctgtaatggtttggagaaacagtgtaaaccggcagtgtaaacaagagcagggcatgtatgagtagttgagtatggtgaataggagtatgactagtcagaagatagtagggatgacaagttttctggggcacagtccaagttggtctggtgtctggaatgagactggggcctaataaaaaggagcatctatacaggagcttgaatgggctgtaccctgcagcattccgaggacaggcccaaattctgagaagggcaagtggtaaaagtattgtcagtcctttttaagttggtggctgagcttggtgaggtgtgtttttaaaagaccattagtccgttctaccttttctgaagattgaggatggtaaggggtatgaaggtttcactgaataccaggagcctgagaaactgcttgggtgatttgaccagtaaaggctggtctgttattggactatatagaggcgggaaggccaaactgaggaattatgtctgacagaagggaagaaatgaccgcagtggccttctcagaccctgtgggaaaggcctctacccatccagtgaaagtatctacccagaccaagacgtattttagtttcctgactcggggcatgtgagtaaagtcaatttgccagtcctgggcagaggcaaatccccaggcttgatgtgtagggaagggagggggcctgaacaatccctgaggagtagtagaatagcagatggaacactgagaagtgatttccttgaggatagatttccacaatggaaaggaaatgagaggttctaagaggcaggctagcggcttgtaacctacatggaagaggttatgaaatgacgaaagaatagaatgggcctgtgaggctagaaggagatattttccttggtctgagaaccatttgccttgtgtgggaagagattcataggtgtaagtttcattgggggagtaggtaggagtgactgatgagaaggagaaaaactggccatgagggacagaagttggaatgctagctgcttttttagctaccttatcagcataagtgttgccctgagcgatgggatctgatgccttttgatggcccttgcagtgaatgactccagcttcctttggaagtaaagcggccttgagaagagtttttattaaagaggaattaatgatggaggacccttgtgtaatgaggaaagctttttgcccatataacagcatggaggtacaggatatggaaggcatatttagagtcagtataaatattgacacatagtccttttgcaagactgagggctcgagttaaggcaatgagttaagctttctgagaggtagtggaggggggcagaaagtatatgcgtcaggtgtgaggaagaaaatagattttggaagttatgagaactgtagagagtgagttgagcatagtttgtgattttgagggcctctgaaagtattaaagcagcggcagccgctgcacgcagacatgagggctaggccaaaacagtaaggtcaagttgttcggacagaaaggctacagggcgtggtcccagctcttgtgtaagaattccaaccgcacagccctgcactttggctgtgtgtgatgaaaaagggttgggatgaattagggagacctagtgtgagagcagcttctacggctgtttttaaggaatggaaaggagtggcaaaaggatttaggatctgtggggtcagctaggtttgcttttgtgagtttatataatggtttagtcaggatggtaaaactaggtatccaaaggtggaagtacctaaccatcccttgaaaggaaaggagttgttgctttgtagaagggattggggttcgggagattagccggacatgatcagcagggagagcacgtgtgttttcatgagaactatgccaagataggtaatggatgaggaagaaatttgggcttgactgaagtaatgggggctgtccgtgaagccttgcggcagtacagcctaggtagtttgctgagcctgatgggtgtcagggacagtccaagtgaaagcgaagagaggctgagatgaagggtgcaaatgaatagtaaagaaagcatgtttgaaatccagaagagaatgatgggttgtggaggggttgtggagggaggtattgaggaggagagtatatgagtttggcaccacggggtggataggcaaaacaatttggctgacaaggcacagatcctgaactaattgtaagacttgtctggtttttgaacaggtaaaatgggggaattgtaaggagagtttataggctttaaaaggccatgctgtaacaggcgagtgataacaggctttaatccttttaaagcctgctgggggatgggatattgacattgagcacggtaagggtgattaggttttaatgggatggtaaggggtgcatgatcagtcgccaaggagggaatagaggtgtcctatacttgaggattaaggtggggagatacaaggggaggatgtgaaggaggctttgaactgggggaaaaggtggcaatgaggtgtggctgtagcctaggaatagtcagggaagcagataatttaaagtgtctcggcctaataagggaactgcgcaggtggggataactgaaaaggagtgcataaaagagtattgtccaagttggcctcagagttggggagttttgagaggtttagaagcctggccatcaatacccacaacagttatggaggcaaaggaaacaggcctttgaaaagaaggtaatgtggagttggtagcctccgtattgattaagaaggggacggacttaccctccactgtaagagttacccaaagcatctgtgatggtccaggaagcttccaaggcgattgggcagtgtcagtcttcagctgctaagccgagaagatttgggaaggagtcagtcaggcagccttgggccagagttccaggggctctgggagtggctgccaggtgagttggacagtccgatttccagtggggttccacacagatgggacaaggcttaggaagaatcctgggctgtgggcattccttggcccagtggccagatttctggcacttgaagcaagatcctgatggagaaggtcctgtaggaatgcttgactgctgcagcttaggcattttgaagttcttgtgtactggagatgtggctggggtttctctcacagtggaggcaaggaactacaactcagaaatacattgctacttggctgcctttactctattattgtacaccttgaaggcgaggttaattaagtcctgttatggggtttgagggccggaatttaatttttggagttttatttaatgttgggagtggattgggtaataaaatgtatattgagaataagactgccttttgaccttttagggtctagggctgtaaagcgtctcagggttgctgcccaacgagccatgaactgggctgggtttttatatttgatgaaaaagagcctaaatactaactgatttggcagaggtcggataaaggaaaaggagcgttaaccttgactatgcctttagctccagccacctctttaagaggaaattgttgggcaggttggggagggctagtcgcagaacaaaactgtaagccggactgggtgtggggagaggaggtgatagaaggattatagggtggaggagcagaagctgagaaagaattggagtctgattcagcctggtggggagtgacctgaggagcattctggggattaggtgagaggtcagatgggtcggtagaaaaggaagattggaagattgaaaagacgcagcgacgcttggggttgggactgaggggacaggcgggagggaaagaaggaggatttgggatgagtcgcattgggaacagagactagggagggaccgatgtgtaaaagaatgcctggacatcaggcacctcagactgtttgcccattttacaacaagaattatctagatcttgtaggatggaaaaatcgaaagtgccgttttctggctatttggaaccattgttgagtttgtattggggttaagcggcattgcaaagaaaataaggcatttaggttttaggtcaggtgtgagttgaagaggttttaagttcttgagaacacaggctaagagagaagaaggaggaatggagggtggaatgttgcccacagtgaaggaggcaagcccagagaaaagagagggtagagacacggagagaaggggtggggggtgctttgccccccaggaaagtggagagaaaagagagggtagagacacagagagaaggagtcgggggtgcttgtcccccaggaacgtggagagaaaagagagggtagaaacatggagagaaggggtggggggtacttgccccccaaaaagtggtgtttgccactaagggtgaaagatcaaggcaggcatcctcgcggtgatcagacaactctgaaacgtgggtgaataatcaagcaggcgtccccgcagtgattaaacaccaagggaagactgtcttcctgagtccgtgatcggcgccggagttttgggttcacagataaaatgcatttcctgtctctaccagaaaaggaaaggaaccgaaattaagagaagggagagattgaaagatggcaccaagattgaaaggagaaagaggttgagggatagtgagagaggttggagaagagagtaaaaagaggccgcttacctgatttaaaattggtgagatgttcctcaggctggttggtctgaggacccgaggtcattaggtggatctttatcatgaagcaaagagcaggaggacaggggattgatcttccaagggtggtcccccgatccgagtcatggcaccaaatttcacgcacgtccatgtgaagagaccacccaacaggctttgtgtgagcaataaagctttttaatcacctggttgcaggccggctgagtctgaaaaaagagtcaacgaaaggagataggggtggggccattttataggatttgggtaggtagtggacaattacagtcaaaggggggtgttccttggtgggcaggggcgggggacacaaggtgctcagtgggggagcttttgagccaggatgagccaggagaaggaatttcacaaggtaatgtcatcagttaaggcaggaacaggccattttcacttcttttgtgattcttcaattacttcaggccatctggatatatacgtgcaggtcacaggggatatgatggtttagcttgggctcagaggcctgacaaggatgttactcaggttactagttcctgcaactggatggatgatggtgttattcagtgtaattggaaataaagatgttacaagcaaatttgtggaaaattaatgttgagcccagctttggacatattgagattgtaaactctgagggacatattaccctattaggtagctggatattacgatttgggttccaggagagagattagggaattattaacatatgtatgttaattaaagccacagaagtgaagataactcagggaggaggtataaaatgagttcagacactgcacaagtctgaaccctgaagacaccaacattagaagtgaccagagaacagtggaaagtgtttcaaggtacccaagaggtgaactaaaggctgaaagaaaacaatgtaatttcaagaaggagggagtggtcagtagtttcaatgcccattaaggtcaaatcaaacaaggaaaaaaatcatgaccattggttgacaaagaagagctcaattcctttctactctattccccacctcctgccctgggagataaattctggcaaagtaaggagaacaggagctagattatttctttcccagcattctgttgtggatgatttaaaacatacagaaaaatgaaatgaataatacaatgaacacatgtatatcatccatctagattcaactgtcattgacatcgtaccttatttgctttatctaaccatctattcgtatactttttttggttgaaccatgttaagttgcagagatcatgacccttcaaccccacattctaagtcgacatctaaagccagattaaaatgaataaaggagcacacaggtggtaagtagataaaacagtgaatggaaattttgctttcaagaaatttgactgtaaaagagaaagctgctggaggagaacctcactcagttcaaggaagtttgtctattttgttattttgggtttttttttttgtttcttaaaatgtatgactccatatttttgtttattattaatattaggcgggagagcctagagcaagtttaactgctgatgggaaggagcgattggtgggagagaggctgaagggaagaaaggaagtacagaacactgagtgatgggaggggaggcttactgagctgggtgggaggactagcctgggagcagggaggaccaactctgcccagagggaagagggcaggaggagaggagagtataaatgcagatggagactgggtacagtggctcatgcctgtaatcccagcactttgggaggctgaggcgggcaggtcacttgaaatcaagagttcaagactaacctggccaacatgtcaaaaccccgtctctactaaaaatacaaaaattagccagttgtggtaacgcatgtctataatcccagctactcaggaggctgaggcaggagaatcacatgaacccgggaggtggagattacagtgagccgagatggcaccactgcactccagcctgggcaacggagtgagactccatctctaaataaataaataagtaaataaatgcagatggatgggagtctggggcagggggctgcaggggatttcatctaaagactttccctttttcgggaaccaggtggtgaagccataagggcaaggctgggaatggggacttgagggtcaaaggggtttcaaatacaatgaagaaagccaaccaggccaggcgcggtggctcacgcctgtaatcctagcactttgggaggctgaggcaggcatatcacctaaggttgggagtttgagaccagcctgaccaacatggagaaaccccgtctctactaaaaatacaaaaattagccaggtgtggtggtgtatgcctgtaatcccagctacttgggaggctgaggcaggagaattgcttgaacccaggagacggaggttgcagtgagccgagatcacgccattacactccagcctgggcaataagagtgaaactccatctgaaaaaaaaaaaaaaaaaagccacccaccactggcaggccagtggcattggagaccagtgggacaagagggccaaggatgtgagagcagttggagggatagacacaggggttgcgggggagggtgctaggaggaagtagagataagagaaggttgatgggaaggaataaatcaagtattggctctggaaaggcaggtgaggattaagatgcctagggtcagtgagaagagggtatatgagatttctcaggaggctgcagtctaattgtggcagtgggattggagctgaagagggcatctctcacctctctatcaactccactgaccatctagtcccttgcccagagactaggggtaggcttggtctcctgtccctgcccttctttccctctagaggccttgtctctgagcagtgaagaggaaaccggagcatccctccctgccagtgtccggttaccaagttttgggggcgggccatctggtgactgtgacaggagccccagcgccctggccagctcagtccattcctggagaagaacctgatgcagcgattcctgcagctcccgggggccgtggtgaggcctggggtcagaggggcctgcggagctgatcaagaggctgctagccctgtgctggctcccgaaggtgggcccccactccggtaccaggccttggagcctgaggagcttcggtggctgcaggcccaggaggaagacacgaccccagaagcatctctggaaggaccttgcccagaggccagccagagccagagccagccactacggtatagaggaacccacaggaaccccctacccacacagccaggaaggccagggatgggcagttgcactctcagcccagacctcttccggtcccacctcctctgatggaggcttaggctggcatttagggtccaggctgggcggagaaggtggtcaggggcaccgtatgggggctgagggtatgagtgaggagagatgaggggcttaactccctggaggctctgaggggaggaggatagtaaaatatttgagggttgaggtcccaccttgacctctttctccccacaggcccccactggagtgggctctggacgaggtttggggacaggatacagcacagacagggtttggccagccactgcctgccagtggactggaacttaggtggtaagaggtgacagcgaggtgtatatcaagggaggtgagcatgactgacccccagtgccatgccaggccccctggctggctccagccacccccagaagagtcccttaggctaggtcagactaggggtcaggtcagagtgagtgcagcagcgtaaggggatctgactatgggagataatgtttcatggccttagggtgttgtgccttagtccctgcctctgcctcttgggaacagaagttggtgggagtgaggacgagaggcccagggcggtctcacctcaggtggtggctgcggtctgtgtcagtgcatattctgtgtcagtgcatattcgacagtcaatcttacctgtgctggctgctttaggcccagtggtcctgccccctttcattccccttctcctgcaggggcctggaatgtactcactaggctgggtggggaggatgccctggggtgtgtgcatttgacaggcgcatgtggcatttgtgggtgtggtgaggaagggaatacccagagttaaaggagattgggcaaacttggccctccttccacggaagcccagggaaaagccatcccagggtgactcctcagaagatcagaggacccttggggctggatatatttgatcttagaagcctacatttatcatcaaaaatctcaactaggagtccactgaccattttggtgaatgagactggagaggccaagtttggtccaagttatctgtgtattagatgtgatgcggcatgtgtgtgtgtgtgtagggggacgtgtgtggggtgtgtgtgtctctatgagggtgtgggggagcggggagaggtcttgtgatatatgtctgtaggggacatgtatgggatatgtgtgtctataagagggtgtgggagagtggggagaggtctcctggtggtatatgtctggggggtttgtaggtgtgtaggtgagttgtgtgggtggtttatgtgtgtagagtttttctgtgggaggtgtctgtatgtgggggagtgtgtttctctgggcgttgtgtaggcaggattttgtgggtgtgcgtgggtttatgtatggattctactagtgtctgcgggacctgtaggtatgtttgtatgagctgtccgtgaggtgtaggtatgtcgggggacatgggagtgtctgaggtatatgtgggtggtatcaatgtgtagttgtctgtggggtgtgcgtatgaaggatcctgacgtggagtgttgtgcattcatatctcagggaagctggtgcccagctctgtcatttttcctaggccctcggtgctgcccacgcctacccagctcaatggtctgtacctatgaccatgcccctggtgtcctgagctcagcctcctacccactaagaaactcaacagtctggtctgtgtttggcagggtaagagggtgattgtcttctggccctggcctgaccctggaagagtagaaggtgtcctctgatttggggggcatccccccaggtgagggagtttcagataacatgatggggctggatattttcttctgtcctcacatgacagatagcgagggcctcagataatgctggaaggcatcatctttctattttgctttccatcaaaaatctctttgggaaagacagtttctaacattcttgggatagtgacttcttagtgcccctcttcttgtctgacgtcaggtactcacgcatttctgcagccctgtgactaagttgcgtgttctgtctggttcttctcttcctctcagcattcatcacttgtttctcagcattagcagcagtcatttgccactttatgattgttatcatgctctttcctctcctaacagtgctatccccaatttctgattttctgtcatttctaaatgttgcatgtctgtgactaactttgcacacattgattttttttttattttttatttttgagatggagtctcgttctgttgcccaggctggagtgcagtggcgcgatcttggctcactgcaagctccacctcctgggttcacgccattctcctgcctcagcctactgagtagctaggactacagacgcccgccaccacacccggctaattttttttaaattttttagtagagacggggtttcaccatgttagccaggatggtctcgatctcctggccttgtgatccgcctgccttggcctcccaaagtgctgggattacaggcgtgagccaccgtgcccggcctgatttttaatttttatcactgtgatatttctcaagctgggttcttgtgcctgggtcaaagctgtgggttatcagagtgtcatctgggaaattagtgtgtgtgagtccccacacacagctgctcaccacattttggaattgtcttggcaacatatgagtgcatcagtttcacacaattctatcagctatatatagacacatttttttcatgggtttattaacaattctctgatcacttcgtgatcaccagttctgcatcctctgagtatggttagccacattgttcactgcacaagggcatctggccaaggaataccagcccatgctccacacacagaatggggagcaacagctcagggctgtgtctatctgtaggggcatgcagattgaaaatgggcttgtagcagccctgacagtgaatgctgcaaagagaccttatacatgtatatcagttccttttttaaatttttttgagatggagtctcactctgtcacccaggctggagtgcagtggcgcgatctcggctcactgcaatctccgcctcctgggttcaagcgattctcgttcctcagcctcctgagtagctgggattacaggtgtgtgccaccatgcccggctaatttttgtaattttagtagggatggggtttcaccatgttggccaggctaatctcgaactcctgaccttaagtgatctgcccaccttggcctccaaaagtgctggaattacaagcgtgagccaccacacctggcctctatttcgaatattaaactttaatttaccatatcccaaatatttttccttttgttgctattatgggctgaattgtgtccctccaaaatgcatatgttgaagttctagcccccagtacctcagaatgttacctttgaggtgattaagttaaaatgaggttattaaggggggccctaatccaatatgactgatttctttataagaagaggaaatttggatataggcacgcagaaggaagaccatgtgaagacagagaagatggttgtaagagacagaaaaacccaaagtgtgtttctcctactctcatacacaccgctcaccagagagtgcttcacctctggccacaaaaatgggtggagatttctccccaccaacaacctgttctccagcagacactaactgggtgttctctaattcaagtcaatctagtgttagattttttaggttaagggctcagtgccacaagactgctctctgcttcagatgccaattccaagtggtaagttgtcagctatacttctgaccaactggctataaatcaggggttcccatgccaccctccttgggttcaactctgtgagtggctcacagaactcagggaaactttagttatatttacccatttattataaagggtagagacaaacaccagatgaagagatgcatagggagaggtatggaaggaggggtgcagagctcccatgccctctccaggcaccacaccctccaggcaccttcacatgttccacagtctggaagctctcgaaaccctatcctcttgggtttttatgaaggcttcatgattgatcgcatctttggccatgtgatcaactcaaccatcagccccactccccattccccagaggtcaaatagtgggattgaaagtttcaaccctcagctgggcacagcagctcacgcctataatcccagcacttttggaggccaaggcgggtggatcacttgaggtcaggagttcgagaccagcctgaccaacatgatgaaacccatctctattaaaaatacaaaaatttgccaggtgtggtggtgggcaactgtagtcccagctatttggaaggctgaggcaggagaattgcttcaacccagaaggtggaggctgcagtgagccgagattgcctcactgcaccactccagcctgggcgacagagcaagactcagtgtcaaaaaaaaaaaaaaaaaaagaaagaaagaaaaaaagttccaaccatctgataacaaaagatgcttctatcacccaggaaattccaagggatttccatgtcagttgttcctctcactcaggaagttataaaggtcttaggatctctgcgtgaggaactgggtggaagaccaaatattagaacagaagttctcctagcatccctattgtcaagagttttaggagctctgtctcagaaatggggtatagagaccaaatatatatttctttacaatatcacaagaatcatctacaagccaaagaaagaggctatagaagaaaccaaccctgctgacactttaatctcagccttccagcctccagaactgtgagcaaataaatttatgttgtttaagccaccatctgtagtacttcttgtttttttttttttttagagacaggttcttgctctgttgcctaggctggagtgcagtagcacaatcatagctcactgcagcctccaacatcttggtgcaagcgatcctcccacttcagcctcctgagtagctgtgactacaggcatgtgccaccatgcctggctaattttttttatttttgtagaaacaggatctgactatgttgtccaggctggtcccaactcctgagctcaagcaatccttctgcctcagtctcccaaagtgctgggattacaagtgtgagccaccatgcctggcctgtggttctttgttatggtggttctaggaagctagtatagttgccttatttttctcataaatttagtttttagataccaaagtttaaaaattaaacctaggcctggcacagtggctcacacttgtaatcccagcactttgggaggccgaaggaggcaaatcacttgagtccaggagtttgagaccagcctggtcaacatggcgaaaccccaactctactaaaaatacaaaaaatttgccaggcatggtggtgcacacctgtaatctcagctatttaggaggctgaggcatgagaatcacttgaacccaggaggttgaggctgcagtgagccgagattgcgccactgcactccagcctgggcaacagagcgagacttcgtctcaaacagaaaaacgaaaaaaaggcctgggcgcagtggctcacacctgtaatcccagcactttgggaggctgaggtgggcggatcaactgaggtcgggagtttgagaccagcctgaccaacatggagaaacctcatctctactaaaaatacaaaaattagctgggcatggtggcgcatgcctgtaatcccagctattctggaggctgaggcaggagaattgcttgaacccaggaggtggaggttgcagtgagctgagatggcaccattgcactccagcctgggcaacaagaacgaaactctgtctcaaaaaacaaaaacgtaccaattaaacctagccatattgttgctgctaataattttatgaccttaataaaatcttcccttccttcttttgtatttaaaaataattaactgttaagcaaatgcgggatttattttggggtgaaatatgtatacaagttaaattatttgctgctggccaggtgtggtggctcacacctgtaatctcagcgctttgggaggatgaggcgggaagatcacttgaggtcaggagtttgagaccagcctgaccaacatggtgaaaccctgtctctactaaaaatacaaaaattacccgagcgtggtggtgcatgcctgtaatcccagctacttgggaggctgaggcaggagaatcacttgaacccaggaggcagaggtttcagtgacccgagatcgtgccattgcactccagcctgggcaatgagagcaaaattccatctaaaaaaaaaaaaagtgctgcaaagcagttgtcccaatagcatttatttaagtggggcgggggcgggggggtgggggcggggggagattcttattggttcgtaatttatcaagttagaccttttatgaaattccccccatgacctttgaccttctgtttttaacctggtaccaaacagcttttatcatcgtctcgtggtgtttatgttttgaagtccaatagggtgagttgtctatgattgtttccttcttttcccaaaaatattctttggagttcttacctactgattttttttttccagatgaattttgctgtcacttaagtttgacaaaatgttccctttgaaatttcaaatttttgaaatgaagtatgagatctaaaaaaaaaaagaaacctgtgtattggctcagcattacccttattcctctcagccaagtgcaagggatcacttactcaaatctttattcatcccactagagtttaatgacttccttgaatggctgttcaatgttcagtgacaggtctggcttttgttgtgaggccatctatggagtctctgggacccttccagtccctggaatcagtttggtctgagaggtcaggacttggaaacatactggaggcagggcaagggcaccctgctcttgttttggcatctacctcttttccgctggtccttcttatccatccaactagtccttttccctgagccaggtccatactttcccaccccaaacccttcctcttgtttcctggctctctgtttctggctacattcatttcctacactcctgtatcaaaagtaccacaattgcttctcgttcccacagtgcagtgcggctgagcgcctcagagcccgcggggacgctgcggggggattgcggggagggggcgttgggaggtgccgatgttgggctgggcggatgagcgcatctgcgtggtgagccttccaacgtgcgcgagaaggacgtggaagaccttttctacaagtacggccggatccgcaagatcaagcttaagaatgggcactgccttgtgcccttcgccttggtgcgctttgaggacccccgagatgcagaggatgctatttatggaagaaatagttatgattatggccagtgtcggcttcgtgtggagttctccaggacttacgaagtcggggtgggtggccccgtggtgggaggaatgggccttctgcaagaagatctgatttccgagttcttgtttcaggacttcctcaggcagctggcaggacctgaaggatcacatgcgagaagttggggatgtctgttatgccgatgtgcagaaggacggtgtggggatggttgagtatctcagaaaagaagacatggaatatgccctgcataaattggatgacactaaattccactctcatgatagtgaaacttcctacatctgagtttatcctgagagaagcaccagctatggctactcacagtctcggtttgggtcaaggggccgtgactctccatactaaagccggggttccccacaccacttctctcctttcaggccctactgagacaggtgatgggaattttttctttattttttaggttaactgagctgctttgtgctcagaatctgcattccagattgaggatttagcgtcttaggaaattattttaattttttttttttaaagaagaaaaaaaaactacatactttctaccagggccatattagcagtgaaacattttaaactgcagaaattgtggttttggttcagaaacaagttgtatatttttcactcctgaatatgggtaaaaaatcagttccgtctttgtgggttgctctgctatggagatcaacagttactgtgactgagttggcccattctgcttaaaaatatgttttaaacgtttaagaaaaatgctcatcatcactggccatcagagaaatgcaaatcaaaaccacaatgaggtaccatctcacaccagttagaatggcaatcattaaaagtcaggaaacaacaggtgctggagaggatgtggagaaatagaaacatttttacactgttggtgggagtgtaaactagttcacccattgtggaagacagtgtggcgattcctcaaggatctagaactagaaataccatttgacccagtgatcccgttattgggtatatacccaaaggattgtaaatcattctactataaagacacatgcacacgtatgtttattgcagcactgttcacaatagcaaagacttggaaccaacccaaatgtccatcagtgatagactggattaagaacatgtggcatggctgggtgcggtggctcatgcctgtaatcccagcgtggctcatgcctgtaatcccagcactttgggaggccaagacgggtagatcacgaggtcaggagatcgagaccatcctggctaacacggtgaaaccccgtctctactaaaaatacaaacaattagctgggcgtggtggtggcgggtacctgtagtcccagctactcggtaggctgaggcaggagaatggcatgaacccaggaggtggagcttgcagtgagccgagattgcgccactgcactccagcctgggcgacagagcgagactccatctcacaaaaaaaaaaaaaaaaaaaaaaaaaaagaagaagaaaatgtggcacatatacaccatggaatactatgcaaccataaaaaaggatgagttcgtgtcctttgtagggacatggatgaagctggaaaccatcattctgagcaaactactgcaaggacagaaaaccaaacactgcaggttctcactcataggtgggaattgaacaatgagaacacttgaacacggggtggggaacatcacacactggggcctgttgtggcgttgggggaggagggagggatagcattaggaggaatacctaatgtaaatgacgaattaatgggtgcagcacaccaacatggcacatgtatacatatgtaacaaagctgcacgttgtgcacatgtaccctagaacttaaaagtataattaaaaaaaaaaagtttagtaattgaaaaaaaaaagtacaacaattgggttggttggaacagcagaaatgaattgtctcacagctctggaggccaaaagtctgaactcaaggtgtcggcaggaccatgctccctctgaaacccatagggaaatccttctttgccccttctagcttctggttgtttgctggcagtctctggcattccctggcttgtagacgcatctttccaatcgtctgccttcacatggtagtctccctgtgtctgtctctttaagtggctgtcttttgttttttgtgtttttttaatttcaatttaatctattttttgtagacacattgtttcaccatgttgccaggctggtctcgaactccagggctcaagtgatcctcccgtctcagcttcccaaagtgctgggattacaggcgtgagccgccacacccagcccacatggctgtcttcttatgggaaaccagacatgggattagagacccactctattagagtaggattgcatttaactaattacatctgcaacaactctatttccaaataaggttacattctgaggtactaggggttaagacttaaatatatcctttttaggaaggacacagttcaacccacaatattagctggccacatgtttcccctgatctgtactttacttgttccccctggctctggtccctcctcgggtcaggtcctgcctgagcctcccctggccatgtcccttctttgtgcctggaccctcctgattaataccccatccccacccttgtgccctcagctgacttcttgtacctcccaccaggcatgatgacctgaaggagatgctggacaccaacaaggattctctcaagctggaggccatgaagaggattgtggcggtaagaggggaaggaggaggcctccctccgggcggggcctgggtggccaagagcagctctccttagctccttgtagaccttccctctagttagtgctgtgcctctcgctttgtccctcttcccctaccttgaccccaccacccagatgattgcccgaggaaagaatgcttcagacctgtttcccgcggtggtgaagaacgtggcctgtaagaacatagaggtgagcactacctggtgagggattgcttgtccccacctcccccaggaccacactcaagcttggggtgaggaaggaaatgatttagcccctgggggcccgacctgctgagaaatgtctctgagccaggagaagacactgtctccatgtccctgaactggatgtggatcaaggtaaaggacccggatacactcaggggtgctctcccccactgggagagtttgtccccatggaccgcagctggctggggagatgacatcccaggggtaggggggtgggcacaggtgcctgctgagaagcgttctgctgagaaacgtgctctccccaaggtgaagaagcttgtctatgtgtacctggtacgctacgctgaggagcagcaagacctggccctgctgtccatctccaccttccaacgtggcctaaaggtcaggggtctcagtttgcctcccagggcctgggcctcgttggcgctgtatcggaggagtaggcctggggagaggccatgagcatgggagcgggctctgcagaccccttcctacctgcctaaaattgggagggtcacagtcagaagaggccagccagaccctcagagagtggaagctgggctcagaaggggcgtaagagatgaagtgggtacccagggcccctgtctctcttcccaggagcctgtggtaatggctgcttctagtatgaaccacttgagcccccggagagtggagagtctctagcaatggagaacccctcaaccctcacccccctttgtgtaaaggtgtgaattgtggtccacagccaggtagatttcaacctttagcagtggcctgaatcccccacaccattctcaccttttgtttcattttgcccaaggcctctagttggatttacatatgttaggtgcatgtataagtctcccccctaagggcttttctggttagtctaagacatcttgagggtaaagacagccatttcaaggccattctctccatattggatttttcagctctgattacaaccattaactcctctatttttgcatacctttatttatttatttatttatgagacaggttctcactgtgttgcccaggctggagtgcagtggtgcaatcatggctcactggagcctcgacttccctgagctcaggtgattctcccacctctgtctcctgagtagctgcgactactcagcctgcatcaccatgctcggctaatttttttgtagtttttgtagagatggggtttcaccctgttgcctatgctggtcttggactcctgggctcaagtggcctcagcttcccaaagtgctgggattacagggatgagctaatactcctagcctggatacttttagttcaaatttctgtgagagagattgtgaaaggtccagctcatcttttcatatccagaagttctgtaggttgctgggtagacaggattgctgctcaaatccagggcccaccccttgtccaatctgctatggccagcaagaggggttgacagtcggcttctttggggtgagagtagaaagcatggtcacttgaatatacaattcattcatttagtaaatacttgggtgtctctatgccacacattgtgctagatttctttttataagtcaaaaccatggaatccgtcttagattggcaagtaatcttttggtttgagtaagggttaagtataaaaactaatctgaaattgttgtacagattttcacctatagtctctaccaactgaccctgtcccccttttagaaaaccagagctcatttagttcaactcaatgtgataatttctttctgcaaagtgccaaatagtattttaggttttgtaggccttatagtctcaactatgcaactactcaattttgcccttatggtgcaaatgcagccattgacaagtgggcgtggccgtgttccaataaatctatataaaaaacaggcaatagacagattttatccaagggctgtagcatgccagcctttgctctagaacatgtctaacaggtcatcttttctgatagggacctcactccttcataaggcaacttgctccatctcaagacaactaccactatttggggtgttttttaaaccattctcttttgttgaaacctccacaactataatttttaaaaattgatttcaggctgggtgtggtggctcatgcctgtaatcccagcactttgggaggccgaagcaggcaaatcacaaggtcaggagttcaagaccagcctggccaacatggtgaaactccatctctactaaaaatacaaaaaattagcttggcatggtggcgggtgcccataatcccagctactcaggaggctgacgcaggagaatggcttgaacccgggaggcagaggttgcaatgagccgagaacgtgccactgcagtccagcccaggcgacagtgtgagatccatctcaaaaaaaaaaaaaattgatttcaggctgtactgcattatgactgcacctgtgaatagccactgtactccagcctgggcaacatagggagaccctgtatctaaaaaataaaataaaatttactacaggttcacaaaaggcataaagaataatataatgaatatccataagaaatgacacatttctcaaatagccaaagcctcctatatatcttctcttgtttatcattcataggtatgtatttattcctgtgctagtaatttgcatattgttaagcaatataaaatgttttgtaaatggtgtcatcgtactacatatgtattcctttaaaacttgttttcttttttgttgtcactggcttttggtctctcctgcatgttggaaccaatcatttcaatccagccttctcccttctttcaatcctagcccaggctagggccgtgttcactttcttaggagatccctcatggaatcaaacctctgactggcaagcagataatccaggtctccctacatcctgtctttgtacagttggtcccttgaaccccctatgaaaccctactctatttcattttatcagtttagcacagggtccaaaccagggtgattctgaatcttaattatgtccctcctgattttgtgtcttctttcaagatactgataagctatttggaccagggcaaaagactgaggcatagcatgtttccaggttgacactgatctgttaataaaccttctccaagtatatttcaccacgttgtagacccacctgactgtacagacagctggcatttttctatcttgttaggaaggatcttattcaatagcaataaataaataaataaataacacctttcatgtgcaaagggttgtgggtgacacagagataaaacagatgtgaattctgctcttaaaaatgcttggctattaggtgaaacaaaaggcctacctaaaaaatagcaatgcaggaaatgctatgagacttccacaaacatatcactgaaatcaagatactaatatccaccggcctagttaccccatcaaaaaggaaaacacattttttttgataactttctgtgaatctataatcatttcccaaataaaatgctcacacacaaaaaaggaaaacaggtttaagcagatgatgtgactatttgtctctaagaaaacagagactccttccttttcaataaatgtttctaacccatctgtttaaaagtcaattccagaattttgtcaggaattagcatcaattttacctgcaattgtgaggatcttgtcttgtctttttccatttcagaaagtcagggtaatatctacccttctttagtgttctattcccgtcattctctaagagtaatagtacaggcacacctcattgtattgcactttgcagatattgccagatattgcactttttacaaattgagggtttgtggcaaccctacatcaatcaagtctatcagtgccatttttccaacagtatgtgctcacattgtgcctctgtcacattctggtaattctcacaatattccaaactttttaatgattattatatgttatggtgatcagtgatctttgatgttactattgtaattgttttggggtgccacaaaccatgctcagacatgaaagtgaaattaatcaataaatgttgtgtgtgttctgactgttcccccatctccttcaccttgggcctcttcattccctgagacacaacaatattgaaattagatcaattaataaccctacaatggcctctaagtgttcaagtgaaaggaggaaccacacatctctcactttaaatcaaaagctagaaatggttaggcttagtgaggaaggtatgttaaaagctgtgataggctgaaagctaggccacttgctccaaacatttagccaagttgtgaatgcaaagtaaaagttcttgaaggaaattaaaagtgctactccaggctgggcgtggtggctcacacctgtaatcccagcactttgggaggccgaggcaggaggatcacttgagaccaggggttcaagaccgtctctataaaaaatttttttaagttagcctgatgtggtggtacgcacctgtagtcttagctacttgggaggctgaggtgggaggatcacttgaacccagaagtttgaggtgcttctccagtaaacacatgaatgataaagaaagcaagacaggattattgctgatataggaaaatttaagtggtctggatagacgatcaaaccagctaccacattcccttaagccaaagcctaattcataggcaggtcttaaatctctccaattctatgatggctgagagaggtgaggaagctacagaagaaaagacggaagctagtggaggttggttcatgaagtttaagtacagaagccatctccataacaaaaaaatgcaaggtgaagcaaaagtgctgatggagaagctgcagcaagttgtccagaagatctagctaagatcattgatagatgtgactatgttcaacaagagatgctcaatgtaaatgaaacagcctcttactggaagaagatgccatctagcactttcctacctagagagaagtcaatgcctggctttaaaaaacaggctggctcttgttaggggccaatgcagctagtgactttaagttgaggccagtgctcaatgaccattctgaaaatcctggggtccttaagaattatggcagatctcctctgcctgtgctctataaatggaacaacagtgccatgacagcacatctgtttgcagttatggtttactgaattttttaagcccactgttgatacctaccgcttaaagattcctttcataatattactgctcattgacaatgcatttgttcactcaagagctctgatggagaggtacaaggagattaatgatttcatgcctgctaacacaaaatcagttctgcagcctatggatcaatgagtaattttgacttttaagtcttattatttaagaaatacatctcgtaaggctagagctgccatagatagtgattcctctcatggatctggacaaagtaaattgaaaaccttctggaaaggtttatagaaaccttctggaaaggtttaccattatagatgccattaggaacattcatgattcatgggaggaggtcaaaatattaacattaacaggagtttggaagaagttgattctaaactccatggatgactttgaggggttcactacttcagtggaggaagtaactacatatgtggtggaattctacctagaagtagaagtagaattaaaagtggagcctgaagatgtgactgaattgctgcaatctcatgataaaacttgaatggatgaggacttgcttcttatgagtgaacaaagaaagtcctttcttaaaatggaatctgccgggtgcagtggctcacgcctgtaatcccagcattttgggtggccgaggtgggtggatcacgaggtcaggagatcgagaccatcctggctaacacagtgaaaccccgtctctactaaaaacagaaaaattagccaggcatggtggcgggcacctgtagtcccagctactcgggaggctgaggcaggagaatggcgtgaacctgggaggtggagcttgcagtgacccgagatctcgccactgcattccagcctgggcgacagagcgagactccgttacaaaaaaaaaaaaaaaaaaaaaaaaaaaaactcctggtgcagatgctgtgaacattgttgaaatgacaacaaaggatttagaatattacataaacttagttgataaagcagaggcagagtttaagaggactgacttcaattttttttttttttgtagagactggggtctccctatgttgcccaggctggtcttgaactcctaggctcaagcaatcctcctacctcagcctcccaaagtgttgggattacaggcacaagccatcacgcccagcctacattgtttttttaaagacataatgctattgcatgcttagtagactacagtatattgtaaacataactttttttttttttttggagataggatctcactctgttgctcagtctggagtgcagtggcatgaacatatgtagctcacttcagcctccaactccctgggctcaagtgattctcccacttcagcttcccaagcagctgtaactataagcataacttgtatgcaccaggaaacaaaaaatttatgtgactcgttttagtgcgatatttgctttattgttgaggtctagaatcaaacccacaatatctccgaggtatgcctgtaatatatagctgctgctgctgatagtgggaagacagtcctaagccccatgatcacaatacagtgtaaggaatgcttttatacgttctgtataggatgcagtaggaataaagaagaagggcttggggccgggcgtggtggctcacgtctgtaatcccagtactttgggaggccgaggtgggcggatcacttgcggccaggagttcgagaccagcctggccaacacggcgaaacctaatctctactaaaaatacaaaaaattagctgggtgtggtggtgcgcgcctgtagtcccagctacttgggaggctgaggcaggagaatcgcttgaacccaggaggtggaggttgcagtgagccgagattgcaccaccgcactccagcctggcgacagagcgagactccatctcaaaaaaaaaaaaaaaaaaaaaaaggaagggcctacacccctattttgttttaaacactgtggaagaacagcagcttttgcaatgatttctgggagaaaggagtgtaaggttgaactccggaagggagaccagcttgcatctgctgggcggtcacctcaggcattaaaacaggcacctccaaaaaaacccttacaaggaacaggaagtgtttcaggtgtttcagcaattttaggtgttctgaaagtttttcagtgtttctggaagtgaagctacccattgcaacacctgttcaggtgtcagatttctgcaaccagagccaaaattaagtgtcccccagatacccatcactggcacaccatccaggctccagtcaagcggcagggaagcaagagctagtggtcgctggggacagtgacttccaaaggtgtggcctccccccatcagggcacctggtgccctttcatagctctgcctccacctctgcctttaggatcccaaccagctgattcgtgccagtgccctccgtgtcctctctagcatccgtgtgcccatcatagtgcccatcatgatgctagctatcaaggaagccgcctcggacatgtcaccctatgtgcggaaaacagctgcccacgccatccctaaactctacaggtatgccccagccctgtcccacgctccccaggaggctggttcctaagttctcaacccacccctggcctttcctaagtcttgcctgctgcttctcagagggtttgaggagggtagtttgggggactgacagagatggaggagaacaataaggctggggtgcaggaggtgagcatggcttggacagatattgggaaggctggggctgagagtggcaaattcccctcaccgatttctccctcagtttggactctgaccagaaggatcagctgatagaagtcattgagaagcttctggctgacaagaccacggtgcgtgtataggggcgctccgggaggggtggtgaccggcagccggccttccacccttcgcgttcaccctctcgtctttgttctttccccagctggtggcgggcagtgtggtgatggcctttgaggaggtctgcccggagcgcatcgacctgattcacaaaaactaccggaaactctgtaacctgctgatcgacgtggaggagtggggccaggtggtcatcatcagcatgctcacccgctacgcccgcacgcagttcctgagccccacccagaacgtaagtgggcccagcccaggcagagcgggccgaagtgtgtcccggggaggcgcccacagacccgtcggtctccccgtccaggaatccctactagaggagaacgcggaaaaagccttctacggctcagaggaggacgaggccaagggcgcggggtctgaggagacggccgccgcggccgccccctcccgaaagccctatgtcatggaccccgaccaccggctgctgctgcgcaacaccaaacccctgctgcagagccgcagcgccgcggtggtgatggcggtggcgcagctctacttccacctggcgcccaaggcggaagtgggcgtcatcgccaaggcgctggtgcgcctgctgcgcagccacaggtgcgctccgcccccagccccgccccctccctcgcctcctgccccgccccacgggctgcccggctccgccccctcacgcccaccagccgcttccacctctgcccacccgctccacactgaccgtagtcctgccctccgcactggtcctctccccgcaacgacttgccccaccttttcccctcatccgctgacccttgccccaaccgaggggcccggggtgctctgacccgtcctctccgcagtgaggtgcagtacgttgtgctccagaacgtggccaccatgtccatcaagcgccgggtgagcctgcgacggcgggctgtcctcgctgtccgagggccgcttctgcgggcactggaggcgttgtcggggctgggaccggggccggggaaagggaagatggaggaataccctggctgtgcagaggatggggcaggggaggctccaaatacagatagggagcagggcctggatcctgaggggccgctgaggggatgtccagtggaaaaagagctagtcagatctgagatggacgagggaagacttgaggagtggagggcagtggtgaggaggcaaggatcctgggcgctgggtcaggataggaggggtgtctctgggcagcgaggcaggcctggggcttcggtggagctccctagctgcctctcttgtgccagggtatgtttgagccctacctgaagagcttctacatcaggtccaccgaccccacccagattaagatcctgaaggtgagtgagggacagaagtgcatgtgcttcccagccctccccaccccatgtacccactcaaataactcacagtggcccccctggtgcctgcctattcctggggctgagcccaggagcccatgactgccccagctggagctgtttgttcagggagctgggctaaggagggtcagggggagaagggaactgctctttgcctagtacctggtatacacctgctactcttcataaatgaagtaacctgatatcacctcataataatcccaggatgtgtacattatattccttttataaaaatatagactctggccaggcacagtggctcacgcctaatcccagcactttgggaggccgagacaggcagatcgcctgaggtcaggagttcaagaccagcctggccaacatagcaaaacctcgtctcaacgaaaaatacaaaaattagccaggcgtggtggcaggtgcctgtaatcccagctactcgagaggctgaggctagagaattgcctgaacctgggagacagaggttgcagtgagctgagattgtgccattgcactccagcctgggtgacaagagcgaaactccatctcaatctaagaaaaagaaaaaaagactctgggaggtaactgccccaggtcacataattctgctgactccaaggttcacacttttctctcccacccacagtgttatggcccccacacacctgccccctcaggctctcctgcaaacattcacggacaaggaaagtggcgggagcccatacctccatttgattcctgctctgctgcctcattattgagtgatttccttcagcaacagttaatcttcctaacccttgtgaacatccactatgttctaggggtacatgatgagcaaactaatcagggaccctgcctttgtggagcttacagatgtggggaggaggagacattaagcagttaatcacaaggcaaatgtaaaagtccacttacaaaatatggaagaaagtgtggagagctataagggcataaaatagggagacctcatctagtctggtgccagggaagttttcccggaggatatgagacttgagctgaagcctgagagatgaacatgaattatgcagggacagaaatgggaagaactgctccacgcagaggaaacagcatctgcgaagaccctgggttaggaagtggagtgggattggggcctggaagacaagggggacagtgatgggagatgggaggtagacagcaagcagatcattcagggacttacagaccatggtgaatacgatggtctccatcctgaaagcaataggaagctttaagttttcaatgcagtagggaggtgacatggtcatactgtaagcatactgtgtagggaatccacttaagaggcaaactggtcctcttgctttttagacaagtttcataacctgtcaattccctcatcagtgtgaggatgatgcagggctgtcatgaggattgttttctggtctatgaagtgtatttggaatgaaagcacagaaagtccactggccaacccacccattttctgcctctccaaccctccctgcagctggaagtgctgaccaacctggccaatgagaccaacattcctactgtcctacgggaattccaggtacaggccagctcccagccagaagggcctgggagaggggcccatcagatccttgtgccctggtgggtaaacctcctcttatgagcccaaggctggagaaactattatcttacattcccgttccaatgtgtttggctggctttgggccaaggaatcactggattgggggtggagttgtcaccccctttcccaagtcttagtcaccggcatgataagccataaaatgaaaggccacagccttcttgaaggtcaccctcaagcctgcagagtcactgagggatttctttgtcatatcccacagacctatattcgcagcatggacaaggactttgtggcagccacaatccaggccattggacgctgtgcaactaacatcggccgagtccgtgacacctgcctcaatggcctggtgcagctgctgtccaaccgtgatggtcagtgtttccctgagtgtctaaccgtgatgatcagagggtgtctgcctgcaggtctgactctgctggccactggatatccaccagtctgcctagacacaatgtgtatccattggtctgtctgtcttgatcagggcccaagtgttcctacacctctgagggctgctagagaactgaagggggttgagagaaagagccaagggcctggggcactgcaggtgtgtctgtccacctgagtgtggccatctgactgtcttggggtccacacactcatttttgttctgtagagcttgtggttgcagagtcagtggtcgtcattaagaaattgctacagatgcagccagcacaacatggagagatcatcaaacacttggcaaagcttacagacaacatccaggtgagggagaagccatattttcactccccacttcaaggtcctccccatgatttcaagactgtataattacatatgctagccttatcaaaagtaacttccaaaccttaggtcttcaggtggaaggagcagagacactggaccatgtgaccctgaccttgttacccctgatttgctttccctttggagaccctcaatgagcacgatggactttactactactcttgttttctctctaaagctctagccaaccatggttgagtgacaaatcttgtgtttttctatcgcactgctaagctgaaacatctaaacaaggcattcccaaagattctggagagtaacatggaaataaagtactgagggtacaatgaatccagaaaatcaatcttttacatcatgactgacttagggtcttgaaagctctatgctaatgaagccctagggaagaggggaaatgctgtctaggaaatgtctaccttttaacctctctctatctcaccacccccaactcccatttccagagaacccataatacaacaggccagcacagatgaggagtgctgtttccctggaagtccacaatcctacccacccactttcccgtatttacccatcttcactcctctcccacaaccacaggtgcccatggcccgagccagcatcctgtggctcatcggagagtactgtgagcatgtccccaggattgcacctgatgtcttaagaaaaatggccaagtcattcacagcagaggaggatattgtcaagctgcaggtcatcaacctggcagccaagctctacctgaccaactctaaacaggtaaagattaagagatgaccccccagatactctggtccccagaaactccctagacagtattcttttggccctccctaggcagggctgaactctagctcctattttggaaaagaagaatcagggaaggtggctggtctgcccacataaccaatgctaccccagtgcccacaaagaccttgtagtgctggtggtcactgttgaagagactctcctatgaagctgtgacctccagtctgctagtacaagagtcctgtctgccaccttggaactctggggctgtgaagaaccacagttgattgggataagggaagggcccaacagtggcaggtactgatgggagaacatgcatcccagatgtggtctgtgcttctttccaaagcttgacaatgcttggccagtctgtgccaaagataagggggtgagtctctgcttgggcttgggtggtgctggtggccactgtcattcccaaggtgaaaggttataagagatacacagccaaggatgaggctcaactaagttgtagtatcagggtgttcagagcctcctagctgtctggcatctcctgagatggttccaggagattctcctaaaatgaagcataatgtgctgagcttttcaaggtgtcagggacatcaaacaccatgacgatttccacactctcccactcagttaagcaggacagggattggcaaactactgcccataggctgaatttggcctattcctgtttttgtaataaagttttgttggaacacagccctgctcattcatttacaaattacctatggctgcttttgtgctacaacagcagggttaactagttgcaacagactgtattgcccacaaagcctagaatagttattctctggcccttttataaaaagactctgccaatccttgaagcaaaacctctggctaggtggctggggtctacagatttatagcagggatatcccctggagactgtagcatccctgccatgtccactgtgcgtgggagtctttggatggtggcacttatctttttcagtggcttctttgatccattgtggccagagtgagccccagaggctcaaggtgaggtaggcagggccaccaagtgctgtgactgtaatcaggagtcaaaggacagcagcaacatgtggaggcaactgagtctgtataattaaatatgctagccttatcaaaagtaacttccaaaccttaggtcttcaggtggaaggaggagagacactggaccatgtgaccctgagcttgttatcagtgttgtgggcaaagcagattggagagagagaagttagagggggagagagagaagttagagggagaaagagcaccatggggaagcgttcaatcgttgaaaaaatatttgtatacttcctttgttcaggtgggaggaaggagcaagtgggaggaatgtttgaaaagatgaagcagcctgggtggggagccacccaggtaggtgggagtcttgacatgctcagcaatgagccagagtcctaaaccccaggatggtgaggttggcatgttttcataagcctgggcctgtccacatgtcatttcccccaagttgtcactgtgagctacatgtgcatttgttcatttatttaacatatatgtaggtgggagtctgacatgctcagcactgagccagagtcctaaaccccaggatggtgaggttggcatgttttcataagcctgggcctgtccacatgtcatttcccccaagttgttactgtgagctacatgtgcatttgttcatttatttaacatgtaggcctactatttgcctggtactgtgctgcgtcctgaggatatgacaatgagtgagacacatttacaggtctccagatactcacagccaagtaggagaaacaggacaaaaataaacattttaaacacagcagtaacagctgtcatcagggttggcacagcgagctgtgggtatatacagctgaaccctcccctaggaatgacccctgtcagggaacccagagtaggctgttcaggcaaatggacactcacctccagggcgcccttcacctgcaagtgagtttttgcaggccccttagaatggttatttgattcaataaagatttttgtcctccctttctttctcctttcttcccagcctcttctgggagtggtaaagaagggggagtccttggggtactaggagggaggtggtttggatgcgcacatgaccatgcttgcaaaacagtagtgatgcttcccatcctgggaccatgagtggcaatctgcccagctaaaaggccacagtaatctcagtcattctctccaatttggacatgggcccacggcatgccagatcctggcccaggatgaggccaaggaaatgaccaagatgaggcctctgccctgctattgatcagcagataatcagatactagaccagaggccacaaaggcataacatgcaggtggcgggggatgggggggttggtaatcaaagtggctattacatccacctggatatagaccctggggaaactgcctagcaggttagtttgcttttatgtgtcaggtgagatgtgtggcaggagggtctgccaggggcacagtgggatctacaaccctcccatgtgaccgcctttacagtgaatagaagattctgacaaattttgcagaattgcttttaaaaacgtaaactttttttaatatgctaaaggtaatacatgcttatcatagaacatttggaaaactcagaaaattataagtttaaactattaataagtccaccatttagaagaccaccattaattatatatttccttattttttattcctatatatagtcattcagaagttgtacttttgtctattgtccaatattttaaacttttctgcttcttttcaatgctttcatatttaatacttttttttccccattcacatttcaattaaacttttcacttagaattttctccaggctgggttcagtggctcacacctgtaatcccagcactttgggagcccaaggtgggtgggtcatttgaggtcatgaattcaagaccagcctgaccaacatggcaaaaccctgtctctactaaaagtacaaaaaaattagctgggtgtggtggtgcgctgaaatctcagctacttgggaggctgtggcaggagaattgcttgaacccaggaggtggaggttacagtgagctgagatggtaccaccacactccagcctgggccacagagcaagatccatctcaaaaataaataaaaattaaaaagaatttcctccaaatttttttctactttcacatttttaaatcaattgtattagttttctgctacataataaattactataaatttggtggcttcaaacaacacacgtttattttctcagtgtctatgggtcgagaattcaggtatggcttagttggatcttatgcaaggctacaactgaggtgtcagccaaggctgagtttttatctggaggctgtactggggaaaggtccacttccaagtcacatggtgccacgatccacttccttgcagttgtaggattgtggccctggcttcttgctggctgtcagctgggggctgcccttgccttctagaggccgtccttagctcattgccataggggcctcccaacacggatgcttaatttctccaaagccacaagggagaaagtctctagagccagtctgctagcaagaccgtcttctttttattttttaatttttatgggtacatagtaggtgtatatatttatggggtatgtgagatattttgatacaggcatataatgcataacaatcacatcagggaatggggtatccatcctctcaagcatttatcttttgtgttacaaacaatcaaattacactctcttagttatttataaatgtataataaattattgttgactgtagtcaccctgttgtgctgtcaaatactagatcttacacattctatctaactataattttgtacccattaactatccccacttcccccacccactacccttctcagcctctggtaaccattattctactctccaactccatgagctcaattcttttaatttttagccctcacaaataagtgagaacatgtgaagtttgtttttctgtgcttggcttatttcacttaaaataatgacctctagttctatccatgttgttgcaaatgacaggatctcattcttttttattctttttttatagtactgcattgtgcatatgtaccgtattttctttatctatttgtctgttgatagacacttaagttgctttcaaatcttggctatggtgaacagtgctgcaataaacgtaggtgtgcagatataacttcaatatgttgatttccttacttttgggtatatacatagcattgggattgctggatcatatggtagcactatttttagtttttgtttgtttgtttgagatggagtcttgcactgtcacccaggctggagtgcaatggcatgatctcagctcactgcaacctccgcctcccaggttcaaacgattctcctgcctcagcctcctgagtagctgggattacaggcgcccgccaccaagtctggctaattttcatatttttagtagagatggggtttcaccatgttggccaggctggtcttgaactcctggccgcaagtgatctgcccgactcggcctcccaaagtgctgggattacaggcgtgagccactgcacctggcctatttgtagtgtttttttttgagatggtgtttcactcttttttcccaggctggagtgcaatggcgtgatcttgcctcactgcaacctctgcctcctgggtgcaagtgattcttcttctgcctcagcctcccaagtagctgagattacaggtgcctgccaccacgcctagctaattttttgtatttttagtagagacagggtttcaccatgttggccaggatggtcttgatctcttgacctcgcgatccacccacctcggcctcccaaagtgctgggattacaggtgtgagccaccgtgcccggcctatgtttagttttttaaggaacctccaaactgttctccagacatttccactaacagtgtacaagggttgccttttctccatgttcttgtcagcatttgttattgcctatcttttggatataagcctacttggggtgagatgatatatctttttttgttttgttttgttttttgagacggagtcttgctctgtcacccaggctggagtgtgcagtggtgcgatcttggctcactgcaacctctgcctctgtggttcaagtgattctcctgcctcagcctcctgagtagctgggactacaggcgtgcgtcaccacgccccgttaatttctgtacttttagtaaagatggggtttcgctgtgttggtcaggctggtctcaactcctgatctcaggtgatccgcctgcctcagcctcccaaagtactgggattacaggcatgagccacccgtgcctggcctttcattgtagttttgatttgcatttctctgatgctcaatgatgttgatcaccttttcatatacgtgtttgctatctgtatgtcttcttttgagaaatgtctattcagctcttttgcccatttttaaattggattattgaatttttttttcctattgagttatttgatctccttacgtattctggttattaatcccttgtcagatgggtagtttgcaaattttttcctcctattctgtggcttgtctctttgttgattcctttgctgtgcagaacctttgtaacttgatgtgatcccatttgtctacttttgctttggttgcccgtgcttgtggggtatcactcaagaaatctttgcccagtacaatgtcctggagaatttctctaatgttttcttttattagtttcatagtttgaagtgttagatttaagtttttaatccactatgatttgatttttgcatatggtgagagataggggtctggttttattgttctgcatgtggatatcccgttttcccagcgccatttattgaagagactctcctttccctaatgtatgttcttgatacctttgtcaaaaatgaattcacggccaggcgtggtggctcatgcctgtaatcccagcatcttgggaggccgaggctggtggatcacctgaagtcaggagttcaagagcagcctggccagcatggcgaaaccctgtctctactaaaaatacaaaaattagctgagcgtggtggcgggtgcctgtaatcccagctacttgggaggctgaggcaggagaattgcttgaacccgggaggcggaggttgcagtgagccaagatcgcgccactgcactccagcctaggggacaagagcgagacttcatcttcgtccccccccgccaaaaaaaaaaaagccactgatttttttttttttttttttttttggagacggagttttgctcttgttgcccaggctggagtgcaatgggtttttttttttttttttttttgagatggagttctcactctgttgcccaggctctggactgcagtgacgcgatctccactcaccacaacctctgcctcccgggttcaagcaattctcctgcctcagcctcccgagtagctgggattacaggcatgcaccaccatgcccagctaattttgtatttttagtagagacagggtttctccatgttggtcagactggtctcgaactcctgacctcaggtattctgcctgcctcggcctcccaaagtgcttgctaggattacaggtgtgagccactgtgcctggacaatgctactgattttttttttttttgaaacggagtcttgctctgtcaccaggctggagtgcagtggcgccatcttggctcactgcaaccttcacctcccgggttcaagcggttctcctgcctcagcctcctgagtagctcggactacaggtgtgcatcaccacatccagctaatttttgtatttttagtagagacaggatttcatcatgttggccacgatggtctcaatctcttgatctcacgatctgcctgcctcggcctcccaaagtgctgggattacaggcatcagccaccgcacctggccaatgctactgatttttatgtggattttgtatcctgcgactttactgaatttattagttctaatagttttttggtggaatccttaagattttttaaatataagatcatatcatctgcaaacaaggataatttgaattcttttccaatttggataccctttatttctttctcctgtctgattgctctagatagaacttccaatacagagtcttcttaataaaacataatcataggatcatatatagtcatataccacctttgccatatcctgttggttagaagcaagtctcaggttttgcccatacccaaggtgagggattgcacaaaggcatgaacaccaggaggcagctactggtggggaagaccttagaatctgtctgccacatccatctagagcttaaacttactcatgtgtaatgtgtgaattgaggatatatttcaattttttttaacagccagttttctaagcatgattagcaggcatctgcaaggtagcatgtatgttggcataggttatggaaaggaagtcagtgtttcctgcttaaaattcctctctgacaactggagcctgttggtgagggggagccttgttctgttcttggcacactggagtgtatctcagaggccttcttgaacagcctgtaattcctgcacatcctggctagatgaggtgggggtcttggtggtgcacacaggatgccacaatccacagggaatggccccttggggtggagaagggtaatgaattattataggcaaatcctgcagtgttgaggtggtgggccagccccttcctgtgttggttgttaacatgcagttaaggctgtggacagatggatccaaataccaaacagttctttctagaactaggcaaggacttgaaggagggagtctgtgatcagccagctgggaaatctgtggaggaagacattgtccaaaccaaaagagggatcagcagcctcttgataattgactatgttggtaagggcatccactagccctggccatttagatggtgtctggccaagagaggggcaggttggtgatgaaatctgttgtgatggcatcttattttcatatttttaagtctattctattagcggtgcatgggattgggattgcttatctgtgactataacagtatcgcaggtgctgctttgctggaagggactgagctgaagagggcctgtgggccagattggaggtaggaatgtggaatcatagtggctctctagagtggtgtggggcaattctgccaaagcagctgctcagactctgggtcagcatctgaggggctttgccccttatggacatctgcttgatgtccctgccagattagctgggttaaccatgtccaaggctacacgtaacagtatgtcaccataaacctcaggaagaacagagtcagttccaggctccctcctgccggcccctgatgcccttgggcattctgcttgttgaccacttggtggttttgatcttggtcacaagtgatggaaacatggagacctgggccagggcaggctccttatgtcagcaggtaggcagtgaagggaagcagatggggtgcagctccagcagatgcaggcctaggtgcagtactgatgggctccttggcctgggaaaagccccttaatgatcctgcttcttttctgtaaaatgggggcaataatgcctacttctcagaaggcttggggagattagatgagctagtgtggagcacctagcacagagttggtgccagaaggcacttgataagtgatggctgctaccgctgttgccatgttaaggcaggttagattaggccaagatcatggcagaaatggagatattttaggtctgcagttgtagcttccctgactgcagactgtgaaccctacatgaccttggcaaatgcatgggcagctgcagtttgccctgatgtcattagaagcttccagggaaggataaagacctctgagacccctgggctgctcagaatctactaaatgggtggatagggcatgagggtggcccctgccaaagggacccctgtttatctgccctgtctttttgttgtctaattccccctgggtggtggagcctggaaactgtgaggtccagcagagcattccatacttccacataccctgctgccctagagtaaagaggctggacaggcctggagtggtagggaccacaaatctagggaagaatggagtccagagccaggagtggggaaagtccaaaaggaaaacctcttttgttggcccaaggcagttgtcaaagttgggatcatcaggaggcatgtccagagagatgagagaaaattctgagcccagaacaagggcaggtggggagggacagctgggtggaagcgccggtcctaagcagggagaggagacgttctgcctgaaagtgtcggcttaaagaatctgtttctgagcctcctgtgtccccatccccccgtcagctgacccacctcttcctgttcctccagaccaagctgctgacccagtatgtgctgagtctggccaaatatgaccagaactatgatattcgcgaccgggcgcgcttcacccggcagctcatcgtcccttccgagcagggtggggccctcagccgccatgccaagaagctcttcctggcacccaaaccagctccagtcttggagtcatccttcaaaggtgggagctgaaatcaagggtaaccttcctaggggaatggaaaggaactggccagagtctctgccccagaccttcctgaggcccctagccaggcaccaggcttctgtggacagtcctgctccctggctcactccttttgtccctcctgtggcaccaggaattactctttcaccctcccataaccactgccagcatcatctcacctgagggtctgccttcctggccaggatggacttgtgcctcctctcctctcaggctcccttttccatctccctccctgagcagacactaggctttggaatacataccaagatcttaaataccaaggacccaggaaggcagaaagcaaaacaacacacaaaggagaggtgtatatttttataaaggtcctgagaaagcagttgcctgcattctgtgagcttagtcactacagtcagtccaaatcccaggccccagggcttcagccttgcctctgttcctgggcttggcccttaaggcctcttttcccaagacaacggccttgagatgggcctgggagggaagggtcctcccgctgcttctccgggccccaggagtggaagccaggaacctacacagaagagagcctccttcacaaagctcagttcttctgggtatcttttcgttctttttctcttccctggacctcacgaatggggagattctgagggtgggcacagctttgaaattctcccaggaagaaggcaacagtccctttctccccgacaccatcctcactcacaggcctgtgctgccctcctccagcagtgcctcaactctgatccagacttctacacactcatgctctgactgttcatccctccctgctgagtccagagcctgactagacgtgcatgctgagcagacaggtcggcagcatctgtgggcccagagtctcctcctgcccacctctgtaggctgcctttccctggccctcagtccctgctctggcctggccagacagccttttcttccagcatgtgggcctaaaggtgcagtcagggtggaagagccattagggcacacatccatctccttcccctacccacctgggaagtcccaaccagaatcaccacccagccccacctggaaaacagctcccagagctttccctcactgctgctacctgcctgacctctaaacctatccctagaccgggaccacttccagctgggctcactgtcccacctgcttaatgccaaggccacaggctaccaggagctcccagactggccggaggaagccccagacccatctgtgcgcaacgtggaggtcagcggggtggagggttgaagtgtgtgtgtgtgtgtgtgtgtgtgtgtgtgtgtgtgtgtgtgtgtgtgtgtgtgtgttggtgggggcagacagtagggagccctggcagtgccggcccagccctcctaacaccctcccccacacacacaggaagaagatctctcccttattgagactcacgtgggcctgttgggcgaatacactgaggtcccaccttcgtgtgacgtgtgctctctcccctgccctgtctgtgtccctcttcttcccctgtgtgttgtgctcctgggccttcccatactctgtttccaccttggtttggcagtgctcctctgtgagcagcattccctcccctccatggacagtgcccctttcttcctcctctgttattccctttgtgggacagaccaggtagggcctcacaaagaggtggaataaagggtaagggcttgtgcctgcctgccttctccccaaccatgatgaaatgaccctgcaccctacccccatctccaggtacctgaatggaccaagtgctcaaatcgggagaagagaaaggagaaggaaaaacccttctactcggactctgagggggagtcaggccccacggagtccgcagacagtggtgagcagatggcagagctggggtcctctgtgctctgcccatgcatctgtgtgactgactatatgaggggtatatgtatatggttgtgtgtctaggggtgtgcacctgcttgtgaattgtttgtgcacctgagggattcatgttccaggtgtgtgtgcttgtgcaggtttctatccatggagtccatctgtgtttctgtcagttccagctggcatgtagggctgggggcaggtcagagaggtttgagggttcagtactgaatgtgaaggtggaacccaggtgtctgctccagacccaaggaggcctgcatatgagggaggaggcctcatattgttcctccacagaccctgagtctgagagtgaatcggacagtaagagcagcagtgagagcggctctggggagtccagcagtgagtccgacaatgaagaccaggatgaggatgaggagaaagggagaggcagtgagaggtgagaagggagctagccagatggctggtggggttcagggggctttcctggaaagagggctagcattgagctttagccagtctcctaagagcccctgagcccctcgtgagctgggtggggctgtcagctcacatgacgcctactttcgctggctgcaggagatctctgaggcctcatgggctggtgtggagaagcaaccagagtcctagagcctgagctggcacaagctggcttcaagctctcacggggtccctgctataggacctcaggtgtgaaccctcctggctcaggctccccacaccactccagcttttcagcatttctcctgcttctgtgaagcaaggagggagtgtccaggccaggcctgagccaacctttcccactccttcagtgaacagagtgaggaggatggtaagaggaagacaaagaagaaggtgccagagagaaaaggagaagcgtcatcctctgatgagggcagcgattccagcagtagctcatcagagtccgagatgacatcggagtccgaggaggagcagttagaacctgcctcctggagcaggaaaacagtgagagccttggggcagagtcagggtgtgctcatgggccagggccctccccaacctctgggccaggcccagacatctatctccctaccatccagaacagaacatgacatcttctacccaacccagaacatgccaaggtgctccccttccccacacccacatcccatttttctctttcagcctcccagcagcaaaagtgctcctgcaaccaaggagatctccctgcttgatctagaggattgtgagtttgggtggtaaaagtcacaggggaaaggaggcctggggagcatgaattagaacagcccatagggactctggatcgggttcctcaggtcttgtgggagcaggggagcagacagaacatatcttcaggcctgagagggcagcagggctgacctccccaggtctggggttgaggtctaggaatgggtattttgcgagagcctccaggcagccatgtgccccgctgtccatggtgctgaaatgcgtgctccttgatccctaggctccctgctcaacccaagccacctccactttgcctcctcatagtcttatctactcccacagtcacccctcccagtgtccagcctgtgtctcccccagcaattgtgtctaccagtctggctgctgacctggagggcctgacactcacagactccaccctggtaccgtcggtgagtgggatggaggaggggaccgggctggggcagggacacatccctgtgctgcatcctatggtgtggatgtgtgtggggggtgggtgtgatggaggatgtgatagctttgagtcccagctgctggatggccctaggggacaatgctgggacaggctctctccatcttgctcagttctgtccttccctacccctccactctagcttctgagtccagtatcgggtgttgggcggcaggagctgctgcaccgggtagctggcgaggggctggctgtggactacaccttcagccgccaacctttctccggggatccccacatggtgtccgtgcacatccacttctccaacagctctgatacccccatcaagggcctgcatgtgggcactcccaaactgcctgctggcatcagcatccaagaatttcccgaaattggtgcgaagggctttggatggggtggaggaggaggctcctgggcagagtcagtctttctgtggttgctgataccctccttgtgccaggccaggggccaagctataggggcacagagatagcatctaacatgatcaacactctggtggacaagacagatgatgaaataagcaagttcacatcagggcgggaggtgcttgcagcagcagatttgggccttggttgtttcaggactaacttaaatgtggtgagggtgagtgggggaaagggtgcttagagttcaggaggaaaccgggaacagtctccagcagccaagaaagccaagattctgtagagggctggtcagctgtgacagtggagaggagagtagggctaggctgggttctagacctatcaggtgatggtggccctccctctccccttcactgccttataccacttcagagtccctggcacctggagaatctgccactgctgtaatgggcattaatttctgtgactcaacccaggcagccaacttccagctgtggtatgtgcccaactcgaggtgggggtgagaggatgggctggaaagggacagggtaacaatgaactggaaatggaggtggtgcttagtggggatacatcatgattgggtgggtctggaagccatctcaggccctcattcctgacctcactctttcactgcctccaagctgtgcctctacacagggtgggaagtgaggggagagatgacagccttaattcttctccgtttcctcccacccctcccagcacccagacccgacagttctacgtctccattcagccacctgttggggagctgatggcccctgtgttcatgagtgaaaatgagtttaagaaggaacagggtgagtgctccctgggagtgggcagagagggaagtatagaagctgactccagaatgtccagcttggatggtagggagaatggtggtgtccttcatctagaccaggggtcagcaaactttctgtaacgggccaaagataaatgttttaggctttgagaatcatgtggtctctgttgcagttacaacacgactgtggctgttgaaacatagaaacatccacagacagtatgtaaatgaacgagtatggctgtgttccaagaaatttccatttatatttatagatactgaagtttaaatttcatgtaattttcatgtgtcatgaaatattaatcttttgattgctcccccaacacttaaaaaatattaaaaacattgtgggccatataggtggtgggctggatttggtctggaggctgtaatttgcaaaacctctggcctagaagaaagaagagtggcttgggcaagggaggagggaagatcatggttagttttggataagctgattttgaaatgcatttgggaaattcaggaggagctatttagtatgcaactgaaaatatgggtctatgcccaggaaacactttgaagctggagtcatgaacatagaggtggtaatggaagctgtgaatatgaatgagatcactctgggaggtgggagaaaataggaaggccaaggacagaaccttgggggaaaacctgaattctgcagaagaaagaggaggggagggataagagaaggagcacagggagaggtgggaggagaaccaggagagacaacaaggcagaaggtgtctgcaaaccacagttacctaagaccttcagagtcagcatataaaaggctactgccaacctgagggagagagggtcattgctaaaggagggacagaggccaactgcagtgggttgagggagaccacggctcaagtacatgcagtcctctttggaggactttagccatgaatgaggagggagacagggcattggcacgatgaaggatctcacttctggaaaggattttttggagacggggacacttgaacatgaacagattgaaggaacaaaaacaagaaaatgttattagtcatgaatgaaggggatagaagaaacaggagagggatgtcagtttctaaaaggaggtgaagaataggggaagcagtggagggaggaaagaggctgaagagaagactgctggtgtgcaggagagcagacggaggagctcccatggggggcctggatcatgtgagtggagagaagtcagccttgcagaatgaggagttctgggggtgctgtgaaggtttggaggcttcaggagccctggctaggtctggagctgctactgcagaggtacaattaaaaatgtacctgtgaatgctgcatgtgactactggattctggctgagagatcacagcagccacctgtgatctttttgtgagggcttagcttccaggagctgagtgggagttgaatgtgggttggagggccccccaggaaagatcaaagggtgtgaggttcaggatgggcgaacctcttaagaactgactggccactctcaaggggctggtagcccagatgtctgatggaggaagcgccaaatcagtctttggtaacaacatggataaaggcctgggtgggaggggtagagaggctgacaaaggcttcctgagggagggcccagtctgagagggaagtaccttctccccaagactgatgatttaaattctgacctgccctttgcatgataccttcccagcctgggagaacttgttgctcagtaagcagacccaggtgctggcctctgtacccaccatggcctctgccctcatcacgacctctacccccaggaaagctgatgggcatgaatgagatcacagagaaactcatgctgccagacacctgtcggagtgaccacattgtggtgcagaaagtgactgccactgccaacctgggtcgtgttccttgtgggacatctgatgagtacaggtactaggccaccagtagaggggaaatgatgagcatgggggccctggtttgaaggaggagccccagctgctgatccccttccaaacacagtcacccttagcagctcttcctcaccccttctattcccacctcaggtttgcagggaggacactgactggtggaagcctcgttctgctgaccctggatgcccggccagctggagctgcccagctgactgtcaacagcgagaaaatggtgattggcaccatgctggtaaaggatgtgatacaggctctgacccagtgacttccaaatgctgtgacctgtttggctcccatctatacctccccatgacacctaggctgtcagtctctctcatctttctctctctctctcatcatcctcctcatgccagatagcattcagggtgtcctctctccctctggaggaccaagccctcccctaatgccctccccatggattccttagtgatctgtgcagagagagatggcagccactcccttcagtcctcccagatttctgtagctatttatgtagcaggctcaataaaatgtcttctctcta

SEQ ID NO: 1137 - DNA, 30809 bp, Homo sapiens
gggaccccagactgcgttaggcagcagatgaccgcctgaatctagatggagagaaacccaccatttttctaggccctggattatgtagaagatttagatactaagcctcaagagacgtctttcctctcatttacggtcttcctgcatatttaaaatttctaatacggtagacagagtcggtgtctttgaagctgttaatcaggcaatttcctgggcactccagctgcgggtcctcgcggccttctcggcttctccagcttcggtaggagaggatccggcgccgaatcactgactggcacaggtgttggggtgagtgtgaggggcgggaaatctgtggactggggacagctccaaaacccgggagtaggctgaatagctggggcccccgactccgatctgggctctaggagcgtctttggtgctgttggcccgggcctcgcttcccccccactcccggccttccgggctttctcgccagcaaggccagaagggagcggtccacctgcagcccagtgttctcaggcgcctgagccccggaggtcaagcttactgggttccccctctatagtgagctggagtacagacggcaggaatctcagtcccaggtttctgctttggaggacaaaaccccaaacggacctgagcagacgtcctgttagcgggtggtgcctggaagagcctggggtgaggaatgcagtgagaagggtgttgcagttcttcaggagagaggtaacggggttctaagctgagcaggtggcagtgagtgtggaagagtgacgggcgatgtggctgtttgtatttggtagatttgtttgaacctgaaacttacagccttatgtgtgattaagaagatggtgccagtgacaggaggaggtattttatggagtttgagttttatcgaatttgaaacagtggtttacatggagattgtagaaagactttaaaaaaaattatgagaattaagcccgaaagactttcaaggtgagacccaaaacagatgaagtttcatataaaagggtaagaagtatttttgtttaggagaaagttatcaatgacataaaatgctgcaatggtcagaggaggaagctgaaatcagaataggtcgttggattttataattagaaagtcattgagctgtttgagagagatgctttaatagtaactgaggaaagactgcaagtgtagaccaatccttcatcatttggggcatgaagcaagattattgagagtggcaaggtgggggaaagtttggggtttgttttaaagaatacaagatatctatttgggggcaggaagcaagcaactatttgaagattcaagaaaaagtcttgtctcccagaagagaaggaaaggaatgggatcaagttacaagtgaaaggattaatttgggaaagacagagggacactttcaattgacactataggagaagtgaagtgaatgaggttaatgaagaattatcttaatttacgaatcttggccaggcgcggtggctcacgcctgtaatctcagcactttggcaggctgaagcgggcggatcacaaagtcaggagttcgagaccaacctggccaacatagtgaaaccctgtctctactaaaaatacaaaaattagccaggtgtggtggcacacgcctgtagtcccagctacttggtaggctgaggcaggagaatcccttgaacccgggaggcggaagttgcagtaagctgagacctcaccactgcactccaccctgagcgacagagcgagactctgcctcgaaaaaaaaaaaaaaaaaaaaaaaaaaaaaaaaaaaaaaaccttacgtatctttaggaaagctctctttgcaacaagattatattttcttacttaatcttatgatttttatttctaaccatttaatataatatacggccaggcacggtagggctcatgcctgtaatcccagcactttgagaggctgaggtgggtggatcacgaggtcaagagatcgagaccatcctggcaaatatggagaaaccccgtcactactaaaaatataaaaattatctgggcgtggtggcacgtgcctgtagtcccagctactcgggaggttgaggcaggagaatcgcttgaacccaggaagcggaggttgtggtaagctgagattgcgccactgcactccagcctggcaatagagtaagactccgtctcaaaaaaaaaaaaaacaaaccaatatactatgggcagatggagtgcggtggctcacgcctgtaatcctagcactttgggtgggtgaggcgggaaaatcacttgaggccaggagctggaaatcagcctgggcaacatagcgagactccatctctacaaaaaatttaaacattagccaggctttgtggcatgtggttgtagtcctagctactcaggaggtagaggcagaatgaggcagaaggatcacttgagcccaggagttcaaagttacagtgagctatgattggtccactgcacttcagcctgggcaacaaaacaagaccctatctcttaaaaaaaaatacatatacacatacgctatgggagttctttgcagatttaaatatttttaagtagctcagtactgtgtcaattcatgagtagcacatggtatttacagagaagaggacttctctctccctttggaaatgacctctctcccattacacagagaaggagagccatcatctgcctgcagtcaagtatacaaaccttcccttcaatctgaagagtagaaagtgttccttctccttagagaaggcaaaccctttgacctagtctctcagtagcatcctctcctgctatgtcagggtcctctttccgtttttccctctctcctatgtcagcttttccccctctattcacacctttccttcagcatttgaatgtattcttccttcactttatgaactgctgcatttattttcctgtcttttcatcctcttcacagctagacttcttgaatctactctacatatctctatttttttacacttcttgctatttatttcccagcccactgcaatgtcttatttctagcattccactgaactaccaccaaaactattttttttttctgagatggagtcttgctcttgtcgcccaggctggagtgcaatggcaatctcggctcactgcaacctccgcctccagagttcaagtgattcttccgcctcagcctcccgagtagctgggattacaggcgcctaccaccatgcccagctaacttttgtatttttagtagagacagggtttcgccatgttggccaggctggtctcgaactcctgacctcgtgatctgcccgcctcagcctcccaaagtgctgggattacaggtgtgagccaccgcacccagcccaccaaaactacctttaccaagatcaccagtgtcctctgtgtgttaaatcatgcattctcaaagcagataaaaactgcttcttgtgaggtgaaaaaaatataatactctttttatgtgtaaagcacaaatacaatacataaacagagaatattctgtggtattaaaattttatggtgatattaattagcttcatttaattattccacatttcataaatcataacatctggtacccctaaatatatacaactataatttgtcaatttacagttgaaaaagaaagaataataaaaagttttatgggtgaggaatttgattggcagggtggtgagaagatggagtctaaaagggctccttagcaggcattaaggaaaagaaagtttaaaaaacactcttaaatcaacagacattttcaattcttttttgttgttgttgagatggagtctcgctctgtcatccaggctagagtgcagtggcgccatctcggctcactgcagcctccacctcccgggttcaagcgattctcctgcctcagcctccagagcagccgggattacaggcacccaccaccacacccagctaatttgttggtatttttagtggagatgggatttcaccatgttggccaggctggtctcgaactcccgagctcaggtgatactcccactttggcctcccaaagtgctgggattataggtgtgagcaccacgcccagctgacattttcaattctcgtagcttaacctctttgtgccatgtaacagtatttaccactccattcttctggaaatacactaataagctatagttactaaaaaccaccctgtttttttttttttcttaggactcttcagtcacatcttggtcattctttaggtccacttccttgacccacctcctactcaaatgttggagttcctgccataagctctcttcatactatgcacattctttcttttgtttcaattctccttttgattaattcccattaacaaaaaatcctgattacttacaattctgattccaatctggcttctctaaagcaccagaagggtatatataatagttttttgaatatatttatttgggtcagatgtatccagaattggtcaaattacacaggaccaggccaagtgacacatctctctcatctccacacaccccctcctccaagcctaaatgttttttagcacaaaacctaaatgtttctcttatcttttcactgtaccccatcctcatagtcaagactctagaccaggccatcaccactcatctcccaactggtgtcacagtgttcagttaccgattatccagtttccgcagtgtaattagtatgatctttctaaaaatgtaaatcggattgcatgattaattaaaaaaattataaaatgactttacattgcactaagaataaagtccaaactccttaacaagtttagcatgctccatgaaccaatcagtctctgcttacctccttgtccagtttcatctcccctcttccctccaccttccatatttgctaaatttatactggatttatttgtcttgtgttctctctcacctctaagccttgtagattcccacagcacactatatttcctgtatcatcgtaggaattacatcttaactgtattaagttgtcttctctgctcatctctaaatgctgtgagtataggaactctaattttgtttgttcttatatacccagtgcctcaaaactctgtgttgaatgaatatgtggtcaagatattggctgagaatcagaagagtagatgcttttctggtctcattctctcaagttcagtataggcccttctgtgcctccatcatattatatatagaaggaatacatttttgtttttagacactgtcttccaagaatattttgactattgtaaatgcattgcttgtgaattacccaggatgattataaaatgtttagtaaaaaggatttatgatgtatttaagctgcagtcaaagctctggtgggtctgcctctgaacacagtttcttctagtggcttttaaataagctgggagaattctgttttatgactcaaaagccactaggaacaaaaagatggttgtggtaataatgagtgtgtagttttctcagaaagtttatgaaaataataattaaaaaaataactgcagctaccaaaaggacgataaataaagaaacaggctaatttacactgcaacatggtattatttaattgttatatgcattagaccttggtcataatatggatagaagaagtaagctctcttttcctattatagaaggttaagatgggttttaaagctaagcacagtcgagaacttacaagtgttatgctttcatctcagcactaaggataacaacaataaatctaggaggctggtttaactttctgtattctgagacctgaactactgccaataaaaacaacttcggtggaaactttcctggaaagaatttttcaccagcttaagaggatgagtagagatctggccctaaaataaagtaactacaaaatcacttactttcaaaacaagcaactctttcagagtgtattgtggcaaaggagcactataaatccttgtgaactatattttcgataggatgaatgattttagataacctgtgtcggtgcttttaaatataacttccactctaaataatttattaaacttcctcagcataacaactagaatgtcttttgcctcctaactaaacaagaaatgtcttttacctcctcctcttaaatcataagctaggctgggtgcagtggctcatgcctgtaatctcagcactttgggaggctgaggcgggcggatcacgaggtcaggagttcgagaccagcctggccaacatggtgaaaccccatctctactaaaaatacaaaaaattagctgggcatggtggcgcatgcctgtaatcctagctactcgggaggctgaggcaggagaatcgcttgaacccagcaggcggaggttgtggtaagaggaaatcgtgccattgcactccagcctgggcaatagagcaagactccgtctcaaaaaaaaaaaaaaatcataagctaaagcagcacattcatgcactgttcaatatattaactactaaccatatatggttatttaaatttaaattaattaaaattaaaacttcaggctaggcttggtggctcacacctgtaatcccagaactttgggagatcaaggtgggaagatcacttgagcccaggagtccaggatcagcctgggcaatataggcagactttgtctctacaaaacaaaaatttgaaactcagctgtgtgtggtgatgcacgcctgtaagcccagctactcaggagactgaagtgggaggatcgcttgggctctggaggtgggcgttggagtgagccaagatgacgcagctgcactccagcctgggcaacagagcgagaccctatctcaaaaaaaaaataaaaataaaaaagccgggcatggtggctcacgcctgtaatcccagcactttgggaggccgaggcgggtggatcatgaggtccggagatcgagaccatcctggctaacatggtgaaaccccatctctactaaaaatacaaaaaattagccaggcgtggtggcgggctcctgtagtcccagctactcgggaggctgaggcaggagaatggtgtgaacctgggaggcggagcttgcagtgagcagagatcacgccattgcgctcctgtctgggagacagagcaagactccgtctcaaaaaaaaattaattaaaatttcaaaaaaattaaaacttcagtattgggtacattagccacatttcaagtgctcaatagccatgggtgtagtggctaccatattagcacagataaaggacatttccatcattgcagaaagccctgttggacagtgctgtattagaacgtgttcctaataattagtctctacaaggcagataagagcaggagctcagaattcagctggatttaggtttgaatcctagcttactgcgtgatcttaggtaattgacctaacttttctgagatgacattgtcttatctgtaaaatggggataatagtagtatttatggtgtagcattgtgaaaataagatgagataaagtgtctagcatagtgtctggcccataataagtactcaatacattttagatagtattaattcatttattattcattatctttaatgaataaaacactttgaatggggactgagtacagtagcttcactttgggaggcgaaggcaggcggatcacttgaggccaacatggtgaaaccccatttctactaaaaacagaaaaactagctgggcatggtggtgcacacctgtaatcccagctactgaggaggctgaggcacgagaattgcttgcccatgggagacggaggttgcagtcagcagagatcacaccactgcactccagcctgggtgacagtgggagactctgctcaaacaaacaaacaagctttgttcccaagtagctgggattacaggcgcacgccaccatgcccggctaatttttgtatttttagtagagacagggttttgccatgctggccaggatggccttgaactcctgacctcaggtaatccaccagtcttggcctcccaaagtgctgggattacaggcgtgagccactgtgcctggccaaaaataaccacattgaatggggccaaaagattaatttttgcaaagaatgctgtgttccatatgtgactcacctgaagtgcccaaatctgagtctgcttgtggattacagtgctccacttgaagtcatacattatatatttcagatgctgattttcttccaagaaaaaggtgtaataataaaaatttagttgcagatcttatggttggatattcctgtttcatttaaaaaatgaaaatgaaaagtttatcagctaaagattatagttaaaatcagcaggttctatatagcaagtctaagtattctaatggcacttatattaatacccagacagaaatataagacacaaagcaagcctactaagcaaagcatctgactagataaagtagaaaaatttggcaggttccaaccctgaggtgtcagagtttattgctaataactcaagttgatttcttggctaaacagagggctttaaacaaagaaattttttggttctaattaaacaggaaccctaaactgttaacagtattcatactttattaatacaataattactaaaacatatcttagtaactagtattattgataactactgaacatgtgtcgaatgggaagaggagatcatcaccacatattctttaaatgtcagccgctttcataaaagaaagggttgatgttgttttctgtcaacagaatcaaatgaatcaattctggaaagtcttcctttcctctttggaatttatcttcattcatagaaactgtattcataggtcttaaattctttcttcttagactatagtactattacttggaatgattgagccactagactaaacacctgatactggtgcttatacacgtaaaagataggaacaaggtaagataattagacatttttccattgtcccccatattgcagggacaataaacttcttataggaagcataactaacactcagaaagtatgcaaatcacaatgtaaagcctaatgagttatcatagaaggaacacagcttgtaaacatcatgcaggtcaagaaataaaacattggccaggtgcggtgtctcactcctgtaatcctagcactttgggaggctgaggcaggcggatcacgaggtcaggagttcaagaccagcctggccaacatagtgaaacctcgtctctattaaaaatacaaaaaaaaaaaaaaactagccaggtgtggcggtgtgtgcctgtaatcccagctactagggaggctgaggcaggagaatctcgtgaacttgggaggcagaggtttcagtgagccgagataacaccattgcactccagcctgggcgacagtgtaagactccatctcaaaaaaaaaaaaaaaaggaaaataaaaaagaaataaaacattaccagcactctaggagatcatccccatggccctccactctccataaaggaaaccatttgatttaacgtagattagttttgcctgttctacaacttcatataaatggaatcatactgtgtatattcttttgcatctggcttcatttattcaacatcgtatttgtaagattcgtttgtatgtatatattctttgagtaaatgtcttttcaaatcctttgcccattttttaattggcttgtttatttatttattttttatgttttagaggcaaggtctccctctgtcacccaggctagggtgcagtggtgggatcatagttgactgcagcctcaaactcctggactcaggcaatcctcccacctcagcctcccaagtagcagggactacaggtatgagccactatgcctggctagtttttaaatttttttatagagacggggtctcaaactcctgggctcaagcaatcctccctcctcagcctcccagagtgctaggattacagttgtgagtcaccacacctggcccttcttattattgagtaaaagttctttatattttccggataggggtccctttaagatatatggtttcaaatatttactatcattttgtgaatttttgctttcttgataatgtcctttgaagcactaagttttaaatttgatggactctgggttatctattttttatttttcttgtctgtacttttggtatcgtatcttaaaaaacattgtctaatccagagtcaaaatctatgcatattttttctaagagttttatcattttggcttttccaattaggtctttgatacattttgtgttgctttttgtatccaatttcattcttttgtatgtggaaatccagttgttccagtaccatttgttgaaaaggttgttctctctccaactggtcacccaggtcttggcacccttgttgaaaatcagttgaccataaatgtaagggttaatgttctattgatctgtaggtctgtccttgtgccaataccacatagtagttttgtagtaagttttgaaatcaggaagcacgagttatccatcttcgttgttcctttttttttttaattcaaatatatatattttttcaatctttttaattctacatatttttgtaagcatccccccaattcttgtttcatagtaaatcagactgtagatgaagcatttcagaccttttgtcaatcatgtcaagtgtgaggggaagtcttttgtaagtcagccaagtatttcaaaatgaaaagcttttccaaaagtaaaggcagaagaccccgctttgaaggcgctggtcggcacagaagggcttgcaaaggtatgtagggaagtccaccggttacaggtgtaaggtgagtttaacctacggcgaccagctggccaggagcgccccaaggcagacgaggacgtggggcttgggcgcacggccgcctgcagccatctcgccccagatcctggctcaggaaacgcaggctcgggctggggtggatgtgtgcgccccagggccctggcacccgggggaccgagggctcctcccaggtccttggaacagcagagtggctcccaggaaggatgctcagctgcaggtgggggtccctgctcccaagcaccctggccagggaggaatggcgcaccccaccccgttcgcccctgttgttccttttcaagattgttttggctgttgatctttttcaattccttatgaatttaggattagcctgtcaaattccacgaaaaggcagctgggatttttttttttttttttttgagatggagtctcaatctgtcacccaggctggagtacagtggtgcaatcttgagtctcggctcactgcaacctccgcctcccgggttcaagcgattcttctgcctcagcctcctgagtagctgggactacaggtgcgtgccaccacgcctggctaattttagtagggacggggtttcaccgtcttagccaggatggtctcgatctcctgacctcgtgatccacccacctcggcctcccaaagtgttgggattacaggcgtgagccaccgcgcctggccttttttttttttttttagtagagacagagtttctgcacgttggccaggctggtcttgaactcccgacctcaggtgatccacctgcctcggcctccccaagtgctgggattataggcatgagccaccacgcccggcctgaaattgttttatttcattttcagttttgttttgtttttttttttttaatagagatgaggtctcactatgttgcataggctggtcttaaactcctgagctcaagcaatcctccttcctcagcctcccacagtgctgggtttataggcatgagttacaatgcctagcccatttttagtattttatagctatagtggatagaaatataattgatttttatattgacttgtgtcctgcaagcttgctgaactaaatttattagctctaataggtttttttttgtgtgtgtgtggattccttaggattttctatatataagattgtatcttctacagatacagttttacttcttcctttccaatttggaagccttttgttttattttcttgcttaattgccctggttcaaacctctagtaccatgttgaatagaaatgatgggactgggcatccttgttaggttttgttattaaggagaaagtgttcggtctttcacctttaaatataatattagctgtggggttttcatcaggttaaggaaattttttttttttttttttttttttttagatagtgtctcacttggtcacccaggctggagtgcagtggcgcaatcttagctctctacagcgtcgatcttcctcctgggctcaagcaattctcctgcttcatcctcctgagtacctaggactacaggcaagtgccaccatgcttggctaatttttgtattttttgtaaagatgatgttttgccctgttgcccaggctggtctcaaactcctgagctcaagcaatccgcccacctcagcctcccaaagtgctgagattacaggcatgtgccactgagcctggctgaggaagtttctttttgttcttaaatggctttcttttttttttttttttttcgtaaaaggatgttggattttgtcaaatgcaatttctgcaccttttgaaatgattgttttagttcttattgtatatcatgttgattgatttttgtatgttgaaccagccttgcattcttagaataaatcccacttggtcaaggtgtataatctttttgtgtatgttaaatgatatttaatgtataataaatttaaacctttctttgccccaacagaaaatgatccacagtctatttctcataaactgttccggtgacatatttctagagaagcactggaagagcgttgtgagccagtctgtctgtgattatttctttgaagctcaagagaaagctgctgatgttgaaaatgtaccacctgtcatttcaacacctcaccactacctcatcagtatctaccgggataagctcttctttgtatctgtcatacagaccgaagtgccacctctctttgtaattgagttcctacatcgagttgctgacacttttcaggttggttatctatcatacctttctaagttaaatgacccaagttagctgaaggtgagacatgattatattatttaattacccaggttttgatgtttactgtctgtctctctctgtttaagcgtaaattcataagcccttttctgtgtggtatacagttacacacatggctgctctattcactattttttatatgtattacagattacagttggctctccatatacatgggttctgcatccataaagtcacccaaccttacatggcaaatatttgaacaaaaaaatcgaactgaacatgtacaaacttcttctcattattacttgaacaatacagtataacaaatagttacatagcatttacactgtgttagatattacaagtaatctagaggtgatttaaagtatataggaggatgtgtataagttatgtgcaaatactatgccattttatgtcagcgacttgagaattgtgaactttggtatctacaggggatcctggaactaattcccacaaataccaagggatgactgtatatcatcaggaaacaataatgccctccgcatacagttctctcaatggtctcaagattttcattggttatgaactcttctatatttacattttattattttgtcttgcggaatataccaaataatttaagcttatctatatgtattttgggataatcagggtgaatgaagtttatagctcaaattccaatttaatgtttcaatactttctggtataatatgtaataggaattaaattcaacctagaaatatcaagaaaatattgaggaataatattaggactatagaggggttttttttgtttgcttgttttgttttgttttgttttgttttgtttgagacggagtctcactctgttccctaggctggagtgcagtagcatgatcttggctcaccgcaacctccgcctcccgggttcaagcaatcctcccgcctcagcctcccaagtagctgggaccacaggtgtgcaccatcacactcagctaatttttgtatttttagtagagacagggtttcaccatgttggccaggctggtcttgaattcctgacctcaagtgatgcatccgcctcagcctcccaaattgctgggattacaggcatgggccaccatgcccggactatagagggttttttcccccgctctgttttatatatgttcagcagcttaagcaatgaattatgctactctaagtttattcttcagaacaaaaagtatttagcaggcctttctttttgccttccattgtgtgatattttgtgtgtattttgtcaggactactttggtgagtgttcagaggctgcaattaaggataatgtggtcatagtatatgaactcttagaagaaatgttagacaatggatttccactggctaccgaatctaacattttgaaagaattgattaaaccaccaacaattctacgctctgttgtcaactctattacaggtaagatgaaaacatactgtgctagtaactgagcaattaaaactttgtaaacaactcattattgctcatgatctgacatattattaaggtagtacaatttggccataattaaagttactggtaaagttaaaatggatgtactatatatttattttcatggaaagaggctagaccttaagtgataaagaacttttggttattactctttttttttttctaaaacaccacaacaatattattaccattatttaacactaaatactaagactgaataaattgttccagttattcctaaagaagccagtatatgagcccacttagaagagaatttagtccatttatagactggcattttaatatttaaaatagcattacataactggtatgctgctactccacaattactagagaatagaaaatttaagacgcttaaccacacagtactacaatctcctccaagtctttgtttttatgcattcagaagatgtattaagaaaaaataggaaatagtttacttatgagatctcatgcattgtgggcctgtacttgtgttgtaagcttccagctgggtttaattcttgagtgtagctagaaattaggcacatccagataccaatattctttcgaaagcattaaagtcttttagacaaagattcctatgaaatgttatatgccactccaactccactgtcaaccattgtaaacccctgtccagtgccttgacctaaaaatgaggtgagagaggcctataagaaaaagatcattcagcagctctttattcatcctttgtgtaaggacgaatgttaggagaaattcaaagaaagataagatggtgtgtctgtactcctaaaacttatactctgaatgggacattggaaaaaaaattaagtaaataactgtataagactttaaaaagcaattccatacttcacagataaagtaatagcattggaaaataaatacacatgatgtaacgttaaattgaaaagtcagcacaaaactgaaaaaaattattcttatatataaatattcactccgacaaaaaagtatttacaatgattatacccagctaaatacagattatatttatttttgctttatactttctaattttccaaaataaacatgtattttatagtcagagaaaagttactaaaatatataatgcaaaacataacagattcattagatagtgtattacaaagttcaagagaatggttccattaatgaagtaatccctcctgaactgtggtgggtggccaccttggaaaatcagtagaattcaggaagtgaggaaggaataagagcattctccatggtggaactgtatgagaaaaaaacacacatgaaagagaaaaacctaaagttttattaatccctttagcagaagcagaactgtttttcacttgagaagttagagatcaaattaaaaagtagagaaagtccttcaaagctaggataaatatttagcttttatcataaagccagtgagcaaacattgaacgtttttgagcaggaagataacatgattataggttgcaggtaggaacaccaatcataagtagactgcaaaattgtagatacagtatgattgcgactatattttaaagtgcaattaaaaaccaaaattatcaaaatagaaaaaaatgcaaccttctggtggtggaaatattcaaagaaatataccaaaatgttaatattatattaaaatgttaataccataatattaacaaaaatgttaatggtagatatattttgttagtaagaagacaggtgtttttctttaaaccacttctctgaactctacctttttgttgttgttaagtatgtagtactttcgaatgggaaatataaattaaccaaaatattaagtaagtcacagctcaaagatatgtgttttggacaaccagacttatttttaggcatgtgtcagtttaccaggaaatgagctggatactgaatactagctatattgcagccgtatgggtatgctgaccttaaaataggaaaaggccagattccatttactccactgaggcgtgcttggcagcatctcatgtaaaataaagttgaatactgaagggcctagttataactctgtattctcactggagacattttattggcagaaggttttgaaacaaccaacctcttttttcatcagtggcagagattctgttgttgagccactggaattagattagattactgttaacacacaggaggcaaaagataagtaaataaatttaacctggtttggcaggtagacagagggccacatggcctatatttcttttctagaaatttgatcatgttggtatggatatgtctgacaattctagtgaccatccacaacttcattaagaaaaatccaaacattgaagaagcagctttttttttcctagtaataaattttctcatgactgttttatacatcagctttgccttctccttttttggtttctaggcagtagtaatgttggggacacactccccaccgggcagctgtccaacataccatggcgtcgggcaggggtaaagtacacaaacaatgaagcctattttgatgttgttgaagaaatagacgcaattatagataaatcaggtaattgtgtgcatgtcatcttatttggggaaaaacaattcatctgacacagatgaatagaaaactgaagtcctggccgggcgcggtggctcacgcctgtaatcccagccctttgggaggccaaggcaggcggaacatgaggtcagagttcgagaccagcctggccaacatggtgaaactctgtctctactaaagatacaaaaaattagccgggcatggtggcgcgcacctgtaatcccagctactcgggaggctgaggcaggaaaattgcttgaacccaggaggcagaggttgcaatgagacaagatcatgccattgcactccagcctggctctgtctcaacaaaaaaaaaaaaaagaagaagaaaggaaaagaaaattgaagtcctttggcagtatggtttcggtggaaaggcattcattatctgatgatttttaaatctgtttgtttatttatttatttatttgagacggggtctcacactgttgtccaggctggagtgcaatcacatgatcttggctcactggaaccttcacctcctggattcaagcgatcctgctgcttcagcttcccaagtagctgggattacaggcatgagccaccacacctggctaaattttttttttttttttgagacgcagtttcactcttattgcccagggtggagtgcaatggtgcaatctcagctcaccgcaacctccgcctcccgggttcaagcagttcttctgcctcagcctcccgagtacctgggattacaggcatgcaccagcatgcccagctaattttgtgtttttggtggagatgggatttctccacgttggtcaggctggtctcgaactcctgaacttaggtgatctgcccgtttcggcctcccaaagtgttaggattacaggcgtgagccaccgctcccggccctggctaattttttgtatttttagtagagacggggtttcacaatgttggccaggctggtctcaagctcctaacctcaagtgatccacctgccttggcctcccaaagggctgggattacaggcgtgagccactgcacctggcccataaatctgtttattttgcccataggttacatataattttcataaccactagttgaggtctgccaaacatgtaaatcagaactcataatgccttactttaagccaattattaccctatgtacctctacctcttgctatttattccttctaacatttattgaaaatctgctatataccatgcttttgctactacattatgtgcagtacttctggtaaaagcccctatctgattatttttcactttcttttttttttttaagtacagggtcttgctcttttgcctaggctggagtgcattggcgcagtccctgcttactgtagccttgacctccagctcatgtgatcctcctacctcaaactcctgagtagcctatagtcccagccaatcaggaggtacacgccacacgccaccatgcctggctaacttttatttgttttttttgtacagacagggtctcaccatgttgcccaggctggtcttgaactcctgggctcaatcagtttacctacctcagcctcccaaagtgctgggattacaggcatcagccaccacacccaatctgattatctttttaaccagacaaaacaatagtactctataagaatcgtaaaattttattattaaaaatagcagccgggcatggtggatcacgcctgtaattccagcactttgggaggccgaggcaggcagatcacttgaggtcaggagtttgagaccagcctggccaacatggtaaaaccccgtctctactataaatacaaaaattagctgggcgtggtggcaggcgcctgtaaacccagctacttgggaggctgaggcaggagaattgcttgaccctgggaggcagaggttgcagtgagccaagattgcaccactgcactccagcctgggtgacagagtgagactccatctctaaaaaaacaaaaaaagaaaaaagaaaaaaaatctagtccttcctttacatttattttacacataaggaaagcccagaagggttaagtgaactgttccaggtcacacaacttgttaatatgtaatgatggcttattgtgaattatagtcaatatcttctcttccatgagtccccttttcattataacattccatcttatagaataatagatttttgccaggcacggtggctcacacctgtaatcccagcactttgggaggcttaggcaggaagatcacttgagcccaggagttcaagaccagcctaggcaacatagcaagaccccatatctatcaaaaatttaaaagattagctaggcatggcttccttaatcctacctattcagaaggctgaggcaggaggattgcttgagcccaggagttcaatgctgtggtgaactatgttcacaccactgtactccagcctggatggcagagggagaccctgtctcttaaaaaaaaagagatatctttctattatggatcctatttcttaaaagttaacttagtccatttcataatacacttgccacattttaaaattctattgaagccgggcgcggtggctcacacctgtaatcccagcactttaggaggctgaggcgggtggatcacgaggttaggagatccagaccatcctggctaacacagtgaaaccccatctctactaaaaatacaaaaaattagctgggtgtggtggcaggcgcctgtagtcccagctactcgagagactgaggcaggagaatggcgtgaacccgggagacagagcttgcagtgagcccagatagcgccactgcactccatccagcctgggtgacagagcaagactccgtctcaaaaaaaaaattaaaaaaaaataaaattctattgaaaatggttttggttggtttgttttattttgtttttgagacagagtctcacattgtcgcccaggctgtagtgcagtgttgtggtttcagctcactgcaacctccgccttctacgttcaagcgattctcctgcctcagcctcccaagtagctgggactacacgcacacaccaccacgcctggctaattttttgtatttttagtagaaacggggttttgccatgttgcccaggctggtcccaaactcctgagctcagataatctacccacgtcagcctccctaagtgctaggattacaggcatgagccactgcgtcctgccaaatgttttaaactcatatccagtcatcttacagggttggctccataaaggaaacagtttaattttccttagaattagcatattctggctgggtatggtagctcacacctgtaatcccagcactttgggaagctaaggtaggcggattgcttgagcccagaagtttgagaccagcctgggcaacataacaagaccctgtctctacaaaaaaaatacaaaaattagccaggcgtggaggtgcatgcctgtagtaccagctgcttgggaggctgaggtgggaggattgcttgagcccaggaggttgaggctggctatcatagcaccactacgctccagcctgggtgacagagcaagaccctgtctcaaaaaaaaaaaaattatattctacagtggcatacctgtagtctcagttactctggggaccagctgggactagctagtcagactttatctcttaaaaataaaagaattattattatattccagccagagttaagtatggaccttgtcccctgacctgttaatagagatgtaaagcttcagttaatctgacacccagagggtatctctattgttctagatgtagtgattgttgggctaggtgtcatggcacgcacctatattcccagctatttgggaggctagggcaggaggattacttgagcccaggagtgaggctgcagtgagctatgatcatacaactgcactccaaccttggcaacagagcaagactctgtctctaaaaacaataaataaaaataaaaagatacagtgataggtctagtgaagactcatattccattgatgttatcttccttttttttttctttcttcaggatctacagtctttgcagaaattcagggggtcattgatgcttgcattaaactatctggaatgcctgatctctccctttctttcatggtaagttttattctcctgttttatagccccttgaatgcctaatacatgtgaagtactaaatgaaatgataaatattgagataagtttgcatcttagattgcaaaggattatctcagaaatattcctagcagagtttcctaagacagtcgcttacatgatgagcgtggtctttgtggaaagactaagggaggtctttgcctgagtgtgctagaaggggcttaaaattggctggctggcttctgcaaatatccagtatcatttttactgaataattatttgctttgctgatatgaaaggacactggtcttttgtatcattttagagtcagcatgatatactgctaggaacaattaagagaactgacttctggtgttgtcaccagtttgctctgaccttaagtcctctgaacctcagttttttaatctgttaaagggaaataatactacttgccttttctcctttatagttattgaaattcaaataaaataatgtacataaaatatttacaaactttaaagcattatgaaactataaggttgtgtagatgtggtcataaactcttccatgactgctttatcttcagggaacatatttgtcaaggtatctgagtacagttcccatattcattatagtctatgaacgactgtcttctgtttttctggcagaaccctaggcttctggatgatgtcagctttcacccctgcatccggttcaagcgttgggaatctgaaagagttttgtcatttattcctccagatggaaatttccgactcatatcataccgtgtcagctcacaaaagtatgttgatgcatcagccagaatctgccatcatacatatcaagtacaactcacctttccctgtttctttctgaaagttgagtacttgaggtcatcactgctcactttaaccatagctcaccaggagacccagtgagaacgggtgaaaatacgcacctaaaataatccgtatactttgaatgtatgagtgtagagtggtactaagtgagactagagtaaaatctatagccaagaacaagcaaaccatacataacctgggcaaaaattgtggtaccggtcctttgcaaggttatgcatggtcaaattatggcactggttctttgctcaggttatgcatggtccattttgctctgcttctgaaagctgagtactttgcaagcagagcaaaacggaccatgcataacctgggcaaaaccatgaaccattgccataatcttaccatagtctgtagagtttgtggccaacaaggagacagacctacctgtagttcgtgaggacattccccaatttacctgcttcaagtacgtcttctctgcgttgagtttttaaggaactgtttagcattgaggggccgggtgcagtggttcactcctgtaatcccaacactttgggaggccaatgtgggcagatcacttggggtcaagagttctagaccagtctggtcaacatggtgaaaccctgtctctactaaaaacacaaaattagccaggcgtggtagcgtgtgcctatataatctcaactacttaggaggctgaggcatgagaatcacttgaacctggaaggcagaggttgcagtgacagatcacaccactgcactacagcctggccaacagggtaaaactccatctcaaaaaaaaaaaaaatttagcattggggatcggagttataggtagtttgtttcttgaaaataccaaaagttatttgagtaacatcatgacagaactcaaaaacagagaaattatttctcggctcttttcttttccttttttttttttttttttttttttaagccggagtttggctcttgttgctcaggctggagtgcaatggtgaaatctcggcttactgcaacctccacctccagggttcaagtgattctcctgcctcggcctcccaagtagctgggattacaggcatgcaccaccacacccggctaattttgtgtttttagtagaggcggggttattccatgttggtcagactggtctcgaactccagacctcaggtgatctgcccacctcagcctcccaaagtgctgggattacaggcgtgagccaccgtgcctggcctgtttcttggctcttatcacataggaactgttttcatttatataaaacatattttacattatttttcagtgggatcataattcattttaaactagggccatttgccccaattgtttttgtttgtttgttttatgttattttgttttgtttgtttgttttgagacggagtttcactattgtcacccaggctggagtgcaatggtgtgatcttggctcactgcaacctctacctcctgggttcaagcgattctcctgcctcagcctcccaagtagctgggattacaggcacctgccaccgcgcccagctaatttttgttttttgttattttttttttttattagagaggggatttcaccatgttggccaggctggtctcaaactcctgacctccagtgatctgcctgccttggcctcccaaagtgctgggattacaggtgtgagccactgcacccagccaccccaattgtttatactgttattaaacttcagatttctgtcttgatttgtatacagttcccagcacagtggtacaagaacattatgctgtactcagctcccccttgtgtagatactgaatctgcagttctagaggtactgccatcttggtatccttggaggactggttgcaaaaatcagcagatgctcgagtcccttacataaaatggtgtagtatttgcatataacctatgcacatcctcctgtatactttaaatcatctccaagttacttgtgatagtacactgtaaacactgtgtaaataattgttataccatgttgactttttatttttattgtagttatattgttattttttactttttttttttttttttttttttttttttttgagatggcgtctcgctcctttgcccaggctggagtgcagtggcacgatctcagctcactgcaatctccgcttcccaggttcaagcgattctcctgcctcaggcttccaaatagctgggactacaggcatgagccaccacacccagctaatttttgtatttttagtagagacgaggtttcaccatgttggccaggctggtcttgaactcctcacctcagcctcccaaagtactgagattacaggtgtgagccaccgcgcccagccctagctaatttttgtagagacgaggtttcatcatgttggccaggctggtctcaaactcctgacctcaggtgatcccctcccaaccctggtctcggcctcccaaagtgctgggattacaggcatgagccaccacgcctggccaattttgtgaaataatattttcaatcctcagctggtcaaattcaaggatgcagaactgtggctacagagagccaactctgtagtaccttattgtggagttaaaggcagggtaggatactctggacagaggttttcaggatacctctggagctctccccacaccattaattgtgtttgtgcttttgtatctttctctgtttctctttttagtctagtggcaataccagtgtatgtgaaacatagtatcagctttaaggagaacagttcttgcggcagatttgatataacaattggaccaaagcagaatatggggaaaactattgaaggaattacagtgacagttcacatgccaaaagttgtgctgaacatgaacctgacacccacacaaggcagctatacatttgatccagtcaccaaggtacagccacttcaaatcaagagtgagcaagtgtttctgcaatctattttgtgatttgtggggaggaatggagggaaaggtttggcaccttgtttaaaactaaagttcgtatcaaaacctagagagcatactgtgctgtgcttctgccactggctgcagaaggaatcctgcagctgctactgagtagatgaacagaaaaatgtgtcattctgtcctttttcagagtgtgccttcactcatccattattaatccagagcctgactctgctatctaataagaaagaagtaaaagcttttttaaaaagagaaaacattatgtagattgaagaagatattatgatggtctatgaattactaagttttctatataaattgatcactaagacctttttcttcctttataatttaaaagcattatttcatactctttcacagggctaggaaagttgcttcctcactctacttaaatttttgtgtaacagagggttttcagagaaactgtagcagatgattttctctcagcttcctgattagctggtaaatatgattgttttcaatagcagagtcattgagctacctgataaatgaaaagacatgttttttgaataacatcatagaatgttaaagattatttaatacagttgtaaggattcaaagaacctcctcctggagaccacacagggctgagaaagggagcttcagattcctggccctttaccacagcttcaactatgacagctttgctttctttctcatctgctgttgagccttcacaccgaagatttcatttgaacaatgggtttcacagctaaaagttttaaaaacaccatcttaagtcaatctaattattttacagaaaaataaacagaggctgggcgcagtggcttacgcctgtaatcccagcactttgggaggccgaggtgggtggatcacctgaggtcaggagttcgagaccagcctgaccaacatggagaaaccccatctctactaaaactacaaaattagctgggcatggtggcgcatgcctgtatcccagctgcttgggaggctgaggcaggagcatcgcttgaacctgggaggcagagtttgtggtgagccaagattgcaccattgcactccatcctaggcaacaagagtgaaactctgtctcaaaaaaaaaagaaaaagaaacaggcccagagaaaagtgaagatggttatgatggagaacatttgaaatcagagggccttaggttcaaatcccagccttacctctgactaactatgtgaccttgagcgagtcatttgatctctgagccttaatgtcctctgagctttaatttcctcatttgtaaatagaagacaaaagctacttcacagccctcaatgagacaacatatgaataatgctaagcacggtgctaatacaaaagaaaatgctcaacaaatgtagattctctgctctcactccccattcaaagtcacagaattaatcagaggtaaactcactgtagatgccagatctcttgttttcaagagactgcacttcagtttgtacagaagtttatgatatctttgaactttgtttttgagggtttgtctttaataaatggttctatttgtttttcattttttgtctttttaaggtactaacatgggatgtgggaaaaattactccacaaaagctcccaagtcttaaaggactggtaaatttacagtctggagcccccaaaccagaagagaatccgagcctcaacatacagtttaagatccagcagcttgctatttcaggtaaggataaggttgacttgtagttaagggtaattgagttttgcaagctcatttattaggcatttagaagagtaacaaaagtttccttctctagaaagagcagtagcccatttgccttttatactgtgcttggtggggcagtctcacaggcaccgaccaaatgatttttcagagcaccttatttcaaacagcttcccctcacctccgccctcatttaagcaccaaaaagagagttattcatattcacagaaagtagaattatacttcacagacattccctgcctgtgtgggaatcttaaccaaaaccataccatcaaagtgcaataatttgtaaatgatagaagagacatttcttccaaatggtggaagggacactggttaatgtcagatttaccatatagcgctcattgctaacattatattggttgggatgatgataatttattctttttcattctttttgatacaggcttaaaagtaaaccgtttggacatgtatggggagaaatataagccatttaaaggagtcaaatacgtcacgaaagctggaaagttccaagtgaggacatgagaagaggccaaaattcctcaggaccagtttgttttccaagtgtcattacgatgtatcactattaggtaccaagtgagtgggaatacatattctagttaaagcatttgtgtctagctacacaccgctaacaaagttacttagttatcaatgtaggattcttaaggagctttaagctaaggaaaccttttagtgacttagcttattttgtatcttttcacttaggaagattttggaggtgatttttttccataggaggataccatctggcggctgcacattgtaacagtaaaggcagaaagctgtagtgataacctctctcctaaaagagttaactggtctcatccagcagaagctatcttaaatctgtgatgtgtcaggtgcagccaaatatcacaccttctgatcttagccatcccaaaccagtatctgtcccgagaggaaattccccccacccccagaagtttacagaaaactgcctcttcaagtgtttgccttattcagcttttcacttgtgccattaagcaagcactgtagcaaaagccacttccacatggccctggcagggagcactgctgctccatgctccattctcactgtacttggtattgtattttttataaataagatttttatgtaaagcttagaatttgatttacagggaccttgctgcagtaaataccatctcaattttgtgccactggttcagctgttagcacagtaaaaaaatcatttgtatcaaaggggcaaatgctttattaaggtagtaaaagggaacattacttctgcttttaggaagttactgcaagcacaagcatttgtgcttttaagcaaattaaagtagtaaaagaaaaacttaagtgaaacctttgccatcttcatgttttataatataaagcttacccaacaccagttaagccatggttaacctaaatgcctcatgccccagttcagcaaaaggaggaaaatgtgcctgcctcacagtcatcagtctttttaaatcttttttgttgttgttcttaagggtttgaatttgtctgcattccttgtctttaggggaaattcccttttcatattgtgtgcttcccaaagctatagtcatagatttcttccagaaactattgtcataattgtcactggagtgcttaaatatacgtactatactgacaaaatacatggaagtgagttataatgaggcagaaacaaaatcctcggtaacattgatgatactctaccgatcaccgtggttttggaaagtcagtcaacagttgtattattgcactcaatttcattgtgacattttatttaacttcttcatcttggtggtccttgcccagttattttgcctcattagacatcaagaaatggagaaagactgaaagttaatatcttaagtgcttgttcttcatgtttccttcttgttatttatgctattctctttgtggctccattcttctttcaatcttctcagcttataaccgtctttcccttatgctaaggatagcccttacactcatcccatctatgctgtcaagggctgctggttggtgctggtacaaggagcccactcagcagttttcttacctttgcctgccctgcctttcatggaataagaaaggcaacgttttgcagcttccaaatttctgaagaaactaatctcagattggcagttaaagtcaaaatgttgccaaatatttattccttttgcctaagtttggctacccggttcaattgctttttatttttaatgtcttgactcttcagagttcgtacctcaaaagaacaatgagaacatttgctttgctttctgctgaatccctaatctcaacaatctatacctggactgtccagttctcctcctgtgctatcttctcttctatccaagtagaatgtacgccaggagctccttccctctagcaatttctactaaaatgtccaagtagaatgtttccttttacaatcaaattactgtatttattaatttgctagaatccagtaaatcattttggtagctctggctgtgctatcaataaaaagatgaaagcaacaagttgattttttttaggtctactattgattgaacattctccaatgggcaaggctcattgtcaaagcagggtgaacatgatcagattttcttctgcatcatcacacaagctgcgagtgttgctgcaaagcacttctcagtactccttccctaacctcagtatgttaatagccattcatacttggcttaagcatcaccattctggccacagtctgagagattagtgatcaaagctcccttccctatcactaccaccacctactgataacaaagatttctgaatacttagtagtagtaaaatatttttcaagcacagagttacagctaatcctggatcacttgttctaaattcataagggagtatatcaagagcaaatgaagtaaatgattctttcctgcgtgtgggagtcaccatcattttattcaaagggagttcctgtgataggttcattccttaagtggtgctacagaaggaccctaggaaaatgctgatcttgtcctgagaggcaactgatttgagaaaatgattatactacagcaggaaggcagcaccagtgaacatatggtaaatggcaaaaacaagacagttttagaaactgctaattcagtagcagccttggcctttcccttaactcaagcaggctggaatctgtctttatagtcggcaactttccaagataaagcagtgataatagcagttggcaacactaaatatcaatatcatcaccctttaatgacatgttacccctttcagatctagaaaatcagggaaaaagtgatgtcccaactctactctaaaaacctgctcctactattttagtcagtgtttctttaaggaagaagaggactatgtccccaaaagctaactctgttttatagccctggtggatccctgaaaaccctatttattctatactgggctttggaatatgaaaaatggacctgtgtggccgggcgtggtggatcacacctgtaatcccagcactttgggaggtcaaggtgggcggatcacttgaggtcaggagttcgagaccagcctggccaacatggtgaaactccatctctactaaaaatacaaaaattagccaggcatggtggcgcacacctgtaatcccagctacatgggaggctgaggcaggagaattgcttgaacccgggaggcagaggttgcagtgagctgagattgcaccactgcactgcagcctgggcaacagagcaagtctctgtcttgcagcagggggaaggacctgtggtactcctacaaacttaacaactttagcttttcggggaacagtggtggtctccacagatagctagaatcttctaagatgaaaataaactgtttcatccagctgctttctgcctgttaacctttgccacttccattccttcaagtgtgtaatccccagggttgtcttgtattacacacatccttgttaagtaaatataccactgttgatttcttcttccagtgcaacatttggattaaataaaaatctttagtttccaga

SEQ ID NO: 1138 - DNA, 18783 bp, Homo sapiens
gctcacgtgacgcggtcccggaagttgaccggggtgcggagctcctgggctgcagctcctggagtttccgaggttcgtgcgcgtctggtggcggcggcgtgatgttctcggcaggagcggagagtttgctccaccaggccaggtacgggggagctgcggccccggccctccttcctgcatctctccctaggggcacacgggggtgggtctcacagggcaggggcttgggcgccagccttgcaggaacccgactggactcgccctcgagacttggggatcgggtaaggcaacacggcggccaggcttggggtgaggaggtcggggagggtcatggtgggtccccggaggaggtgacacttgagcagagtcttggtgagtgaaagcaagtggggtgggacccagtcgacagtttagtcaaaggcttggcggtgagaactccgcgtctggcaggaaatcgggcagccgggagatttcagtgcctcacagtcaagaacgcaaagtcacagtgtccggaggcctgctaaggaataaggctgtgtgccaggctggggagctggaggccatccgagggctttgcggaaccgtgggagggttttgtgacttaaaaagatctctcttgcgcggatgtattagctaggctgagaaatcaccctccaggctggtttcaggctgtgtctggactcccagtaacgagtgagtagctccttcctcaccaactaaccagtcatgggggaaaacagtgtaagccaggactgaacagactcacggtccaccaaacaggcaaagacttcatactacatgtttaaaagaagaaaatgctgaccgggcgtggtggctcacgcctgtaatcccaccactttgggaggccaaggcaggcggatcacctgaggtcaggagttcgagaccagcgtgcccaacatgaggaaaccacgtctctactgaaaatacaaaaaaaaaaaaaaaaaaaaaaattagccgggcgtggtggtgggtgactgtaatcccagctactcgggaggctgaggcaggaggattgcttgaacctgtgaggtggaggttacagtgagctgagatggcgccactgcactccaggctgggggacagagcgaaactccgtctcaaaagaaaaaagaaaaaaagtaaagaaaatacagccagcactacagccccttggtaaacgtaaacaaacttggtgaggtgagaggccgaagcaggagaagtgcatgaacccaggaggccgagggtgcagtgagccaagatcgcaccactggactccagtctgggtgacagaacgagactccatgtcaaaacaaacaagcaaacctggactcagagctagaccaattggtgggaaagattcgggtggttgaaattgctgtgattatagtgagtgaggtcttgaaggcaggttaagttctaaagcccgaacaggacaaaaatctctgatcaaaataacccttaagagtccactcattaggaagaggcttggtgaatatgcagcaccatctcccagcagctcaacataggcaaccttcccttcaatcctggacagatatgtcattcatgtgaatgtggggactatatgaaaatgaaaaatactggcatctcagcatgtaacatgttaatcccaaggtccttgccaagagacaaggaaaaacacccactgagaacttcattcccagtcacattctgctcaaggtcataaacttgtgacatgaaaaacaaaaggaagagccctctttatttatttatttatttatttatttatttatttttattagagtctcttttgagacagagtctccctctgtcgcccaggctggagtacaatggcgcaatctcagttcactgcaacctccgcctcctgggttcaagcaattctcctgcctcagcctcccaagtagctgggattacaggcgcccgccaccacacccggctgattttttgtatctttagtagagatgggatttcaccacattgtccaggctggtctcgaattcctgacctcaggtgatccgcctgactcggcccctcgaagtgccgggattacaggtgtgagccaccatacccggctgagccctcactatttaaatacctgtttctctgcctccctggctcgggtgggcagccgtttttgaggatagagtgtggttgaatttccctatgtaacatacatgagttctgcagttgccctctgttagggtttcaagaaggttaatctattagggcttaccagttttcacaatattcttaagcctgtgatttctgatgatattttaaaataaatgactgtagtttgagggttaaggtttggagccggccaggcgcagtgactggcccacgcctgtaatccgaacacttcgggaggccgagttaggaggatcgcttgaggctaggactttgagaccagcctggacaacatagcgagacccgtctctacaaaacagaatttttaaaaaacttagccaggtgtggtggcacgtacccatagtcacagctactcaggaggctgaggcaggaggatcacttgagccaaggaggttgaggctgcggtaagctatgatggtgccactgcactccagctcgggtgacagagggagaccctgtctccaaagaaagccaaaaagatttggagtgaactttagtttctctctaaatgtgtcagagatacggaaagcaagggtgcaaaaagtgatcaaagatagcgctgcaagctgaaggataaatggagagagcgggaagcgagtaaaggatgggggcatggaggggtgccccgcaaggtcggggatttccaggaggaagagcctcagcccactagctcgggagctagtggggcatgtatcaggcacagggtctgtgcgaagggacagaagcaaaagaaacaggacatggagtctggagaaggaaggcggggccgggctcttggaggcagcgttggggtctgtaggagtttggatttgaaagcagtggggagctgttgaagggtttgggtgggttggattttagagagaagcttgagacttggagaatatgctgaagggaatttaatcgggatgaggggttccacctttctgggaaagattttccattgtgtgtatatatgtatatgtgtgtatatataatttatatataacattttatatattatatattacatatatatttagtaatatataatataattatatgttatatattatatgttatattatatatcattatatataatatataatgatatataatattttatatataatcaaaaaaagaataaaaaaaattcactgggcttagtgtagtcccagctacttgaaaggctgaggtgggagaactgcttgagctagaagatcaggctgcagtgagctgagattatgccactgcactccagcctgggtgacagcataagactctatctcaaaaaatatatatatagatagatagatagatataaaaatatatttttatatgtaatatatataaaatatatattatatacatttttgagatagagcatattatatattatatataacatatataacaactatataacatatataacataacatatataacaacataatatatagcatatattatgtataacatatattagatataacatatataacattagaaataatgtatataacataacataacgtatataacgcatataacaacatatataacgtatataacataacacgttatatatgatatataacatataacatgttatatatcataacgtgttatatgtcatataacatgattattatatatcatatataacatgataacatatatatcatatataacatatataacattatatataacatatatattatattatatatatatatttttttttgaagtagagtcttactctgtcacccaggctggagtgcagtggcacaatctcagctcactgcagcctgatcttccagctcaagcagttctcccacctcagcctttcaagtggctgggactacaccatgcccagtgaattttttttatttttatttttttttgtttttgagacggagttttgctctcgttgcccaagctggggtgcaatggcatgatctcagctcactgcaacctcctcctcccgggttcaagtgattctcctgcctcagcctcctgagtagctgggattacaggcttgtgccaccacgcccagctatttttttttgtatttttagtagaaacggggtttctccatgttagccagctggtcttgaactcctgacctcaggtgatcagcccgcctcggcctcccaaaatgctaggattacaggtgtgagccaccgtgcgtggccgaattttttttattcttttgtagagatggggtctcactgttttgcccaggatggtctcagacatctgcactcaactcatcctcccacctcagcgtcccaaagtgctgggattacaggtggcctggggagggcacagccacgtagggggcccttctcagggagtccccagagtcccctggcacagcaacccctttgcgcattattggttctttcttttagactgggatagaaacctaaaaacaggcttccatttgggacttttcagtatcttacctgtggcttactagggagattttaaaattaagccaattagttattcgagtaaaaaaacataatgggcttaccttacaatatgtcatgacatttgttctttaatatataagattttattctcaggccaggcgtggtggctcacgcttgtcatcccagcactttgggaggccgaggtgggcagatcatgaggtcaggagttttgagaccagcctggccaacatggtgaaaccccgtctctactaaaaatgcaaaaattagccgggcgtaggccaggcgcggtggctcacgcctgtaatcccagcactttgggaggccgaggtgggcagatcacgatgtcaggagatcaagaccatcctggccaacatggtgaaaccctgtctttactaaaaaatacaaaaaaattagccgggcgtggtggtgggtgcctgtaatcccatctactcggaagactgaggcaggagaattgcttgaaccccggaggcgaaggttgcagtgagccgagatcatgacactatattccagcccgggtgacagagcaagactccatctcggggaaaaaaaaaatttattcttgtttccataagcaaaaggctcattgaagacatcttttgaaaggcaccttattctagagtaaatttcctactcttgaatgagacccctaaaaagaatcggttttagtccttctgccctgggaacaagaaaatctaagtgcatggggcctccgtgagtgagattcgtcatagtgcgctgcagcgatggatcgggaaatcccagggtgagaggaaccagctcagggaatcagcgaatttatctcgagagccatgagccgtggaaccgtgttcctccacacactcggcttctcttttctaaagagggattttccctgctccaagggttatcctttttttggttccgagcagcgagtgcttctgggtcctgaagtcctcttctttgtttagggagatccaggacgaggagctgaagaagttctgttcccggatctgtaaactgctgcaggcggaggacttggggccggacaccctcgactccctgcagaggctcttcctcatcatctcagccacgaagtacagccggaggtgagtgtggcgacggctcaggccggctcctcacacagcggccccaggagaacccagcccacgcccagcaggtcactgcagatgctccttgggggttgagtcatttgtccacttaaaccagtgctgaaggtccatcctcatgtaaaatgctctgtccactggcccaagggtgcccggccaggtgctctggggcaccgggtgctcctgccacggtcgtgacgtgttaccgcccaccacgggcatctcgccttccaggctggagaagacatgcgtagacctgctgcaggccaccctcggcctgcctgcatgccccgagcagctccaggtgctttgcgccgccatcctgcgagagatgtccccctctgacagcctcagcctggcctgggaccacacgcagaacagccggcagctgagcctggtggcctccgttctcttggcccaggtagcgcagcagtcaccaccccagttggcaccggatggctgcttcccaaggaacaggggagacaggaagcaggggcgccagagccggcaggtggctgcttgttgtagacgcatctcggtgctgagtgcctggcacacttgaggctggggcatgccctgttgactggaacggggtcccatgcccagcaggcccacgtggtatgttggtgctcaggagaggtggtggagtttggtttctcagacagagccttgagacagcgagtcagtggaggctgggcctccagaccttctttttggggtttttgttttgttttttagaaacagggtctcactctgctgtccagtgtagagtgccatggagtgatcaatgctcactgcagcctcgacctccctggctcaagcaatcctcccatctcagcctcctgagtagctgggattacaggcatgcatcaccacacccagttaatgtttgtatttttttgtagggacctggggtctcactatgttgcccaggctggtctcaaacttctgggctcaagcaatccaccctccttggccaggagtttttgccaagtccatgtcctccctccctctgtgtcgggagcaggcctgggcactcagcgtggggatccaggggttcacaggctgcctttgtgtgagagaagctgctatctctgctcatgggttgcccaggggtgcagagtctgcaggaaggttgcgatggagctgggcttttccctccgttcccagcctgcagcgtcatgagttgcctcctgtgctggggtgcagcctgcggttgctttagttctgtgtgggcgagagcttgtgggccccggcgtactcagggcgttgtacttcatcactggggtcatcctggttggtgcccagccccctcacctcacagacctcctgcaggccacctccaggcctccgagatgaccccggtaatgctgtggtagctcctggcctttggaacaagatgactccggctcttcttgtttgtttcacccgcccttctcctcaagcaactcatttttttcagtggaagatgatcttgcagaactgctgccaggcgccagcggtgcaccccccgcccggcacgtggcctcccagccacccagccgccctcctccctgccctgacggccctgcccctgtgctgggtgtctctggtgctgctcagatgtttcagcacctgggtgtgcagagtgaggtgggtggtttaaagactgggatccacactggaggccccgcaggacggggtgtcctgtgtctgcggccagggccatggtggccgccagtgtgtttttagcattgaatcagccgtgccctcacccaggccccctccagcctcagcgatgcagctcccagggagagaggctggaggcggagcaggcaccttgtggcccggggtgggcctgcgcgggacatcctccctgccacctgctaggccggggtctcagcgaccgacgcttctcaggagtgtcacacagacttccgaaatgggggagctggtctctggcacaggccagtaccccagcgtttgccctgtttgatttgaagggtgacagaaacgaggaggtcagagccgtgggccagggcgtgctacgagcgctggagagccggcagcctgagggacccagcctcagacacctcctccccgtcatggccaaggtcgtggtcctcagcccgggcaccctccaggagggtacgcggggcccctcccaagaggctgttgggggtctgccttcccaggtccttccctgagggcccatggtgggttgggagtgtggggggcaggtgggggacacggggaggcccgagggtttgggacgctgcaggattctgttttctgagaaaagtcggccagcatcccaacaacccaggcatctgtaggattcaacctcacctccccatgccaccccacccactgcagaccaggccaccctgctcagcaagcggctggtcgactggctgcgctacgccagcctccagcaagggctcccacactccggcggcttcttctccacgcccagggcccggcaggtgaggctgggactgttctggaaccatggggaacagagtcacagacaacccctccctgagagctcctgtgcccacagcggcgaggcctgctgtcgttccgcggggtccaggacgagcctgcctctgctgcggggcttgggtcaggcagggccacagccccctgacccgtgtggctctgggggtctgtgcgcgggttcagtcccagggcctgcggagcagggtgtgcgacgcgcgtctgcctgggggtcaggtggggatggtgtttttgcatcacacagggcgggccgctgcccgggctcatgttcaggcagcttctcctccacctcctgaggagcttgtgctaaaggctggcgtttttcccggcctcggccccctccgcccactcctgcctgtccttcccacagccgggccccgtcaccgaggtggacggggcggtagccacagacttcttcacggtgctctccagcggccaccgcttcacagacgaccagtggctgaacgtgcaggccttctctatgctgcgggcgtggctgctgcacagcggccccgagggcccgggcaccctggacacaggtgtgcggggtggggggatgacgtcagacaggggtgggaggtgggcgcactatgggttggtcgcagggggacacgggcggaggtggggggactcgggtgtgcccaggatgcagcagaggtcaggactgagcaacgcagcctgctgacctggagctaggcggagagcactccctggccagcatctttggggtccagggtcagcaccggggatcctctggacaccccgtgaccctcatgcaatgtgcagatgtgagagctcccacttaaggcaggcacccttaaggttgttggagtgacgccactgagctcctcccggctgctctgtggacttgttggggaagaagcctcagccaccctgaagggcggccgtgatggggaagctgccgggtgggtggacgtcctgagacggtgacgcctcacgcctcccgggaggggctgcggcctgtgctctcctcctgcccttccaagcagggcagcaggcatgtcccagcccgggagccacacgtcagcctgctgagagttcccacctcccgcagatgacaggtcagagcaggagggctccactctgtcggtgatctccgccacctcctctgccggccgcctgctgccgccccgggagcggcttcgggaggtggccttcgagtactgccagcgcctcattgagcaaagtaaccgacgtgagtcccccacccagggcactggcctccccagggctcgacgcacctgctctgcaaggccacctgaggccagcacagcttccctgagctactgctccacagagggggtccctgggtagccggtttggagcaggggcatttttgcttctggggtcagccccaagtgttcttcaggctccaccccagcccccagcccggccctgtcccacctgggcccctcgcctcagtcccactcaagtcctcctgggggcctgtcccacccccctgctcccggtcctgcctggagcttccagagcacaagctgccccctcattgggccactctaaggctgagacagagccggctgactttttcccctccttccaggagccctgaggaagggggactccgacctgcagaaagctgtaagtggctggggaccaggggatgggaggcagcgactcggcccatttgatgtggtccatgtcccgcagtgcctggtggaggccgtgctggtgctggacgtgctgtgccggcaggacccgtccttcctgtaccgaagtctctcctgcctgaaggccctgcacgggcgggtgcgcggggacccggcctctgtgcgggtgctgctgcccctcgcccacttcttcctgagccacggtgagcccagggtggggtggcgctgactcggggctctgcttctgcctttagttttaggatggaatttcttcttcccttttttttttttttttttttgattgaatagagacaggggtcttgctgtgttgcccaggctggtctggaactcgtggcctcaagcgatcctcctgccttggcctcccaaagtgctgggattacgggcatgagccaccgtgcccagctcatatttctttttgatggattgctgtgccagatgttggtaatttttaaacttttaaatagagaaataaacagactctttttgctgtgtccctagcccaggaaacctgaaagtctaggaaccagcaccttccaaagaatgtgccatagtgtgtgtgactcacgagctgtccgtgtccctgggcgagggagaccaagtgccgcttccccagcgtcccagcgtaggacgcctcggagcccttggtgtcctggagagcaggcctgagactcagggcccctaaccagtcacagaagcacggccagggcgaggtcaagacgtgtgccctggcgggccctggtcttgcaggggaagcggctgcagtggactcggaagccgtctaccagcacctgttcaccaggatcccggtggagcagttccacagccccatgctggcctttgaattcatccagttctgcagggacaacctccacctgttcagcgggcacctcagcaccctcagattgagcttccccaacctctttaaggtatatttgggcatccctgggtgccagggcaggggcatggtaagtccctggggctcctcccctctttccagcggggttcagggcgagtcctggctgagcatagagccctgtgagtcccgggcctggaatgcggtgtgcagggtgaggtggggatctggggtgtccctgcagcgtcacgtgattgacggtgctgtccaagaactcccttgtgggtgttttggagagggggctgtgacacaagacggtgagtttgttctcacagcactggggcagggctgctgcctggtaggatccctcccccgggagccctgcctggtgccttgggcacttgggtgccatttgccttttttttttcttttgagatggagtctcattcctgtcacctaggctggagtgcagtggcgcaatctcagctcactgcaacccccgcctcctgggttcaagcgattctcctgcgtcagccacctgagtagttgagattacaggcacccaccaccatgtccagctaatttttggtatttttagtagagatggggtttcgacatgttggccaggctggtctcgaactcctgacctcagatgatcctcctgccttgacctcccaaagtgctgggattacaggcatgagccaccgcacccggcctggtgccatttgcttttgaagtgtcttttgcagcctcgcctcgctgtaaggtcttttcaactgaggtggggaatcctctttctggagaaaaaccaggacagtggaaaattattgacctgttggtacgaaagtagatacaggctgggggcagtggctcacacctgtaatcccagcacctcgggaggccaaggcaggaggatcttgaggccaggagttcaagaccagcctgggcaacacagggagacctcttgtctacaaaaagtaaacagcctcacatggtggtgtgtgcctgtagtctcagctgctcaggaggctgaggtgggaggatcacttgagcctgggaggttgaggttgcagtgagctatgattgcaccactgcactccagcctgggcgacagagcaagaccctgtctcaaaaaaataaaaagcgggaggaggcaaaggtagaagccctcctggggactgcaggtctgggacagctgtggggccctagctggctcctccctctgccgcctgctccacagctccgagccgtgtccgaaccgctgtgctgtgcccacagttcctggcctggaacagcccacccctcacctccgagtttgtggcgctcctcccggccctggtggacgctggcacagccctggagatgctgcacgcgctgctggacctgccctgcttgacggcggtgctggacctgcagctcaggtgggcccctcaccctctgccagcgctgcgtctcccagccagctggttccacacactgggccccctcctcgctgctcctgacccctacaccggggaccctccttcttccccccccaacacctgaccagtcctcccctgcaaagccacctctaggacagggtgtgtctgtcacccttggccacttgccaagggcagcccctgcaccctggagtgcctcacccgtcttcacgcccaggcctggagcctcccatgccaagcccttcctggcacccgaggtgctgtgatattagggacacctgccgtgtgtctccctgacgggggtgcccttgagtgcaggggccgcatcccagcctggccttgggcgtctgtccacgcaggtcagcaccggctgcatccgagaggccactctgggacacctctctcagggcccccagctgcctggaggccttccgggacccgcagttccagggtcttttccaatacctgctgcgccccaaggccagtggcgccactgagaggtacggggccctagggccagggggccaccagtggctcagagagcccggccacagccactggggtggggctcactgctcagccctaggctgaggccagggtgctttgtgtcccacacaaggctgcgtccccgtcatcaccattatagaggccctgcttctgcaccacgggtctgccgggggcggggcctggtctcagctctctctgctgcccacatcaaccctcataagcttggaggttggccctgtgggtgctccattttgcagatggacaaaccgagcctgagcccaggaagcaggaggcctgggaccggccacaggcctcctgccctcagcccacgccagcctttgtcccgatggctttactgtcccgggtgtgctgacgccaggggtctccccaaacccaggggagcaggaggtcccgagaggcgatgagtgaggatgggagcgggctcagctgtgcgagagggagcagtggcgacgtggccccggcctgcagtcaccaggtcggggagcgggcagcactcacggccacactgtgtcctcaggttggcgccactccaccagctgctgcagcccatggccggctgtgcccgcgtggcccagtgtgcccaggccgtgcccacgctgctgcaggcattcttctcagcagtgacccaggtgagctcgctgcctggggccccccattcccacaggcctcacaactgaggggcaggccagagccagcactggggggccctcttgagctctgcagaaggctgctcccgccacacccaccatccacggtccctgtgagggtcagggaggcacatgccacagccccggcaggccccgtcccttgtcccatcccctttattccagcaggccccgttccccagtccccgtcccatccccttcatcccggcaggccacgtcccccaatccccgtcccatccccttcatcccggcaggtcctgtctcccatcccagcaggctccatccaactgccccagcaggccctgtcttccgtccccaggacagggcaagtgagtggcctgggctctggccacacagctggggccggagcagtttgtccccctgctgcccctgataattcagcatccccatctgaggccaaaataaaggctcccacaggctggtgccccccatctcccccattgctgcttcccacctcggggagctctacaagccagtgcaggagagcctgggaggtggggaggccggcagggggctgggcgttgcttgggcgcacccttggccaaacaagacgtgtgcctggccttgcagagcgggagttggcagaggagccgtggaacagaagcgacacctctgccgggggcacttgggccagcccagggcttccctccctgtgcccggatgctgccagctgagtctctgtgtccctgggtgttggggaaggcagtggacgaggagtctccagcccctcacctgccccccagccctcaccatggcttcacccccaaccttagggcctgcagtgggggtggggctgagcctgtttcccactcctgacccccaggtggctgacgggtccctgatcaaccagctggcgctgctgctcctgggcaggagcgactcgctctacccggccccagggtacgctgccggtgtgcacaggtaggtccctcctgcgctcctgccacagccctgggcgggtgcctcctggactcctccccctctcccctcccccctccccttcagtggcttcggcaccacccctagctgggccctcagcagcctcagaccctgccacccccacccacagccccacacccagccccaggcacttctctctgcttctcaagaacattcccgtccttctttctgccgagcctgtcctcttcagggttagctcaggtccctcttccccgtcttgtcccctggggtccttctctccaaaggcctgatgcatgcaggcccatcctggttccactctgagcctgggcctgaggccagcgctggtgccagccttctccccagtgagaacagtttctctgaggctggcagtcttctgtgttcctctatcggagggtgcagcatacacctaccactcagacgcttcccgggtttctccaggcccttggcctggatggggatggggtcataggtctgcacagagcaggcgtagacccggctttctgggcagtgtgctgagttctcagttcctggccctgtgtacgctgaaaccctccctggtggtggagctggcaagagacctgctggagttcctgggcagcgtgaatggtctctgcagcagggcgagcctcgtcaccagcgtggtaaggcgggcgctggcctcccacagccgctcctgacccaggaggcctgggtgggggctgaatctctgtccccgggcctaggtgtgggccatcggcgagtacctgtcggtgacctacgatcggaggtgcaccgtggagcagatcaacaagttcttcgaagccctggaggctctgctattcgaggtcacccagtgccgcccctctgctgccctgcccaggtgtcccccccaggtggtcaccgtgctgatgaccacgctgacgaagctggcctcccggagccaagatctgatccccaggtgcctggtcagggagggagcgaagccttctggctcctggggaagagaggtggcttctgaggtcttcccatccaggtgttgtgaaatggtcgcagcagcgcaggtcctgggtgggccctgctgagctaaagccactctgctgggcgcttcaggcctggcccctccacacagacccctgtcctgggaggggagcatctgcagctgacggagggaccttctttccccagggcctctttattgctgtcaaagatgaggaccctggctcacagtccagccaccagctccacgcacagcgaggagggcgcggaagccatccgtacccgggccacagagctgctgaccctgctgaagatgcctagcgtggcccagtttgtgctcacacccagcacggaggtgtgcagcccccgctatcaccgcgatgccaacacggccctgcccctggccctgcgcacggtcagccggctggtggagagggaggccggcctcatgccagggtgaagggacagtggccagggacttcggtgcagattaagagcctgggcagccagcttgctactgaggccaggctgataggagctcaggagggcgcgggagtcctgggagaggaggcaaggcccacggtgggcttggcaccctcacagacacgcggggctggcccccctgctcaccctctgggctttgtctccgagccttttgctcccaggcaacactgagctgagctgaggggtgccatggagcggctctgattggaggcttgaggccctgtggctgggtcgggtggaggctgctgggtctgtttcctagtcttttgtttttggacagttgatgggcaagaagagctgcagtaaaagtaaatctcctttaataagcgtctgtatgaagagtgcgcgatcagttccgttacctgccctgcaccctggggagaggaccagggatgggaacccctggcagctgctgccagtcctggaggctcagcccggcgtgccactgctgctacagaaaccaggtcatttgtgcacagcccggaaggcagcggcgcgagttcccgggtgtggtcaccgctctgggtggtgcgcttgtcaatgccccttttgatgcccttgaatagcctgaagatgaaggggaccgggggagggttgcaagcgccatggcctatgcaggctgcggcctctggccattcggagggaaggccccagggagccacctgagtggagctcagaacactggattcgcgcgaaggggaggtgtctgggcgtgcggccccagccccgccaccttcctgggccctgtggtcccaccctccggactaccaaggcacagctgtgtcgcacgttccgcccggtgcctgggacgggctcagccgccagggggcgccgccgccccgagagcctcacgccccgcccccaggctcaaactcttccccctccccactctggctccgcccccggtctcctcttttgctctggccccgcccacctcccctccggcctcggccccgcccccaatcccccatagctctgcgactaagaaaccacaggctgaaggcgactgcagggtcctgccccttgcccagcctcaggactatggagggggcgagtgacgcgcaaggaacggagcaggggacaccgtgcgggctcaggagctccccagatgcccgagccgaaccgcggggtcctcaccgccaggttccagcccaggaagcgctcgcctgccccacagcctgggccttgggtcgcgttccgagctccaggacggctggtgtcccccgcggcctgcgatgacagcccagggccgctgagccggggccgcaggaaaggctggcgctggcaggcgcttccgtcggcagcactgtgtttgtgtttccacgtggaaacagcagcgcacgtgtacaactgtgcataccaaggcgtgcgtgccagtgcgcgggtctcgggatcacttcccagtgcggtgcacgaccccgcctgcagcagtgggtgtgggggcgctgctgggctcatcccgaagctcagagagcgtggggctgcccctaggctcggaatgagtctcccactgagtccgcagctcccctcctgccctggggcggggcttccctgacctgaaggcgtcgggggtgtcctggctcccagctcccaggcactcgtggggccaccgcccaggccagctggtgctaagtccgcagcctgtgcagcagcgcccggcttaggactgggagtgtgacttgaagggccgtcccgctcatccaagggacaaggaggagctcatggccacagggcctcggagggcatgaccccagcccagggaggagcaaccttcaggtggcctccaggaggcagctgggaaaagggcaaagctcaccagctctcaactttttttttaaataaactgaaattttagaatagtttttcagatttacagaaaagatgataaaccttagaaacattatatgctaagtgaaagtgagaagtgacagcctgctggcagtcctcacagccctcgctcgctcttggcgcctcctctgcctgggctcccactttggcagcacttgaggagcccttcagcccgccactgcactgtgggagcccctttcagggctggccaaggccggagccggctccctcagcttgcggggaggtgtggagggagaggcgcggtgggaaccagggctgcacgcggtgcttgcgggccagcgcgagttccgggtgggcgtgggctctgtgggccccgcactcggagccgccggctagccccgccagcctgggcagtgaggggcttagcacctggaccagcagctgctgtgctcgatttctcactgggccttagctgccttcctgcggggcagggctggggacctgcagcccgccatgcctgagcctcccccctcccctccgtgggttcctgcgcagtccgagcctccccaacgagtgttgccacctgctcagggcacccagtcccatcgaccacccaagggctgaggagtgcctttggagcagggcacgggactggcaggcagctctacctgcagcccctgtgcaggatccactgggtgaaagccagctgggctcctgagtctggtggggacttggagaacctttatgtctagctaagggattgtaaataaaccaattggcactctgtatctagctcaaggtttgtaaacacaccaatcagcaccttgtgtctagctcagggtttgtgaatgcaccaatagacactctgtatctagctactctggtggggacttggaaaacctttttgtcaacactctgtatctagttaatctggtggggacatggagaacctttgtgtctagctcagggattgtaaacgcaccaatcagcaccctgtcaaaacagaccactcggctctaccagtcagcaggatgtgggtggggccagatgagaataaaagcaggctgcccgagccagcagtgacaacccactcgggtccccttccacaccgggatgctttgtttgttcgctctttgcaataaatcttgctgctgctcac

SEQ ID NO: 1139 - DNA, 110615 bp, Homo sapiens
accctaccccagcaggcgctaaaggagagctgacatgatggataacgaaaaagaagacgctgtccttctattcagggagtttaacatctggaagagccgggagttctttgtgctaaaggccctctacaaagtgcctgagatgcaaaaataagtcactttctctgtcctctcagcaaccgagtcgcatgtcgttatcaaatttttattttctgtaactgtttccttccgtcttgctccgtagacagctttttgcagcagagagcgctgccgcggggctggtgtctactcttcagtaagtggtcaaaacctggctactggaaggaaatgcaatggaatcgctccgcgctcgagtattctctttggaactacgggaatgacagctccagtgggacacttggaggtcatgatgaacgcaaagaacgtgagaacacttgcagtcctcggggtggaaatgccttctagaaatactaagtatccgttctctcgttgagactttggcaaaccagggattttaggaagggtctggcactcaacgttcctaaaattggtttcctagatggagccggagggagagagggagtcaggaactgctgcttttcgtcggaatgcccggaggggagaagaagaaggaggaggggtgagggcgggcggccaaacgccagccggcaggggacccagagaagagggacatcccgggcgaccccgaggagcgcggcttgggcaccgcagtggccgcggctagtgggagacctgaggggaaagggagagggcaggggcgaggaacccagggagcgcgcgcggattggtcctctcctcggggcgtgcgctcctgtgcgccaaatgattggtggcaggaaagtagcaggtaaaccggctcccgccgcctcgccattggtcagcggcctctctagccgccacacaactggccagcgggctgccgagccgcgcgcggattggctgggggcggccgccgggaccggctcccttcgggcgttcggattggctggcgggaagaggcaggtatccgggcgctgcggctcctccattggtgggcggggaaggggggttgggcacagcgattggtgggcggggggccgggcctgggccggcggggagcggattggtcggaaagtaggttagtggtgcgacatttagggaaggcagaaagtaggtcagggacggaggtgcctgtttacccgcgccggactcaccgccgccgccgccgcgggatccgagtgcgggcgcgggcgcgggcgctcccggcgagccacggtgagtgtcaggccggcggcggccagcgacgcgatcccgcgcaccccgtcgggggccgttagcaccctcgcgggcgctgcgcccctgccgccgccccgggggcaacccggccgccgaagaaccctgcccgacgtgcccgctgccggccttaaagggcccgtgaccgctccctgcccccacccgggccgtggggaggctgcgccccttaaaggcgccgcgcccgtccgcccccatcctcctcgcgggggctgccgctgcgggctagggcaggcagaggtgctgcaggagcccttaaaggggccgggaaagtgttcgctggagtacccaccgcccttccgcgggcatcgctacctggcggggggagggggcagctagctgcctcttaaagggatagctctgcccttgggggcagtgactcggccgaagaggactcctagatgtgtccccgggagcttcggggatccccgaggggaccatgcctggtggctgcccctcaagggcgttgggcgaacggtgccgcgtctgcccttcctccccgcttcacttccctttcgggagcccgcgaggctgggtgggggcggggagggcgtctccgtcgggcttggggagtccaagtccgcccgccccttcggccctgtagccagggctggcgctgcacccgggaatccccggccggcacggggccgaccccagcctgcgaactttcgtggggcctgtgccgtccaggtcctgggcggccctcaaggatgccccgtgggtctgcgggcaggtgcgcgtcggcctggggatgtcgcccggagcccgggtgcgggccggccttggagtcccagagctccgcggagggcgcagcgagcctggctccagctccgggtttgacagatgtcagggaagaaaaggttcccgctcggctattgccgggcgttgacatcccagagagcttcccgtttgcttggaagaagacgaggaaggtagaggtgaacgtcgaccttgtggggcgcatgttagcctccccgaggggtcgcgagagccggcagcggggtgagctcaggtgcccgccggcaggagctggggagggaaggggagtgctggacaccggcgcctgctgtcaagttctcgccggccggtgagagacccgctgccgccgcgcaccccgcacctcctgacccctctcccctctccgcctcggccccttcccggtcacctagcgttgttttggcgctttggcgcttgcggtctcttccttcttccaccgctactcctcagcgaggaattattagccaagttttctcacccagcttccaaaaatcagattccgtatttgtgaacaagcttttcttgacactacccgtatacccgtatttccagcatcgtcgttttattaaacatccataaaagctgccccttagatgcattcatttcccacgacacctgcttgcttgtcatttgtccttctgacatctgctgttgttcacccctttaatctattattaaatgacaactattattttaattcttctggtctcattgatatccggatctgtgaatttgggttggtggagtttttaattaatgtacccgttgaatcatgagcttaaaataatcattgctgctcctgagcagttttgaataatatcatgctctctctgcttgcaagacttaaaaaaattcgctggtgttatatttgatttccatatcaatggaattcccaaatatttttgaaaatacaaaattcagtctttcagtccatgttttgttactcagatcattttactgataagtctttaacgcagcttatagaacatatttagaaggtttggaaatttcctggacaggatttgaaattgcctgtatcatctgaagctggttctgtagaagcattttggttttgattgtagatgcagccagtgaatgataacaataagttaaaactgtagttaaatttgttctttattcaaccctctgaagaacgaacagatctggtagaaaagcactaacctgggagttaggagctggacatcctggttctagtttaggcttgggctctcatggccgttccagtcggggcaagttattaaagatttctaggttgtgtttgcctctgatggaaagtaagacggttgaactaggtgatctcaaaggttcctctcttttgaagttctgtaagtctctaaatatttaatacatttgaattcaggttggtatttacctcctggcacctccagaatatctgagctgaagccctattttcataagaaagttaagcagatcaacagatggtgttttgaagaatccatttcaaatgatttataaaatgatgactacttacgagtttgtctgctatttgcagaagaggtttgcatgccacagggcaggaaaaggaagtggccatgttttcagatttatcccttcacaccaacaatctctgtggaatttatatgctaaaagatggagaagcaccatagaaagatttggctgtattaacaaaactgcatatgaaaaggtaaaaactagatagttaatatctctctttggtgtaagggttataatgtatctgagctttctttgtgatttcatcatcaactctcactgtggtaggaaaatcaatattaaataaacagtttcagccccgtgattacatgcagtgattttaggaagcatcatgataactaaagtaggtacttgcagggaagtaaaatatcctttctagaccttgaggtttcgttgggagctagggacacaggcatgttatccttctccacagtcttttttcattgtcaccttatcacaagactcagatttatcccaaatacccaccttgtcttttcttctccctctcatgaaataagacctgctctgactcaaccccctcagcatctcttacttcccacccaaaatgtcctgtctctatccccatcgtcccctcatctcctcccaattcagagaaagcaagtggacctctcctctgttccttttcttggcctctcaccatgggcaagtgcctgggctctggtggcagaagaatccatggctcaggtttgggctttgtggtcttggatgtgtgcttgactcctctgacctcaggtttctcctcttggtgtaatggcagtgcctgcctcgtggagtctgtgtgaggattaagggagatggtgcatgtaaaaggcctggcacacaggaagcctttcctttgtgccagctgccattccttctcacctctacccgggtcctatcactagaatattatttgtgctgtttgtccttagtctcccctgccccaccctgaaaaccttaggcttgacttaggagaggaaggatggaagaggcagagtcagacttgtggtgagcctgctgtgtaccaggcaatttacatgtgtctttacttggtaccctgggttcgtaagcctctctttcctccctcctgccagcctcccccactctcccatctcctgctccattcttagtacctgccctctggcttctctcgctaccacctttctttatatttcttctcaaagttttctccaaaactttgtcgtgagttcctggggcccatctgcccatccttattcctgagtggttgttcttggcccctttgcagtatttcttttatttttttaaacatggtctcagtcttgcctggttggagtgcagtggtgcaatcgtggctcactgcagcctcccaagtctcaggtaatcctcctgcctcagcctccagagtagctgagcctacagacacgtgccatcacacctggctcatttttgtatttttattagagatggagttttgccatgttgcccaggctggtctcaaactcctgggctcaagtgacccacctgcactggcctcccaaagtgctgggattacaggcgtgagtcactgtgctcagcccctttgaagcttttacctcacttgttttttgtcctttgaaatcctttcctctctcagcctttgggtcatgctggtttcttgattctcttcctgcacccctgtaaagataaatgtctgtcctagcttctgctattcacactgtccgtggcctggggtcccctctctagccctgacctgtctctcctgtgttctgctagcaggtccgttgtggacatgaatggcagcctgtaatctgcatttgtggtctcggagttacaggtttgcagactgcttgcaagcactgtcacattgagtcctcatgacacactggagcctacatcccttcattccccaggctgtcctaaaaggcagtttggttgggtagtttagcatacagactctggagccagatttcacatcctaagtattccctactggcttcgtgacttgtggtcaattttcttttgctctctatgccttggtgtcctcatctataaaactgggatcatagtagcccctacatcagagagttgaggtgtggattaaatgagttaaagcattggaaaaagtgtgccagtctattcatggcacattgcaaacactcagtgaatgttgctgtcagtcttgctgctcttcgttgccttgccggggtgccttggcctggtttgtagtggtctccacattcagcctgcctgtctgccagaccttgccatgtgcctggacactgtagtcaagctgaggggctgtccattccctgtaccagcccttggcccagtccatccctcaattttcacgtgtccaaatcctcctctgcttttaggacccagggccttggtcctgcagcactatttcttcattttgttttccttcctccccacacctggcagcaatgtccacattgatttttctccaattctcttaggttctgctgcattccatattgtgttgggctgtctctgaaaatatctcacctgctcgctcagcctgagcattctgggagaagtttatcttgctttttccaaaatgacaggcacagggagcctttaggccatggttgtccaatgcacattgatcttgtggaggaggagatgggatggggtgggcactcagggacggagcaggtggagggaacaggatgcacactgcatagaggtgggggtgcaacagggccataagtggacatggccgtaagtacttaggtctgcatggaaggagggtttgaattggggacttaacctcagggggagataagattggataaggtttagtcatctttgctgcaggggaacgttgagtactggcatgtaatggagagtggtttttaccttagtatgtgctgtccttttaaatagtgtaaactaattctttatctagcctggttaaagaaggggatggctggtctgcctaatttaatatttggctattgctctacccactgggttttgtgcatatactgaatgaagcattggcttgtatttattccttcaatcactgtttgaaatgtctgacctgggcaagttaattagcttctctgagtgcaaaataggaataataattattacgataatagcagctaacatttattgaacactttctatgtgccagcacatatgtgagtcacctttgcttattaactcatttaaaccccataacaactacatgaggcaggtactattatccttacttcacaaatgaggtggttttataaactgcccaaggtcactcagctgttatggcttggggcagaatttgtgctggtgaactccagagtctgccctgtaacaccctagtagattcctactgggaggaaacaccccgttatatcccttacctcactcagccgcaccatgccaggagcctagtaggctgacagcaattgggaaccagtcttattgttgacaaacatggtatgagcctcttttagagcggagctgcctgaaaccctccgcataagggatgcggacctggatgctacctgagcagcagctccaggggcttgtgaacattctcctcacatcctgttatgcatggctgtctctctggcctccccctgctttctctgcagcattgctctgacccaggccccctgtggctcagccagctcctccccaggcagctccttgtgtgagatgaaccttttaacataactcactaaccccacctcccaccctcatctagccatctgcagagctcctcactggggaggggaccttttcaaaggtccctcaccttcgtccttttctccctgaagaccaacgtccacaactttggtatatccacagtgttggggtgtgtgtgtgtgtgtgtgtgtgtgtgtgtgtgtatatatatgtgtgtgtgtatatatatatatatgtgtatatatatatatgtgtgtatatatatatatgtgtatatatatatatgtgtgtatatatatatgtgtatatatatatatatgtgtgtgtatatatatatatatatatatatatatatatatttttttttttaatgccagttgttccccaaatacatttagatagtaagggacacattgttttatgtcaagaacctgttacataaaaatgtgttatataatgttcaaatatatactgcacagtgaaattagataccactttttttttttcaaagaataaaaggataataaacacaggccgtcctgaatataattaacctcagatttgggaggcatggaaggacgtgccctgccctcagagctctcgtcctgagctctgcctttcttgagtgcgccgggagcaggatggatgggaagttggcctgaatctgccatggtgtggtactgtgagatgctctggaaattgtcttttttttttggcggggggtgggggatgccttcgcatcttgctcacttgtatctttctcacacctaagcagagggaagaagctctttttgccccctcgtacttagaccacccaggtcatcttttgaccagttttctgctctgctcaactcctttcaatcttcccagatgacaggccagctttgcctgctaagaacagccctggtgccagtggcatgcaggtggcacccctgtgtccagtcttccaggctctccagggtctggtcctgttcctcctccccagccctgcttccccgctcaacctccattcccagccacagccctgtgcccgaggttcagtcctccttgcctctccgctgtcctccctaggccacctcacttcacactctccctctggctagcggggtctttgcttaaattgttcccttgaggcctctcttccttgcccgtgcctgccttggatctcacttctctgtgaggtacctctgataacatttgttccctttgtgtgtgctctcccttttgctcttgattgccaaccattcattcgttcagaagcaggggtatgtcataatgagcaaattaccatatcatactgaatcaggatggccagttgtctcattttttaattgtttcatggttaattatcttacgctcacttcccactctccagtttcactcagttactccgtcagtgaagtttattggatgcctagcactgttgtgggcactgaggatacagcagtgaacaaaacaaggggcccgcaggaggggacagatgatgaatagtgaaacacgttcatgccttgttgtgagaagtgctaggagtgctaggatagcaagcaaatagagtaaagcagtagcgatgaggtatggtgggagggagggtaccttatctagatcacaggggagacctctctgaggaggtgacatttgaacttagcttcagaaagatctgggggaaagtatcccaggaagagagaacagcacatgtaaaggccctggggttgaaaggtgcttgatatttttgaggaaagtaaaggctagtgtgactcgattatgagctgcttgtgtacagatgttttctgcctcttttatactccctttaaccctgagcccagtgttaggaaggccttgtaaatacttacatacagaattatagcatttgtcattggttatatattataaaatagtaattttataaaataataatttatcataccctgcttagaaggcttttaataaaacattatattgcatataaacaaattaagggtttgaagggttttcttataaatgcactcctagcatgtttcaccaaatattactgttttaattgtgtttagtgcagaactttagacctcataattctgcttcatgtgcacaaccatcttaaaaacaggttttgttccaaaagtttatttgtaaggcactaggtggaaacttgggataaatttttctataagaaacaatgaagtaaatagtgatgtagtttctaggcgagccctcaaaagctatttagtggtgactgtagctgaaaacatactggttggtatcagcagtcgtcaagccttctgctggtagaccctcctctcagtagcattgtacctcatttgctgttagcaatcataggacccatttacctcagtcacttctcctactgtattttcagtctgttaaagttttatagaagggattttttacctttatacctttaagatttggttgcatgtgttataaatgagacagtagtgcagagagtggggaaaactctggactgggagctgggagaggcctgggctccagactgggcccagccactgactggctgagtaaatttgagtaagttatcctctttgaactttgatttctcaggttcttcttggctgtaaaatcctattgttttctcaccatagcagggaaacgtagatatacttcgttgttcaaacctgccctcaaatggctgcctctgatttcttcttgaagaagtatatggcactcagcaatgaggaactcaagcagttccccatgtgcagagctctgcagtgacattctcagtaggaaccttgattttgatctgctatctttcttgatgagttgaaagaaattttgtcccagaacttttggtccagataagatttctgtgttcttggccaacttatcttccatataattatgtaaattgttttttctttttaactcttagggataaaaatggtgactctggcttgcctgcttataaaatatagttataagtgcccttagggaatggaatgagtttgcaggagagagcagagctgaaagagtgtgggatcaaaaacaactttaaatgttaaatgcaaagctattttcagtaccctgctggaagaaaaaatttttttcaaggttttagaggatagaagaggtttttgctccaaagaagaaaggaacctaaggttttgcagtggtgaaaagtacctgatcctttaaccaactaccaccctcccttcccacctctgagttttgttttcgacatcatgaaccacatttgccatttgagaggtttgatatttaagtgacgttagtggcagagctcaactggcagtgttcaaatgacttaggtgcagagtgctgtgctgcaaacttccccagtgcattctagggtaagggatgcctcatagagagtgacagagcacttttagctctgcctctatttggtcagttgtgaatggtgtgttcctttttttccttacttgaaggcatagcgaggagttggtacaagaagttattgcttcatggacttcactttggagctagagggtggcattagacctagcctgccttcttggatgctggaataccagtggcaatgtcatctcttgttctctgctatacccctagcaatgaaaacagtgtctgtacagaaaagtctctcaataaatacttgtttattccttcaaaaagtgaattcagctttggataaatttttaatttcctccactctctagcagtataggcttatgaggttggtcttgcaaggtactttggagtttaggttgccatttctttttgacatctgtgtttttcttattcttcaggttggtcaggtatcagtgtcttttactgatgatggttgtccctgccctgctgatgttcatcttctgttatctttaattggctccaaactgcagcaaatctatagctgagccacattaactaaaagaaaacttgttgcatatttatttaggcatagtactacacatgtatttattcagtcaacaaatatctgtgagtctatatgccaagaatgttactagacccaaaggaagagcagaaattgttgttgtgaccaaggagcctgcagtttgattgccttgtggaacatctttatgagcattgtagaagggaggaggcttcatagaactggtcaggttttcacctttaaggatggtaggatttcgattcacagacaaggtgaggacaggtatttccaggaagtggctgagcggaaacagcataattaaaaacacagaagtaggaatggaccagtttgcattcatggacacagacttgtctaaaatggaaggttcttaaataatggtgggaatttaagtatggaagatcactgaaggcccaaacctgaagccattttagacacctagtgacttgcctaaagtgacagctgataagtggtagatccaggcttaaaataaggccatgggagctctcgaccactggcactggacttggctgtttcccagcagtctctagatgcaggatttgggtttgattggggattttcttttttctttctttctttctttctttttttttcttttttttttttttgtgatggacactgagattgggggttttagagtcatgagctggaaataggcaaggctctatttagcccactctttcattttgcagttggggaaactcagtgaggttaagtggcaagtcggagtttacctagtgagtcagagactgctaggcaatggataaccactggatttgttttattatgattatgattttagtgacatgaaatatttctctctaaagcatcagtccagtgttagtgttccagttggattggagcaatgaaggactaaatgcagcagagacctgacaggaggctgctagatgaatccaggaaggagagagagaagccagaactgagaattaattgtcaattatgttaatcagcatggtgttatcagtcaccctttagatttctagagtgcggtgaacatctgcctgtgtgagtggctttcaagtgtgtgaatctgcactgtactgtgaccaagataccttaatgaattctccagacagaaagtgccactatggaagtcgaatgttttaaaacaaatgcccacattttctggaaagagcaccagattaggagtcagatgacctgcattttaggctgcttctgctgcttagtcaccatatagccaaagcaaatcacttaatgtctcaaactgagcctgactccttatctgtggaacaggtataacaattcctgttgagcccttttcagtgtatgtgtgatgcttgtgtgagctaaggaaagaataggcattttgaagctgtaaagttgctttctggctgcagggagcagcagtgcagttttaatagtgaagatgtactggcccttacaggaatagcctaggagaaccagaagaaagttcccctacctccagggcatgtttagggaatctggcgctgtccaccaggtgggtgctgatgtgtactactttattggatagggccatgttttttgtttatttgtttgtttttattatactttaagttctagggtacatgtgcacaacacacaggtttgttacataggtatacatgtgccatgttggtttgctgcacccattaactcatcatttacattaggtatatctcctaatgctatccctctcccagccccccagcccctgacaggccccggagtgtgatgttccccgccccgtgtccaagtgttctcattgttcagttcccacctataagtgagaacatgcggtgtttggttttctgtccttgtgatagtttgctcagaatgatggtttctagcttcatccatgtccctgcaaagaacatgaactcatccttttttatggctgcatagtattccatggtacatgtgtgccacattttcttaatccagtctgtcattgatggacatttgggttggttccaagtctttgctattgtgaatagtgccacaataaacatacatatgcatgtgtctttatagtagcatgatttataatcctttgggtatatacccagtaatgggatcactgggtcaaatgatatttctagttctagatccttgaggaatctccacactgtattccacaatgattgaactagtttacactcccaccaacagtgtaaaagcattcctatttctccacatcctctccagcatctgttgtttcctgactttttaatgatcaccattctaactggtgtgagatggtatctcattttggttttgatttgcatttctctgatgaccagtgatgatgagcatttttttcatgtgtctgttggctgcataaatgtcttcttttgagaaatgtctgttcatatcctttgggatagggccatgttttaaagatgattacatttcacccccgtaagcctgggcatggacggaaaagttaggcatggatagccatgtgaatctattatctgtagacacctttcaggatagtgacaggcagctgtgaaccagaaaaacaagtgtcagaatctagccagctggccagtctggcattcttggatgtttcatctgtcctggggcattaggcagcgatccagaggaaccttgattagcctgggggattcatggctgagccagcatgctgtccaggtaatacctggctgcaaagcctgactggagatctgccaaatctaaatttctgccagcattacaagtgtatatattattattattattattattattattattattaatagcagtatctaaccttgactacctaccatatgccagcaactgtgctaagtgcttacatactttttctcattcagtcttcacagtattcatataaggtgggtaatgtcagttctgttttctagttagagagactgaaactcagacgagcttcagctgatacatactaagtgtaaaagccatgattcaaactcagaacagtctcagtccagtgcccagctgcataactgctatgttcttctttctctcttttcctggtacctgaaaatacttcttgtctctggttttgaggtttctgactgtgttattggttgatggatgggttgccacacagaggctcagctcagcacagctcttttttcttcatagcttatgacggacatcctcctggatactctggctggtgagcaaatgggtgccagtggtgaatgcagcagaaagactaactcttgccagctagtgcatgtgggtgaattttaaagacaacaaaagaaatttctgtaggtcagtttttcaaagagtaactggtagcttgtagtctacttaaaggccaagtttgatgttcatcaaagtcaccctgtaaaaacctttccaaatgctgtgattctgataacaataccatagaacattcctgtgtaattgacaagtagtttttacatacaatgtcttgtttagtcatcatcacaaccctatgagggtttgcaactacatatagttgcaaagaagactgggagatatctttagttgggaagccatgagtctagcaaaatctctgtttttaagggtggcgaggggagtgaatgaggggagctagcaatctgatgtgttgtggtggtgatggaagggataagtagagtttgaagctgttgtcagtagagttgggaggatgcctcctagtctatgacatctcctagtgttatgacatctcctcttgtggactgggaaattgcttagagtttaagcaactgtccagggttctacaactggtcagcggcagaggcagcacttaagtattgcttttgtgacttaattcactctctattcaagtttcatctttgctttctctattgaagttcttaaatattctgattcactgtatttagaagtcggcaggaattattaaagtgaacttctttgtggtatacactgttactgaatcagagtaaataaaaggtcacatgattggttgttgtgttaggtttaattgacgtgtactctgtatgatacagaatactcacatatcttttgtgggatatcattggtccaacagctttaaaaatcccaaggctttaatagatgataaaacacggagtttgtgtaatttcttgaaaaagttggccatcgagttcttggtcaggaacacaagcttcaattgtaacagtttccatggagacattagccttggcttgcatcatttcagctttcagtgcctttcctaggaatggagtgaactgctaaaagaagagctctggttgtggttgtcacttagagctctctcccctactgtttctgctggaggctgatttgcttttctgggtcttctcagttttttctgtgacctaagcataaattgtctttgagatcctggtaatctcatattttaaaagttttccacaaaagacaactgaatggaacacttttttttttcacccctttaaagtatttaattggccatcaacggtggctcacgcctgtaatcccagcactttgggaggtcgaggcaggcagatcacgaggtcaggagatcgagaccatcctgctagcacggtgaaaccccgtctctactaaaaatacaaaaaaaaaattacctgggcgtagtggcgggcgcctgtaatcccagctcctcgggaggctgaggcaggagaatggcgtgaacctggggggcggagcttgcagtgagccgagatcgcgccactgcactccagcctgggcgacagagcgagactccatctcaaaaaaaaaaaaataaaataaaatgaaaaataaagtatttaattggtggcaaggggctttgctagaagaatggacacctggtctcactcaagcttcttgtattagttgggataccaggtgagtccctctgttaaagagacccacaggcacaatggctgaaaccaggtagaagttttctctctcatgtactagtccctagtagatagtggtccaggcctagtatttttaacacatggcttccatttgatggttgaaggtaaaaacttaccatctcccagaggaaacacccaagggggcacacatccagtcatttttaagggaaagacccggaagcagcacattctctttttccagtagccggaatttgcaactacatatagttgcaaagaagactgggagatatctttagttgggaagcaatgagtctagcaaaatctctgtttttaagggtggcaaggggactgaatgaggaaagctagcggtctgctgtgttgtggtggcgatggaagggataagtagagtttgaagctgttgtcagtagagttgggaagatgcctgagtcaagggtgagaatctaagcaggcacacagaaaccagggcatgtgcagccatctagaggtcagggaagctcttggctctgaaactaagcagtggggggcacccaggcatggaagggaatgtgaattactcagaagacattaggttgtcagtaaaaggaaattcaccagtgtgactgaatcagtagaaagagcacttagactaggagtcagaagacctaggtttgagtccagcccttttacttcataacctggggcaaaaaactcccataaatatttgctttattatttagataatggcaataacagtgatggcctttcctgcctcccaggcttagtgtgagaccaaagggtgaggaagtactgtgtagactgcagccccatggagatgtgcacagtgtctgcccagcccagggcctgccatgggtgtatttgttgaatgaagtgtgaactattaaaagagttgggaaaaatgcattatactaaggagatcttaatcctggacagtcttctctaccaggcagaaaggttctgctctccactggtcaaggccttgggcctatgtgtaaaactgggtacctaacaaacacatgggcagacgcctgcagctccttactgggtagcacatgacacatagtatgtccttggcaaggccatttgctcattcctctgtgtaggtaaccaagtgcaacagaagtggaggtatagcccatgaatgtgaactaatcatttttaaatgatttggtccatgggcaggttagaagatgaaaccttcccaaggccaccaaaacttgatttcttgcttgaaaatgataagatgcagttataaaatgcttctgttgatttggaaaaaatgtgtgacttgttcaaaacaatatgtattaatagaaaatgtaacataaataagaggatacaaaaaagagcttaatgtttctatcttctgggcctagcaatagtgatttttttttccttttggtaggaaaatgggggctcagtggaataatcagttttatttctttttcttttaacttcatgaagggtttgtattgttcattttgttatttaatttgttcatttgctaaggaaagaacttctttcttggaactctgcggagtgtttttagatggactttactggaaaaaaacaggaattgaaattatattcacagtgcgctctaaactcttttaaaatctcatgcatggatggaggaaaatgcactgaaatatcaatagtggttctcacctcatggaattagaggtgacttttattctcatctccttctctgtggtttcctatttttcaacgagtgtgaattacttttatcatcatgaaagaccagttaaaaattaatctcacaaattaacactctcaagccaaaccacgaatttttgtttttcacaacctggcttggactataaactgtcacactatctcagacctatgcagattcttttctgagtgaggcattgaggaacttgttataaagatgatgctttccttctggaaatcaagaaacaagccaagggcttataatgtgttaggaaagatgtcctgagtaactttcctcctggaatctgactagcctttattacagctacttaaggaaatgagttttgtgggttccctgttcactgtgtcaccatttttttctttatcctgtactcatatgtacctcagggtccccagattttcttatcctgggattgcatgaccttgtccttggctctctcgggcccctgccgtttccagtgttctctgttcatgttcacaatattgttgatttggctgtggcttcttcccgcagtgttcttgtagactgaagagagcacattgctgcccttgtccctgtgcagcttcctcttcctctttatcattgctcaggtgagtggcctgagcagtgctcctgggatgaggtgaagagaagcagtcaagactgcagggaagggctaggggtgctgagctggccgagcttccctgggggaaggcactgggccatctgtccagcagcagttggcccacagctggcagggcaggctcaggagtggctcttgaagatggctgcttggtgtttgaagacagttcccagggcatgcattcatttgttgagcaccttcaatctggcagcctgtgttctagatgctggctgatgaccaaggctgacatggctttggctgtcatgggagtttcattctagtggtagagggagagagagagagacgatgtggtagagggagagagagagagacgattagcaggggaatcaatgaagaagataattacaggttgtaagaacagccccagaggaggttacaggtgcctgtttgtcgagaagtgggagggccagagttgggataggaacctatgtccctgattgcaaggtctggctccttctgtgtcctctgggctttctggtgggaagggaggaggtggaggagaccccttgcgagggccgagcttctcccattcagccagtctggaccagcctggggccttcagatggagatagcaaaagttgagggcataagctagggactggctctcttggtcactccagttgcccatctctgtacttccccaggtgaatagccatgttttttaaagaacacggagcaaatttgcatacaagagtccagatttatgcatgctgcagctttgtctgaaggcaagcttatattttctctcctattattttcaacttttaatgagttaccagcatctcagtgcccctccagcaaggatattgggctggtgttttcagggaacaattttaattaactcctccttgcctccctctcacccagccacccccagtccccttcctggtggctcagagtctggctttggcatgcaataagaatatttttgccttggtgttagcctttctgaaactcttgattaccagtgctcacaggacctttctgcagcactgtctgcttggctgtggactacccagaggagcttggtgtcaggcaaacttaggcgatttccctgagcatccttgttgagtctgcctttgtacttctttgtcaggtctagaggcttggccgtttgtcctgctcttttgtcccctccttctgggaaccctcaggaccctcactccatggagactcagcacccttcctcctgcaaacatcagtgatggggctttcccagccctttcccctatcttccttttcaaagaacaaagcctttgaagcttgtctcatacctgtctgatgcagtatgggaatctgtaagttctttgcctcctgaaggggtctggggaatcacttggctttcagagctttcctcgctcctctcccacccacagaccgattttaaccagagagtaagtcattcatgctgtgcttgaatactccttccagtcccactaggaagactctttgttactaaattctgttttcttgggaaaggggagcttattactatctcattttgttggttgttattaccctcctttaaaaatgtatctacatacacgcatgtgtgtacctacatgtttctatatttcccttgtgaatgtggccctcagagggcctggatttaaaccctgggagtggtagtgaccctttgggaaatgtatactttttgttccaaatcttctctggcttaaatttgtgaagttttgtttcagccttggtttcatagtttttcccagtttccaagataagtttggggctcactgtaatcagcatgtaaaggagaatatggccatcagctctgccccttaaattcatagtcagactcagtggggaagccgttcctgtcccatcttgcgctcgtggctctgtcagcctcaggcagctcctgcaccgtcctcctgcctgtgacagtgttgtcaggagttcttggtacctgggtgctgcttggcctcagggtgccagggctcccatgtggagtgtgcttgctgcagtctctacagcccaggtgtctctgcagccctcctcttacatagccacagcgtggtaaagtacatccagtttgcgctgtagtaagcaattttattaaaaaaataagtttaatatgtaagtggtcccttagttcgtttgaatggctcccctctctggctttggtttgaatgagctacacctggctggagccctgctgctcccctcagcatggagtcacctccctgtgctatggaggaaaggaagaagttattcttaccttggttttgagacaagacaagcctggagaaggctgtagggatgaaggagttgcccatttgtccagcatcagttgagagtctactgtgtgcctggcatcataggaagcctctggagtgctgtgagcaagaaaataatacttgatttatgtttttaagggttcttctcgctgcctgtgggccggcagtgaggaggacaagagcgcagcagggagatgggttaggaggcagttgctccggtgcagggagcagtgccagcttgagggctgctggtgggtattggtgtgagggtgggcaggctgcagataggccttcgcccattgcccttgccatgtgtccccatgtgtccccaggggaggctctgggcatcccaaactgtgagcctgccctttcccaagtgtgctaggccctgccaagctcctgcttcatggcctatgctgttcattccatctggaatgctctcttccccctgctttccatcctagctgagtgacattgggcaagtgaccagatctctcttgagcctcaatctcttattctgtgaaagagtgctcatggaacctactgcatgggaccatgaggataagactatagttgagtgtggtgattgcagtagcctccaaagctgtctcctgcttccaatttcatcccgctactgtgcattctttacacagcgatcctgtgaccgagggtcagatcagggcaggcctctgctcagaatcctctccacagtagcttcctgtcccagtcagaggaaaagccaaatcttagcatggccctcagagcttcctggtacttctgacctcatctcccaccccaaggccatggtgtatggttgatcatgctgggttctgcacagctcattgtggtgcatgtaagtggcactcacttcctccccaacttatgcattgcacaacttgtgcagctgtacatgctgctcctacctgcgcctctctagctccactccagccacagtggaatccgtgttgttcttcaaacacaccaggcatgcttcctgtttaagctctccctactgcctgctcccttggcctggaccattcttcccccagaggtgtgtatggctagttagctcaccttcttcaggtcttttttcaaatgtcaccctatttaaaattgttccatctgggtcactgccccccaaatgttccctttttcccttgctctttatttttcctcctagcacttatcaccatctaatatattatacgttttccttatttatttggtttatttttatttatttatttatttctcaacagaacataagcttgatgcaggcaggcaccagtgttaattttgttcactgctgtatccccagtgcctggattggtgcctggcagtaggggttcagtgatgcatgagtgaatgagtttggatgcacaaaggtaaagtattgggtacggtgcttagcacactggaagcacctaatacatggatgccagtattttcattgtctctgttaactctccaggccctggctcaaatgtggctttctctgagcctttctgcagtcccttctcaggctgaattaagtcaccaccacctgtgctctgtgttccccttcattttgccttctctgtctgctcggcatttatcacactgcagtagtgggcttatctcacactttttcctgttccaattgcaattcctgtggggcaaagactggcctgttcagatttgtatctcaggcggtctgcgcccccagctggcatgtggtaggagcttaggaagtgcttgctgctggtggctgtgggaggtggaaagagctttttaatccatcaggacccttacaagggggactggctccagcatcactgccgtctgatgtttgtgccccctcccaaggggtgtcaagggagagcttggcaaccacttaaatgagagtctccagtggtatatttagagcaaattttggagagaggagtctcttggataacagcatctgggtgacctgattgtttcacatataagagtttggctttttggctactcaggctttgagaggttggggtcattcaagggaggcagtgtaatacccatgtgttcagaggtggctgggacgagagggtgcaggagaaaaggcttgagctggcctgtaagggatctgagttggtgaagggagcacagcttctgggggtggcagaaggaataggagagctgcccctgccatacctggggaggggtggttaggtaggtgccttgggaggcatggttaggtaggtggtttggggccatggggggaaaactgtaatgccagggcaattactttggcctcttgtatttggcaggaggggtccacactggggattgtggtggcgtgagggagagggccctgggagagaagctctagagtcattttcttttccagaggtggagttgtcttggggacctgcacgtggcacgcagagcccatgctctcaggcacctttggggtggcagagtttcaactgaaccaacagaggacaaggggctgagaagtcggaggccttggctgaggtgcccagtttcttggttcactttctttacctgccaggttagcagcaagtgagcaaatccctcctgcctttgctcagcattagcctcagagacttgaggagagctgggccttcaggtgggagcctggtggccacactggagaggaccaagcttgacattgagtgtccgaggggctgaaagttgttcgctcatccagagatggattcgttctgcaaacatagggaaagttcccttcccattcctcatggctgtttgaggatggaattcctgcattgaccttggcctttccctgatcttggcctttcccctgcactatggcctctctactcttaacattacgccccagcccttttccatgggcccctcgtcttccctatggccatctaaaatggccgtataatattctatcaagggaatgttttcagtaagccatgagcttgatatggagcatttagattgcttctaatttttgctctttcagctaatgctacattaagccatctctgtgtattatggaatcatttcattagttggcatttgtctagctaatggcaatggcccaagatttaatagcgaatcagaatttcttttttcaagaagaatgtcatgaggatatataaaaaatttacttaaaatgctaggaatcatctatgttggggttttcatgaatgaggaagcagggaaacagtaacatgaaattagttgtaagtgaaagactgtgtgtataaaagtaactcgtgacttgtttgttcctgagtgtggaggggagccaataaatccttggaaggagcaatctacctgtgaaaatcaaagagatctgtattcctgcatctgatgaaaacataacaaacagtgatctcttcttaaggatatttttagaaatgccctaaaacaagaaaaagtaaataagatttccgagaaaaaacatgtctccttaattccaaatgagcctctctggaaatgccatttagtagtggaagcaggttgtagacttgctgaaaggatttggttctttggttattaggaaataactagaatgaaattgacaaacagacaacactgacttggtccccagtactgctttgagcctgaggtatgtgttggctttggaatgatggggaaggcttcctctgacttgctgatttgttgtagttgttgttgttattgttttgagatggagtctcgttctgtcaccaggctggagtgcagtggcgtgatcttggctcactgcaacttctgactacctgattcaagcgattctcctacctctgcctcccgagaggtgggattataggcacgtgccaccacacccagttaatttttgtattttcagtagaaatggggtttcaccatgttggccaggatggtctcaatctcctgacctcatgatctacctgcctcggcctcccaaagtgttgggattacaggcatgagccactgcgcctggtctgttgttgtttttattgtttcagtctctggtggcttattatgtagacttgggctgtaagctttgcatttcagtttaaaccagcaaatgtttacactatataaggttgcaagggctaaaactttagggagaaagaacccagtgcacccctgtttctgagaagctcatgaccagggagtgggaaggataaagcaatgttaaaaccaatggttattcaagggagattaagaagggggccctgggagagtcagctccatccttttagagaagggaggagttctacctcactgctgggcagggtggggctaaggggcaggagaatcaagaaaggttttatggaactagttgcatttgtcaacatcttgaaggacaggctgaaatggaggctggacattctcagcaaaggtaaaaggcctgagtagaggagatggagatggaaggacatggggcaatgtttgggatttggctgaagaattgcatgcctgtagtaatggtcatagtagcactttatggagagtatcaggtgccaggcatggttctaagagctttatatgtagtaactcacttaatccatgcaatgaaccaaatgaggtactgttattatccccattttacagatgaggaagctaagataaatagcaaggaattaattgcccaggatcacactgctgtggagccaagatcagaccaagttcatctggctccaggctctgtgcttacgaccatgaagctgtcctgtctctgatttggggaaagaacagtcactagaatcagacagatggacagatgccgtatgtttagaggctgggattatcaacattcaggaatgcagaggtggaaaagagaccagagatggagatgaggggcattggagaggtggggatgggaggagggtttggtgagagccgtgaagggccacaggaagacagagctttaaggagaagtttgtcagtgaggcccagagctgcagacaatcccaggaggtgagacctgaggaataggtctgggctgaggagaaagctgtgagggcctcgggagaggggcagcagggtgacccaggctggagctgctgtggtgtcctatcctggctgcagagtgctgcgtgttcctgggggatcatagctgttgatgagtatcactgtccctgtcctcttatctgtagaaagaggtgagtgtgacagagggggcaggtgagagctggcactgctaatttggcaaacctggtgacttttctgcagcctaatgatttttgaaagctgtttgctatgctgaggcacaagtgtgacttcccccatctaaatgctgtgcaatcgctattttccctggaaaattgggcccatgtgggctctgtgtgtggtttatttgagttccatttttatagccttattaccttgtccccatgatgcaagaggcctctctcttttcttgagctttgctgtgaaaattgtttcttaaaaggcacaaagtgatctctcgtcatctgggtggtgctcgctccacaagcagcacttttctcagactccgcacacacttgtcatcgcccctgcccccacttggcaggttcctctgattgttggcaatttactgagaacttttaggcagctcttgaagctcactacctatgtgtttgtcttgatttcttccggaagagtttgtgcatgtaaatatccattcagcctctttctctccgagatgttgccctgccactgaccgtgcttggggctgaaacccagtcttgtcctctggcctcgagctgattaacaatagcagtcatcatgtacagagcctgagtggttatcaggcactaagctaagggatttacgttcgtgatcttaattattcccaatttctttgaggtaggtactattacttcccccattttacagataaagaaaatgagccttcaagggatagagtaagttaccccaggttacatagctagtacatggcagagctgggcttaagcgggcctttctaaccttagactccatgtgctccattcattcattcattggcaacaaatgattgtctgcaacaggctgagaactgttgtagacccagggtgtacagcaaagggaaaaaaggccaaactcccaccttcagcttatattctaacttggggaggtagagatcatataataaatgacatatacattatgctatgtggtaatgagaactatggagaaaaatgaagcaaggaggtcagatgggaagtgggaggattttgaggagtggtcaaagaaggcctcattgagagtacaacaaattgttaggttaacaaacaaacccccaaatctcagtgtagcaacacaacaaaactgcacttctctgcagaaaaaattccaaagtggctgctcctggttagcaggcagccttccttgcagtcatccagggacctagactccttttatcctgtgtctctgccttcttcaagggccttggtttcctttgcattcaaatgctggagcgtgaggaagaagaagagagggtagtttgtgaggaaggctttatggaccagtctggaggaagcatacctccctcccacccactggccagaattcagtcacatgttcactcctgactgcaagggaggctgggaaaggaagtctggccatgtgccgcctaaaaaaaggaagtgggttctggtgaactcatggcatggtgtgttgcagcgagtgaggtgaagaagtgagctatgtgtttagctggaggaagagcattttacacaaaaggagcagcaagacaaaggctgctggaatggagtggggaggagagaaggagagtgggagaagatgagggcatggagttgtgggggccaggccactggggtcactgtaaggatttggttgccttgggaatgacaagcagagccagaacatagagttttgaaggaggaacgacaggatctgaggcacgtctcacagggctcactctggctgctgtgttgagagtggactgagggagcaagggggatgcaggggagaagcgggcgtttgcgggtgttatccaggtatgtgaccagaagggctggccctgagccggggtggtagaggtggggagaagccgttagatttgagatcagttctgaaggtgggccagcaacttttgctgtgggattggtagtggggcatgagagaaagaaaggagtcaagattattctgaggttttggctttgcctaatgagtattagtctcacttcctaccctcagaagcaagaggggaaattttttggaaaaggatatctgagtgttctctgggccctgacctgtcctccataacctctttcactctgtgatacttttttcagcacagatgggcaattcccattcatgactaggctttcagacatggagagggcacttggagtccctcctggcacacagcagaggtgaggcagcactgggaattgtctcactttggggtctttgggtcaaaccttgggacccctttagagtgacatggcagggactgagtgtgccctctaggggggtgagatatgcctactggagtccacttccaatgcctgccatctgcaaacactggtgaggccctggctgaagggtaacaacccacaaaagtgcacaaaaggaggaagttctggaatgcgagttgatgctgccagcggtccggttggctccttgccttctgttctttgtgtgttgacatcagacctctctactgcagacaggctgccctacctgagggggcacagctgccagcagcctcagtttacaatcctagcaaaggaggagagcctttctctacatctaggtatcagtttaagggaaaagcctctgtgtttgagagtgggagcggaaactgtttcccacgtacttccttggcagtcatgacctgtcaaggctgaaactggagatgggactttttaatagaccatgatctcactgggagcatatggggaagaaagttcatcttagagatggcagggcgtgagctgtgaaaacagatagtgcacacctactagatgctgggcccccgctaggtattttatttcactggagagcaaaacaatatatcatccctgccctcatggcacagatggcctcaagtggctaaaccatagaatggctagctgagagaaatgatagttctttctttttttctttactgattgcgaatggggttgtatttttaattttggtatccatgtgttcattgctagtatatagaaatccaattgatttttttgtttttatgttgtatcttgcatgtttgctaaactcactaattagtcatagaaatttttttttgtttattccccaggattttctgcatagacaattgtatcacttgcaaatagggattgtttcatttcatcttttccaatctgtatgttttttatttctttttgttgcctgattgtgtggccaggacttctagtcctatgttgaacaagagtgctgggagtgcacatccttgccttgttcctagtcttggggaaagcatcagcctgtcaccattaagtgtaaggtcagctgtggatttgttgtagatgccacttgcactttgctggcatggttgtgagtaggactgtgggttttgtgtgtttgtgtgtgtgtgtgatgtttggctgaaatacagtggttattatctacaagttttctgtcttgaaacagggagatttgttggggcattttctctttgtgctccttggcatttctgagttgctggtctcctcagttccaagtctgagctatatgcagaaaaggaaatgcaggaagctcaccactgtgttgttccttggatcctgaggtcccagctggtctgccttcttcagactgccatttggagtcttcttatagtcatctagcatagaatgcccaggggttttcattgttcttagcaggtggaatcagggaaagtgcacctgctccatcctgctgggagtggaaatggttgggggaaattggagcgtataggtcggggctagtttagatgcaagggctccgttctgtaggtgcaggagggccgtggaggctcagccctgacagcagtgggagggggatgggaagagggggagtggagagagcctaggtggctgctgcctgtgtccaggcaggaggtcctgaagtcctgaggtcctggccgtgacagtagaactgcagcagaaagaaggacaggaagttccatgaggacagtgaggaagtgcaaggagaccaggttggtctgaggtttctagctagagcagctagctggttctgagataacagagacagagggaggggtctaagcgtggcagaggggtgtattctaggcattgtagagcagatctggaagactggacttactgtgcttcccctcaggggaggcttcacagaggaagtctggctgctggggaaaaatccagggagtgtgcattctgggcagaggaattctggctgctgggtaaaaatccagggagtgtgcattctgggcagaggaaacaacgtgggaaaaggcacagatacagaaaacggcgtgatgggcctgttgggactccagctagctgaggcataagtgggtagttactggttccatgactgggaaggatgctgtaggagtgcacaaaaggaagaagttctggaatgcgagttgatgctgccagcggtccagttggctccttgccttctgttctttgtgtgttggcatcagacctctctactgcagacaggctgccctgcctgagggggcacagccaccagcagcctcagttttacaatcccagcgaagggggagagcctttctctacatctaggtatcagtttaagggaaaggctctgattggcccaggttggtgatgtgcctgcctttggacccgtcactgttgcaagggagtggagagttctaatctaggccggatcgtctgcccacccctgttggggcaaccagagtcttttaaaggagaaggcagacaaaatgcatctggggaagataaaaaagactgtttaccatggcttactgtaatagattttgaagaatatgtagtctggcagtgcaggaactcttcatggagattaaagcaggggacttgatcaaagttaggttttattaaaatcattctggacactgtatggggttgtgattggaagtgaatgacaagaggtgtcaaggcgggttcgtaggccactgctttagctccaaggagcactgatgaggcctaagctagcttagaatcctgacttactttgtttgcacttcacctgtagcgacagcatcagtgaggtggagaacagggatagagtcctagagatgttagacaggcaagacttggtggccagatggaggcaaggagaagggggtcttatggaggattccccactgccaccaagggcataaagaatgagtctctggagggctagccttatctttggaaacactattaagtgttggcagactcgatgtaccttattgcttcttcagaagtgttagtgttgttggcttcttgtggtatccagctggaaaaggaagctgattgattgcatttccctccctttaaagagcttccttttttgagaaatcagaagataggtgatacagtcaggactgccagtggagaaataggttggggagagggagacactggcttggagactctcctgcccccagcctgccccgaggcccgcgagtctgctttaggcacattcgtccttttggcatcatccttgctgggaaggcttttaagggatttaaggaaagaaatgacacaatctgattcatattgcaccagatttcctcctctgttcagaatagactatgggtggaggtagagtgactccaagagtagcagcagggaagcagggcaccaattaggagactgtcgcagcaatctaggatggggacggtggaggtggtgagaaatggtcacattctgaatacattttgaaggtaagaaccagttttagtgaggattagatgcggagtgggagagaaaggagatgaaaatgactccaaatttttggtctgggcagctggaagaacattgtcttaaactgaggcggacacaacgctgggaggagcacgtcaggggtctgtgttggacatgtttaagtttgagacacccaccatgtcttacacaaagctcccatctacttcttacttgacacaaacagttggatgtactggtcaggagttcagagcaggggtccaggcttggagagaaatctgagcattgttagcatggaggtgatatgtgtgaatccaggagactagttgagatcaccaagggagtgacagagaagagatgaaaacaaggactgaacacgctgacataagaggtggggagatgagggagaataagcaaagataagccagtgaggtgggcggaaaaccaggagagctagagggcatgattaactggtgtcaaagctgcaaggtaaggactgagactttaccaatggatgtagcaaaatgcaagacaggccaaatgcatatgctgttggacctaagcttaactttgcaaataagtcatagttccttcccagaaggagaatataattttgcaaaaagggatcatttaagatttattaaaataaatctgagaaagatgtgaagatagtaccgtaggaatccagcagaaggaaacagtgcttctggcttttgtggggaggattgagtcagattcattcataccttcattcatttgtgtgttcattcatttggcaaaaacttattgggtgccaggggttgcggggaggagggaagagagagttgttatctagtgggtatagagtttcatttttgcagatgaaaagagttctggagatggcttgtggtaatggttgaataagaatatgaatgtacttaataccattgaactgtacacttaaaaatggttaagactgcaaattttatgtgacatgtattttctcacaattaaaaatggagagagattaaataaaaaacagagcactttttggggccccatcatgaacttggtctgggatatgatgtttgaaatggatgcgccatctcagtagatggaggtaatgtggagaagagtggaggaagacgtccagctcagagggttttgggaactatcagtcctgtttgtctggatggtagggtctatcgggggaaaccatgcaagctgagactgcagccgggccagttggtgcaggcccagcatcctggctgtggatttgggcctgccttcttagattctgggagcctctgatggtttctgcccaggggagtgtcattccaaaggtgtgtatttagattaatttcattagtccttcctgttaaaccattgcctattaaaagcagtggggttgaggcattcatttttatggtgaaaattctggcctagcagaattttagatatccaagcatgtgtcaatgaagtgagtaggttatttttccatccattttacaagtatttattgaggatcatctaagtgcccgtagtgttctaggcagttgggggtatgggacggggtgaatttaacaggtctcttctcttaaaaagcctacagtctagagaaaccccctctccttcctaaacaagaagttatgccacaacgtgccatgtgttaccataggcatgccgccacagttccatgggtactgagaggagggggtgcctggcctgcctggaacactggggaggcttacagggaaaaactgtccaatggatttaaaggacaagcagggattttctaggcaaagaagcagaatgggcatcccaggagtatggtaaatcaaaacttattgggtgctatgaatttaaagctaaacttttatttcattggcttttaggtggtgctggctagagtgtatacgtttggacccaagcttaacttttccaatgtggaatcctgggccttcattggtaagtttgtttgatgccttcttaccaaattatgctatcaaggattggtatttggaatgaaaggcaaggtagttatcattggcaagttctctgtggaggttaccagccctggacctggagaagcctgtagcacaggctgaaggggtacataggaaaagtgaaatctcactgtaggtttctgtggtagatgcagagagggaggccagaggaggggaaccaaggggtgcgggggatggatgcagcgggccttatggagaggtggagctttggctctgttttgaagggcaagctagattgaaaaaagtccggggaggagtgaaagaagattttcgggacttgagaacatagaggtgaggtgtaaacaaagtgggcctagcagcagtcccataggagcaaaatcttcatcgaaaggagtcacgggcaagaactgtggtgggatctgctggcgtctgatgattctagtccatcagcaaactttttctgtagaggaccagatgctaaatatttttggcttcgtaggccatgtggtctctgtcacagctactccactctgctgtggtaacatgcaagcagccatagataatatggaaatgaatgggtgtggcagtgttccagtaaaactttatttacagaagcaggtggtgggctggatttggcctgcgggatgtagtttgccaactccttttctagaccctaaatgcccggctaaggcacatagactttatcctgaaggcagtgggaagccattgaagttattttggataaagaagtgaagtggcagaagtgatgtttacattttaggaacattcatctgatagctggacaagaggcatgggccccttttggaaggcagcagcagtcatccaggcatgaggtcttgcggtgaacagtagtgaaaatggaagcaaaggatcaatggaggagatactgcaaagggagaaccaatagcgttttcagtcttcttagacttaagaggcaggagtcaaagaggatgaaagtttaagcttgcttgtttacggtggtatctttgacagaaatgtagatgttgggggtggaaaggatagctgatgcatctggttttagatatgttgaattcaagataacagtggttcatccataagaaatgtccagcagagaattggaaatgcagggctgaagcctggcctgagaagattaagtctagagatgtggaatggaagccataggattaaacacggtctccccaagatgagcagtgggctgagctgtggggaatatgcgtaactgtgggacgggaagacgatggaagagacccagaggccatggaggagagtcccgggaagggaagagaatggggcagcagagaccagggagaacggacctgaagggaggctgctgaatttgtgacaaggtctttgcagatggccttgagaaatgtaatgtcacaagaggggaagggaagaggaagccaggttacatggagttggacataaatgaaggataaagaattgagatgttacaaaaatagaccgctcatagaaggtttgggtagtaaaagaagggagacacataagatttagatacttgcttgtcagaataacctttgctttagctttgaggcaggcaaagcatgctgtgaccagttttcatttccttctttggagccaagctgtgtttgggagtttgtgtgtaccttgggcttgtgattgtgttcttatgctcccttttgaggtgtggtgttcgtaactctgccacaacttgcaccacggaatccagcccgtgtttggacccttgccatgagacaagatgtgatctgttggggaagtagttgcatttgtataagttggaggagaaagtagagtggaccaaaaattgaaataaaccttcttactacagagtctatccaagtatggggacttgaggataattcctccagtcatgatttaattatgtatcaatttgtgctctgagtattttgagtgtaccttctttggtttgaattctaagtagtttttgacttggtttgtgtgaatatagcagttagagagctggtaacaaaagcaacagttgtaactggtttagagccatgatttattgaacactcattatgtactaagtccagtgctaagtgctattgtgtatcatcccatttcatctttgcaatgacctatgtggggggaattattaatagtattcttatttcagccagaaataagtcatagatgagtaactatgcaaggttacaagggatttgaacccgggtctgtataatccctggcttatgctgcttcctactttatcttgcctgtgtctggaatttttcctcctactaatgtagaaggactagagatagatcgagtccctcaggttaaatattcagaggctgtagtgggtgtttccacttcttaggagtctattgaaagggcagaagaagtgtgggaagtctggaagagactaaggccaaacctcaaacacttactttaactgtttccccagataaaatttagttgaaggcagcagccttgggcttggaaagaaaatagcgctagaaggcatgagagtcagattccagtcctagcattatgacaattataatgtcatttttgtttaaactcttggcatttctctccaattacctccagctttgagctccaaaggcaggctcctattttgtcttgtttttcactgtatccccagcatcgtagcacagaatctggcatgtagtatgttatgtactcactaattatttattgcttcgaatgcaccaagggacttggtacaagacacttagcctctcaggcactgctcttggcatcatggttatagaggtgaaacaggacaaggtctctgctgtcgtgaagcagacgtctacatgtgtgagatgtagaatgtgacgtcaggtatgatcatgctctgaaataaaagacagtgagaccggggtggagagggaagggcctgtccaagaagtgagacagtgagctcgttgggggtaaaatccataaaattcctcttggggtgactacagattgtcagctgcgctgtcagcaccttgttttaattgttttacttggctgccattgccaatgcccagctgactgctccctgcagcgagaactcccacctcaggcctcgctttcttcagctctgctgagcgtgcctctcctgggtcggctcccggttctcctccagctgctgagattccagcctccacagcctgctctgctggttctctgttctttgtccttagcttctggtttggcttggtccctttcacgtcatccttaacgtcctccctgggtgagctcatccaccactcacctctgtcttgaagacacccggatctccatatccggtctgaacctcctcccagtccacactcctagtggtctgccccgagggcacctcaacctgtctgtcccctcctgagtgccacatgcgtctttctccctgtgctgcctgcttggtccacgcccctcagttgcttctgcttcatgagtcgtcctggccttgtcttttccctcatattcccttggttaccacatcctgaagagctcatcttctaatttgtcaactcagttcttctctgtctctccactcctgtgtttaggattcatcattttgttctatgacagcctcttaattggtcatcctgtgttcatctttttcctccctcattccactgcccacattcctatcaacgtgatctttctaacacatgtctgatcagagctttcttttgcttaaagctctccaagagctcctcattgcttagaaaataaaagctaacccccttcagcggggcctgcagtcttctcatcatctggcccttggccccctgcagcttttgctcccccacccccaccccactttgggttttcctttttccctaactcacatttctaacctcagcctagctaccaacagccatcacctcctagtgcctttgcaatgctgggccctctcctgggaatggcgtggtctctgttcaccctcttgggaactcaactccagtttcccccaaatcttcaggacaccatccttccctacccagcacctctccatgacctggaaatgaccttcctcctggctcccagaacaccctcatgtctctcttgcaaagcacttatcggtgttactgttgatttacttacctgttatgctcagcaacctgagctccttaagggtggagaccacacacacacacacacacacacacacacacacacacacacactctgtctctctctctctgttccaagtgccagcatagtttacctggctcaggaagtttttgttgtaagagtgaggagtggtctgtttgtgcagccaagcaacagattcataatgtgataaaatgtacctgaaatgggaggttcattggccattgggtttattggggtgctcttcttgtcagctttgagtgcaggacaggttgtgttgggcttgagtttgtgacgcctgttgtgtctcccagcatgctgagacctcaggaatgtctcttctctatattctttgcccctgactttttatttttttagctcttgtttttgatggaccgataatagcaattcaaaatgaaaaataatccatcaaggaattctcaggaatgaggtccacccaccttggtcctggatgaatcccaaatttcctaaataagccagaatatctattcttgcgaactactgtctgacagcctttttcccccttaatccagctgagaatgcttttcttgaagggtaaggatacctagtggcccttcatgggggtgcctgagggcctctttgtcttcattttaaaccttgtaaagtccccagtgaatactgaggagtctaacaaataggaagaagctctgaccccaggggtcccaagtcagcatctgtactttgcatgggagctagcacaatgcacctagccaatagcatataaactctcctgttttcattcagtgccttaagcttgttgcttgttgtgtcttcttcacttcctatctctgccagagacctgagaagttgtgccaagagtgcagcttttatttggggcctcacagtaatctaggaaagcttttcagaagagagccattctcagcaccgaggtgtcctgcagaccaggacactccagcaggctcttggaactgctttcctgggatggaaatgcttgtgatgctgcctccccttgtagggactttccatatgctgttccctcagcctggaatgcatttttctcctggtttgcctagctcatgcctgttcaccctttggaactcagctgattggcctgcctcctcctcagaagcctccccaacctccctgataagaaggctaggtcttgtcctcaccattcccatgccagcatctagcgcttatggactgctcaccttgtgtcaagtactgttagaatgcttcatgcgtagctactttgtattaggggcttggtagatgttggctgaggtaagtgtcatcattgtcccaaagacactgtgtgaggaaactgaggcctcgacccattgagtaggtgacagagcaggagtttatcccagatgctggactgtgggtttacgctctgacccttctatacgccaccgttccctctgctccaagtccttgcagtctgtccttttccagcacttgtcatggaggtcatgacctcggtttgtgtggttatttgattaatgaatgtttgttccctcactgggcagcccttttgagccccaggatggcaggagtacctaggactctaggcaggtgcgcagcctggagttgaccgagagcatgtgggactgcccacttgcccacagctgcttcttgccttttgcatcacaggagggtgggctaggaccataaaagagccagcccaggcctccccctttctggagctcactgagtgcgtgcatggggtttggccgtcaccctcacttccatggttctgcatcagaaccagctgtgctgaggaaacatctgtgccttgttaaggtctgttccttctgcccactccctttgcccttttctctaccttacaacccctttgttgtccttcttcaaggaaaggggccccctttgtctctcagggcagagccagctgcccttctcctggtcctcttgatctgcacacactctgaggatgactgcccatggcaggtcatgatggtccgtctgccctggactgtggtttctgtggcagagcaatactttgtacagtcagggcccatggccctacggaaggctgagggagagcctgaggtcattgccttaagagaagctgcttcatggtgcagttggtatgtgtgcatgtgtgtgtggatgtgtgcttttttcatgcatgatgtttttatttgtgttatttatccccctgctatatctccctctctcaggggtctaacatggagctttgaatagtagatacatcatagctcttggctaaatacatattttctcccccgctgatctgaaggcacctcccttttcccctacccctcactttggtaccttggtgacttcacagggttgttatgacttcccagacctcattgagattgcagtgatgtgaaaaccctacctagattccagccagctgggcaggggccttggcagcaggggaagcccagttccctagggcaactcaccaggcctccagggctctctagggccaggctggctgagcttcaactgactcatactgtttttgactgggaaaaataaaaattttaaaatggcttctgaccaaatggggaaagtggatgtgggaggaggagaagggggacgttagccacaccctaggtacatttgccagcagcaaactgagatgggcttaaagtgtggctggcctctaagacgcctgcttcaaagggcattcggcacactggtctcaggctttggaggcccacctgcttcagaacatcagctccctgtctgtctagcgttgtgacttaagacaaacccaccaagctcccttagcctccattttctcatctgtaaaatgggattgtaatcattagaataacctttataaggttcttgtgagagtggaatgaagatgtgcttagcaccgtgactggcgtgtagaaagcaccaaatatttattatctgttaacattgtttttgtttgtcaaagtattattgttaataataattataagaagactttggaacagatataaagtctaaaatgcaggctgtgatgaaagggagatggtatataagaaaagtgctttttgaattgcacattatgtccagatattattattagcacaagtatgtttattattgttttgtctttgaaaaaaatgctggagcacaattttatgatgttgagtctatgtcctttgttgttttgttttttgttttggaaaaaggtttgtcacattggcctttattggaatcttgtccagtggatgtatgacccacattggtgaccctgggtgccaaatgcctggacagcacctggcaaagaagagccattatttcaatggtcactattgtttaaaatcgttatggtaaacaatacctgacagaagttcttagaggttcattgacagtaaattgtgggcaatgcactgagttattatttactctagacctgagaaattctccctctccaagttttgtgccttgtatagctaaataaatataaacaatttccttagaatttgatacaaacagctaccattgtcttcacaagtatgttagaaatactttcttaatagcaactacttgactgttttgttttttatctccattccctgccattactctgcctcttcccatctttctgaaataaaagtgagccaaattagccatttaaaaaatacgtagatactttcaggcagaggttgaaaactgtctaccccctggctgcatctggcttgcagatgtgttttgttcagcactcatagtgttttaagatgtttaaattagtggccaacatttaaaaatgggtagatttttgaatcaaaatccagatttccagctcttcataaaaaatcaaaggtctagtgggcctgggcccgtcttccttgtggcagtgcggaagagtggtggtccctcccctgggagcttgtttctccagcctgcctccggctggcccagcctcactgtacctttccatggcctgcttggcccctgtaggaatagagtttgtagtctctgcttaatataactaataccccttagatactgtgtatcagtttagaattatttccactagcaactgtgaccataggtaggaaggatattttacttgctaagttgtcattcttatgatagcccaaatggctataatagtattttaggctcttttggatttaatagaattaccttctctcctctctgtgggatttcctcattaacaatttttaaaaagtgttcagcaaggcttatatagcaacataaaattttaaataatgcaggatataaatttctatagctgctattgaaggggggttgcaatcaagtgaactgctttaattcaacaatttatggtgttgtaaatttgaaaaataaaagacacttagttttttttttttttttttttttttttcagaataaaataattaaatagttgacctttggcagagtctttgttgaaataggcaagggttttgagcttctcagaacttgagaccattgccttctggagtctttcctcagatgagtctgtgcctccttctagctagtgcactctgagcactgtggccacatctggagggtggagaggagacttagcttccaatggtggtcactctaggggaggggggcccttgcaaataccaaaatttttttaaattattattttatgagcttttaaaaacttttttgtttttgtcatcacaaaagtaataaacacttgtgataaattcagacaacactgaagtgctttaacataagcaacaaaatcttctgtgacctcccccaaccttttccaaccattccccaaacataagcacttttgagagtttgcttcttatactcctggacttttgcatttgcttgtttctctccacccctaccctttgccctcaaccacgacatagatactttcccttttgttttctaaagatagactgtccctgtgcatggtgttctgcaactttctttttacagctgtcaattattatggttatttttccaagtccatatgtacagataaatgtacttgttacttttaaaagttgtactccatgttatggttgtatgttaagtaaatttcgttttgtattgatagacactcaggttgtttctgaccttttgccattgcagtcattgctgctgtggaaatttttgtgcacacgtgtgaacttttgcctgagattttctttggtatagatacatagaagtaggacttttggtttaaatggtttgctgtttaaaatttgaatccataatgccaaattaccctccaaaaaggctgtaccaattcatgctcttcctaggagcatcccattatggctttgctaatctagtttttgcttacacatgtgtaagaaagtaaatcttaaaagcctcacaaataatgccatcaaaattacacgtttatcttagaaaagcattcagaatatatgtctgtagatttaattatatgatttttatatcttgactttgatggtggttatcatcctgcaaggtgacaaaaagttccctaaatactgtacacaattattaaataattattaaggatatcagttgtgccaggtagcctttggaagaattacagccaaatcacagcttccttttccacagctctgccaggctggcttgtctttcccaccaagggctgagccattaatactgaggctgggtcagcatttgaaggggccctgccagggagtgccaggccttgggccccagagacctggggagtgggagatggcaagtgactgctgtgaggctgagacaaagtttttgcctacaacaccccatggctgtttcctttactgagctagatgaggaaagcaaagggaagtgatggtccaagacttctggtggtcacttttgttcatagatttctcacaggagtgctaacatttaggctcatgtttacgaaggtttgaaaccttagcatttgggaaggatctgcaaattctcagccaggggccttaactgatcacaggtagttgtgaactcttggtccaggctgtatctcaaggcttcttcttagaaggacaggtcagcttaccacctgctaactgcatgtgaaattttgaattctgccttctctagctctcctctctggctctgagctggtatctggcatttgcaaacagtttaccctttgttgacttcttagcactaacctcacttttatgagtctgagtagacttgatacccaggccatttatcctttgagggtgccctcagcttcatcagacccatgctgggcagtctggcatagtggtaagaggcacttggagccagacagacctgggttcaaatcctgacatcatcacatttactaacagtgtgaccctttggctgatgacctcacctctttgagcatcagtgtctccttctacaaagtagggacagtaattctttcccaggggtattttgaaggatatacgaattaatatttgtcaggtgcctctcagatgttcagcacaaaataaacagtgtataaatatgagtcctctcttatcttcctgctgtagagagaaagttcgttggggatgctccaagttggtggctactggctgaggatcctggagtaagaggaaggctaccatgtaaacccagagatgaatcatgaacaatgtgtattctcaggagcttagtatttgatatgggagcctaacaagcaaatagtgtgtccagtaataggaactgattaatagaggaaagattaattaaccttctaggtgggtggggtggaaaagtaggtggggtattgaaggttcaacaggagttcgacagagaagatagaccataaataataaatatacggctgtatccactagagataaagttacattgttttttatgtacatgttgacttcttttggccttgccaatgcactgatatattcaaattcagctcctctctttttctcttcccttttcccttcactctgcctttcctccagccctgccttgaaatactcagccactgaaaatttcttaaagaatttctttatactttagtaagtcctcagaggataccagttcaccctactgagattttacaagaactttggtgtagctggggttttttttgcattcctttttctacggtagatataagttcttttgggttgcccatcaatgaacaaactaccaaccatttgatgtttactgcgtgactcctgtataccaagcacatgtgccatttcacttagtccccagaatgtcagagcagctttgtgaaatgggctgcccgttctttcttatggatgaagaaactgaggcttaggtaggttaatatactgaatattatacatgtagtgagtgggaaagccacagttcacctccagggtctttttctccctctttgctgccttgcttggggtcctgctcatagtaggtggacagcagatgtttgtctgaacatatgagaacactgcctgccacgtgccggtcagtttgatttgtgctgctggttttgtaacccacatggggcaatgacagctgctcaggtactttcctacctattagtggggccccagggtcacacatcagtcataattgacaaaaaacacaatttccctttcctctcaacttttatttctaaggtacttgtaagcaggtagattagattgttaacttttcattttttgctttgtctctctcctttaaagactatgtgaaagaatacacagtgccctgagagcctggcctgggaatcagaaacttagattccagcttcggttctgctggtaactcctcagtcattatgggtaaataatattccctctccagaactactagattgtgtccttggtgcagtctggggttcgggtggtcctagggaccctgcctactgcatgaacctgttatcaccatgtgaggctggaaggatctcagcgttggtgttgggcaggcctgagtgagcatcctggctcctgtacttcccagctctgtgacctcgggctaatcacctgactccctgatgcttgttcttgtctacgaaggagggctaagaggacctgcttcccaggatcactgtccagattgaatgagaaggaacgtcggcttccttccttctgtctccaactcctgagtgcactggttttagactaactgggtgtttctgcagttgaaaccaaaacaccttcattaggtacaatgttcattatacctcgcaacaccctgagatactcaactcttagatttcttgaagctcttttttgttaagaaactcctcaaaggaagatactcttctaccccattgagctttattagtgcttcaatgacagcaccttattttttcacttttttcccccttgcagacagaagctgcagtgtgaatcagtttgcatttatataatttcttttgcatttctttgcaaagaggaaaactccattcatttagcaaatgtccgtcatgcccaggccttatgttaggtgaagggatttggagagaaatagagtcactgacctcaagaagcttacagggaggaaaggtgtaaatacataaagtgacacatgggtttgtcctgtcaccaaggtatgcagtagatgctgtgggagaagagaggatgacacaggttctctcttggaagacctcatagagaagaggtgacttgtgagcaagtctttttttttttttttttttttttttttttgagagagggtcttgctctgtcacccaggctggagtgcagtggcatgatcctagctcactgcaactttgaaatcttgggcttcaagggatcttcctgcttcagcctcccaagtagctggaactacaggtatgtgccacttgcctgtctgatttttttttttttaattttttgtagagacagcgtctagccatgttgcccaggctgatcttgaactcctggcctccagtgatcctcccaccttggcctcctaaagtgctgggattatagacatgagccactgcacccagccgttgtgagcaagtcttaaaagatgagtaggaaggagtctgtcagctgtagaagtaggaagggcccaggcagaaggagcacagggcagaggctagagccctggtaggaggtgacacactgggtgcatgtctggagctggagccaagaggtggaggacctaagtggctacatcttggcagtcacccatatattggcaagccccaaatctttgtaaccagcccagattgtcttcctgagcccccaactcccatacccactgcccattcagcagctagctgcatgttgaagtgtagtggtcttcccagacctaacataactaaacagaagtcttgatttgttccttcaaaaacaaacaaaaaactagccttgctcctcctcagtcttccccatgttatgaggtccccatcatttttacctggctacccaggcctaaaatgtgggcatcatctttgattctgcttcctcctgtgttcttcacatcatctgtttgcaattctttttttgtttgttttactggttttaaaaattatttatttattgagactgagtcttgctttgtcatccaggctggagtgcaatggtatcatcttggctcactgcaacctccgcctcccgggtttgagaaattctcgtgcctcagcctcccgagtagctgggattacagtcgtgcgctaccactcctggctaatttttgtattttcagtagagatggggtatcaccatgttggccaggctggtctcaaactcctgacctcaagtgatccacccgccttggcctcccaaagtgctgggattataggcatgagccactgcacctggccaatttatttatttttaattaacacataataattgtacatatttatggggtacatagtgatgtttcaatacatataatctgtagtaaccagatcagaataattaacatatctgtcatttcaaacattgcagttcttgacaactcttactgtatgtcctggaagccaccactgctccttattattagtttgtttctttatcaaccaagcaggccagaccactgctctaccctcgttcaaacctccactgtctttcagcaggtctcttgtcagtttgctacataggcaaagaggtcttttaaaaagcaaatttgtgtcatttccctgctctaaactctccagcggctttctggcatctttggaatggaatctaaacatctcgccttggcctgccagcccctcctgctcatcttctctggtctcatcccttggcactctctgctcactccatttcagctgccgcatcttttcttactgttccccctgttgtctcatgggctttgcacttgctgtcctccgcctgagctgctcttccccagacaccgcctgtctcaccttcactccacgctggcctctattcaagtgttctcccacctgtctgaaaaagcaccgttctgccccctctccccgctgcttcaaccattctgtcctacctcgctttggtttctctcattagcactcatcactctctgactttatatgatatgtttgtttgtcttcttatttagtgtttgtcttaccccacaagaatataaatccatgaagatgggacctggtcttatctattgcattcagcactctagggcctaaaacagagcctggcacacagtgggtgatcctgaaacacgaggtgggtggatggacaaatgactgagttaatgcatgcctgcatgcaagcgaagactttggagtttatttcataggcagtgcaaatctagtagacatctttcaggaggtgagtgacgtggtcagcacttttattttagaaagccagctggtggcagtgtgggggctggactgtaggagggaggcagcagaattactttagcggctgtgaaaatcgtccaggaaattgatgctgagtgttgtgctagagctgtggggatggagaagaggggacagatgacaggacctgaagatctttgagtgtctttgatttctattgggataacttggtatagtgattcctttataagaaaagcaggaggggacgaactggtccagggagagactgttgacactctgtggtgtttttctcaccaagaaaacctaagccctgggatgcatgttctctgtagtggcattggctctctggggagtgactctgctgctccgcagcctcccctgttccattttttaataagagaatagtcaagatggtggtgtcagtgagtgggagtcttcttcatgcagatggatccattgatctttgcatactccaagccacactaagtcattggttcttttctcgcagtgggtacatttcaccttatttgattctgatctgacaaatgctgctttttttcttttctttttttttctttttttttgtttaaagaatacctagactgtgctcaagttccaggtggggtttacagataactggggttccagcatctcccttcttacaaacacgaacaggagcctttgccgtccttgggtctcagggaggcagaccggcagcaggcacacattcctggcccaggcgtagccatgctgtctggtgctgccttttgagaccttttgtgtgtgtgtgtgtgtgtgtgtgtgtgtgtgtgtgtgggcttgaatgattccttctttcaaaaattcaaccctctccaaattttgatgaaaaccttttcatctctgagtaagcacattatttcccatcttgatgaggtgtgtcccctctgtgtccctgagagtatgtcatcccagccttttaaattttattgtatttttttattttttattttttcatactagtcaagtgcagtagtgagaagcggggaaagagtagaacaaggggccgggggcggtggctcacatctgtaatcccagcactgtgggaggctgaggtgggtggatcatgaggtcaggagattgataccatcctggccaacatgatgaaaccctgtgtctactaaaaatacaaaaattagctgggtgtggtggcacacgcctgtagtcccagctactcgggaggctgaggcaggagaattgtttgaacccgggaggcagaggttgcagttgagccgatatcatgccaccgcactccagcctggcaacagagcaagactctgtctaaaaaaaaaaaaaagagtagaacaaggagtttgatctgttacagactgaactatcaatggagataactcactaccttcggaccagcctcatcccagtcttttaagcctggtccagaattcctaatcctgcttgtcaggcccttcaaagtgaaatgctgtaccatctgtatagctggattctcacctcctacctctcctctcccttccaaaggttccgatgtcataggaatctacgctagagggcttcctgtgtgccgggcactgtggtaagcacttcacatgcattctctctaatccttaccacttcggggatgtaaggattataatcttctttttacagatgaggaagctgaagcttgccactgcttagtagttaagagtatgggcttacagccaaacagaccctggattgattctcaactagctggggaccttgggcatgctacttaatttttttaacctttttcacatttagaagataaagataatatatagagagataatatagaagattatataggtattatatatatatatatcttctatattatgaagataatacagagttgtgataaaaattaaatgaaatgaccagacatagtggctcactgttgttttgttttgttttgtttttttgagacagagtctcgctctgtcgcccaggctggagtgcagtggtgcgatctcggctcactgcaagctctgcttcccgggttcacgccagtctcctgcctcagcctcccgagtagctgggactacaggcgcccgccaccacgcccggctaattttgttgtatttttagtagagacggggtttcaccgtgttagccaggatggtctcgatctcctgacctcgtgatccacccccctcagcctcccaaagtgctgggattacaggtgtgagccactgcgcccagcccatagcggttcactcatgtaatcccagcactttgagaggctgaggtgggaggtcacttgaggccaggaattcaaggccagcctgggcaacatagcaagaccacttctcttttatgaaaaaaaaaaattaagaaaaataaaaattaaatgaaataacatgtaatttcctaagtacattaagtacgtgcctactatgcgccggacattgtgctgtcagcaaataatagctcatcgcagatgctgttatcatcatcatcatcccaaagccacagattgagtctgtaggtgaggccctgcctggctccaaagattgtgtttttttctcctgttgctcccaagttcacctgtcccaaactttctagcccctaagtttgcttccttgcgcttttctggttgtgccatttgtccctgtctgggcagtgggctcaagctaaggcacagcagttttccagtccctttgagctactgacctcttttctgtcattgactgaacagtttccggtggctgaatcgtctgtgtaagagcttggacaattttttctgattgttaccatcatcgtgtttactgtgaaagggcttcctgtatagttgtttgtgttagcagcattgtctaaatgaaacaagagtggcaacagaaagggttggtgagcagtcctagtcttttggggtcacagatcactttgtgagtctgaagaaatttatagactctctcaaaaaaataaacgacaagacaaatacaagcccagcatttttcatgagacgttttccctgaagttgatctggaaggctatgtgctcttttgtcattgtgctactccacattcacagccatgaagggtgtcatgtttctgcagggtgtttgtatttaagggttgttgggcaatttggcaacactatacctgtttcattgatactatgtgctatttgcatttatttcccatatctgagatacgtattcacacatgagaactggcctggccattttgatgagatgtacctgctgatttgcacataaacacaagccatggcctgcatctagaggatcgactggagaggcttttttttggcccaaaacatcagactagtaggaattttattatgagttatagactaaaaggggggataaacttagcttcagcagggtttaatattctcaattcaggtaagtgtaaatctctacttttcattttaaacatttttgaaatttcagtctttaaaaaaatgcttgttttttttccttccaagttttaaggtatgggtttgggagaaggcagattccaaacactttaactcttcgacctcagacttgcttatgagcctctctttggaacatttccagtgaaccgtggagcaagcctgccacatccagcagccgtaggcatgatgatcactggtgccgatggcccctccactccctgcctggcttttgaggccccgcagaaagaaaggaacagaatcctttcataaggaaggccccagaatcctttctcctgctgtagctatgctgccagtgtcctctgtagatggaaatggaacttggattttgggtgccagaactgaattcatcacagataagattagttgatataaagctgtttctgatgagcagtttttcctccagagttttcatttttgctttttctaaattatacaaaataatagacactcattacaaagggaggatcataatgctccatacctggttttgaattccacttctatcacttattagatgcagccctgggcaaaacacacgccctctctgagccttgatttttctcattgaatgggagatctaattattttacctcataatactgctgtagggattgaaggagattggtataaataatggttttctgagagtctggtgtgtatttgctttttttcagttaatatgaattgagtacctactaagagctggtcactgttctagttgatatggaaccagtcaagagcaagacagagagggtctccgctctcatggtgctcacattctaatcagaggaggcacaagaacacaagatcacttcagttattaagaaattagaacccaggggtagcatgagagtcacaggaaggacccctttacgtcggatggccagcagaaccctccctgaagagctcaatgctttgtgacccccccggtcccaagttttccaggactcctacttttaaaaacactgcccctccaagtatataggtctcaattttgagtttggaaaatctgaccacatattagttctcttgttcattaatgggcttcccatttagagagtgagttcctggggcaggagccatgtcacaggaccttttgaaggtctcagggccaatatggacgacacttctcttgaacactcacccagttgggctgacatgaaaacctcatggtgggaggtggggggtgattagtttccagccagagcccattttgctccattgctgctttgaacattctggtttctaaggagctggaagtagtttctctcagcgagaatgtggcacactgtcatctcctgattctctgcatgcagttcttcaatggcttgttgaggctgcgtggaagcccagaggtcggggcagttccaactcacacactggcatttgaacggcagagcagtaagccctacacctgacataactgcattgccttcttggggtacggtacggatttttaaatgaccatttcagcctgctgggctgggcaacggtgatccaaactgatgagtcaggaagccactgaacagaaaggcaggctgcatctgactcacctgtcatgtcgatagttgacctccttttgtttgaccttgatttgctcagtgcaattaaagatgctgttgtgagtgcacttctgctacctgatttaaataaagtctaacatgtgacagctcagggtcttaaatgcacacacgacttaggcagacggacagatgggtgagtggttagcctttcacttacctctgaattgtaattctatcacaaggaaagggcttaatttcaggaacacggagtaattatttgagactagatacaatgccaaagcagcaggccttgattccttgctacagggcagcttaatcaggaaatggcctagatggccgcctttcaagtaggtccttgcagtagcttggcaacaggcacagggtcataattggaagaatttggctgtgagtgtctgtgggtgtttacagtgcactatagggcagggcttctcttatttatagaatattttgagcaacaagcagcagaaggctgaaaagccactaaaatctcgatttatttttaacaaattccatttttctcctcatcccagaaggagaactgagttattaaaaaacagttaaaaaatacatcattgcagagcatgccatatctaattatggggttgccagcatcggcctgcagccacatttcaagggcttcgtaaatcaaccatccattcaatctgtgaacttatatgactcctgttctccatttagatgtagagcgaaattattggcaagtgggtgctgatcagaaaaagttcttccctgtctaaattaggagatgggagggataaatatagaatagtatacttatgttctcaaaaggagataaaatcattcttcattgtccattatacttagctgcacaaacatccatcccattgcactaaatagccactttagagttttcacacattgcaatggcagttctgtgccactcaaaggcgcagtattgtgatatctcgctgagcctaaacctgagtgattattgctcacgtagtcatgaagagacataaacccagtgcttttttgcctgtgttgtcgtagtgtactagagctacaaggtgggccttcagagagacactagttttaagtatatctcattgtaggtggggaagcagaggcctaggcaagggagtgacttgcctagggtcccattaagagtcatggcagaggtgggctggggcggcagtctctgtgcttctcttgacagtgccctgctgtgctcactggagctactgtattaaacagatacccttcaggggttcacagtcttagaagacacaggcacgaagatggccaaacaatcagcccatgcataagcagaccaagatatgtgtatataacagattagttgagtggtagagaaaatgagagtggggaattttggaatctatttggatagcaaagcaaaggtaacatcagttgctctctgacccacttgggaaaagcttatagagatgctatgaagttttctaatggaaaaaggtgcagtacatttgccatgtgttagtgggaaggtaagtatgatgcagtggtgggtggtaggaggcagtgaagataagtattgcaactttggaggagccctgggaatggattgttgaggtgatttcataggaatacgaaagggagcataggaccagggcacaggccagagacaggcaatcccaagttccctggagtaccctgcccttttctgggaaagcaagtgggtggcatgagtgctatgttcccaatgctctggccccacccctggtagaagaataataactgatcatggtgggttttttctgagcctctgtatctttgagtagcattctggtagccaatatcagtggactggtgccagcctgtgtggtgaacctctatctctttcttgccctgggctgcatgtcaggcacagtgcctaagccggagtgggctttggggagttacttctctttctgaggctggaaggggcagagggacgtagggaaaactttgctagggagggcaaactgtgaaagcctctggagaagtcacctgttgggataccaaaggccagcggttttagaggatgcgaagaggccgggcggggttggtctgggcctaaactaaggctgtagcggctagcatggagaggaacaagcgacggggagtgattacggatgaggaagacgtactaggatttggctacagacagacaaccaaccagagagtaaaagacagtgacatgctaggatgtgaaccacctactacagagaaggtcagaggtggggagggaggaatcagggctgtgggcagatccagcagctgggatccaaagctgaagcccttgggttattgaatccattctttctgagaagagatggttgatcttcctgcccagggagttcctagccagactggacagtggttctcaaacatggtgccaggtgttgtcagatagcaaacaattagtttgtacacagaatgtccccaaggtcacctacacatatttgtttttcctaatctttgatacctacagccacttacctgctttcgagttctcagagttgagaacatataaatttgcagtaacaagtgcacaggaaatacttggaaaatggctgatgagctttagtttggaaatttcatttttttcttggatctggattataatttcagtacaagctagcaatttttcttgttggtaaaatagtttctagttttaaaattatttctgtagttaataaagttaacactatttcatgatggaggctgccccagctctgaaccaattttcaaaaggcagattctcctctttctctctcttatttcttgctcttgaacatttcactgtgttctagcaacttttcctgtgtgtgactcggccaggagactgacttgagtaagatccaggtcaaggggttgtgtgggtgggtcggtggtaaggaggtgctgaagaacactaaaacctttgcctgagaggagtctgggaagtagcctgcgaactggaatgaccccaggcttcctgtcacggtcatagcccatggagttggcagacttgatcactctatattgtgtgcccccaggtaatggcattagtcatcgatactgtcttttttttttttttttctttgagagagagagtctcagtctgtcgcccaggctggagtgcagtggcgtgatctcagctcattgcagcctctgcctgctgggttcaagtgattctcctgcctcagtctcccaagtagctgggattacaggtacatgccaccacacccagctaatttttggatttttagtagagacggggttttgccatgttggccaggctggtctcgaactcctgacctcgggtgatctgctcacctcggcctcccaaagtgctgggattacaggcgtgatccactgcgcccggccaatactgtctttaaatcgtccagagtaagaaaatgttgatagcttgttgtcacagccctgtcattttacacattccctgaattattgtctggcaccagcaggtgttccagaaacacttttggttctttgagccattactggtcattcctgtcaccactgccaccaccagatgtggttctgagagcattaagtaaaagttttgaaggttgtgtatgttaagactggtgcaaagtccatcctccttccttcgggctgatcagccacaccctggctatcagcacttatttactcattttcaaagtgacagaatggtccagtgggcaggggcataaggggtcacttcctctaaccacccgccagtgcaggaggatcccatctgcgcagtggctgcccatgacaggcagttccctagccccagtcggacatctccgcaccaggcatcctgctcctgctttatggacatctttggctcttaaaaatcctcctttattctgaccgcagatctgccttttggcagtgtttccttagtgacctagttctgctttttgtggcaacacagaacaaaggtcggtaggcatggcacaattccagcttagaagtttgaaggtagtgctcatggacccacatcctttccctctccacccactctatctccctccacaaggtttatgttctccagtgccttcagccattctttctatggcatggcagtcagtattaatcccagtaaaggtaacatgtatccagagagtgcttgccatgggccaggcactgttctaagctccgtacgtgaattgtcttatttatgactcaaaatcaccatatgaggtgagccctgtcatcatcctcattttaccaatgaggcaactaaggaacgagggctcacatcttgtcccgagccatgcagtcaagcagcagagcagagatttggggctaggcagtgtgactccagagcccgtgctcttagttgtggtgcaagactatcttacagcctttcctgcatagtgccaaaaataagcccatggtgcactagacttgggctggccctgctttaacttattttgcaagaaatcattagacaggagccttagttgaaccattttctgtgaaaccttcagagtttgttttgacagaacagactgcagggcagaggcatctgcactgtccccaacaaatgggttcatcctgtagctctgccaggccccacagggttcataaaatggtagctttagatcaaggtgacaaatacagggctcttgatgttttttttttttttcctgaacatggtgcctgagcaataggtttcttgtttaaagtgcttagtcatggttttatggccagaaagtagaaggagagaggtacctaagaattgcaaaactgggtcatctcttcaagtgcctaatccaatattcagtctcagagaacaactccagcagttacgggggtggaaggatgtgatgaccacctaccatccaaaactgggatgtaggtgccaaatacacattctcctgaaatgatccctggtgcctctagccaggctcttccaggagtctagagaaagatggcccatgacttcatccagagtctttgcttcctgtgctctgggatgcctgggcttttctggccacagccatacactgacagggccagaagggctgagatgctgggattgaaccatctttctctttgtgagttgctttccagatagcacgcattccggtcactattttccagagatttaagcagcaaagtgagggaccctcgggcatcgactcagagacctggaggggagcagcttgaagcaatgtaaaaagcactggataaaatctggttctaccaaaaatagggctatgagagttacctcacctccctgaaaggtaatatctttatctgaaaaatggggatgataatactactaacctggaagattgacaggaggattagatgagattctgcatggacataacagtccttggcatgatgtctagcagtgaagaaacataaatatgagaataataacttccttcttcctccgctgtctattccttctcttattctagtcctgtctgctgttgggttttgtctgttgttttgggtaaatagctaacctctctgcctctttttgtctgtagaaatgctactggttctgaatgggtacttcgcgccccctataggacatcgtgggaatgtgtgtgggtgatctggatgtcacagtgacccagacgaggcttttactgggggaagaggggaaggcaggggtgctagatataatgcttggggaacaaaagattgcccaacatctgcatagctgcctaatgctcagtgcattcttgtgggcaaaaccctgcttaaaattatctgggcctagagtctgactccaattaacacataaacacaaataatttttgcatgtttttaatatatactgaattttctgcgaacacagctaccaagtatataagatttacctatttgttatgaataggtgcaagcatttcatatatctttcatgatgttttctggtgtagcggtgccccaatacttacatattgatttacatgttgtcttatttttaactatatttcctttcttctttgtattacagttagggcattatattgattatttttggaattataagtgttgtaaggttatattacttacagatttcaagagagctaaagacatatttaaaatatttttattgcatttttgacaatatgaaagagcaagagagagagagtgtgtgtgcgtgcatgcatgcacatgcttacaaattagctagaaaaatcctaagacagactttaaatgaaaagaaatggtttcatagctcctagaaatgtccttttacataaggatatgtagtagaagtccaaatttttaactgcattcattgtcagagaaatgaggtgttttgatgtttcccctgtcccttttagaaagtatatgatcctaaaagagcctgaaacagtttccattgtcatattttttcatttttgcaatctctatttttttcactcctcccacctgtgcatatatatatttaaaagcgtccccatatagacttttaaagaaagaaaagccagccaggctccccactctttactaagtttgttttgattgttttgtggcctctgcctgcacctcggcctgagtcagactgactctgggagctgtgggcaggtccaagggaaagtcaaggaggtaatgaggcttctcgtgggggcaacttgtaggccaagttgggtgggttgaagtcagtctaccagaagcttcctgcctcaagcctgggcctctacctgtcctgaaacctgagggctctccagttggaccacgagggtctgacatccaggaggatccccaggagagagcaaccgtcactagggaatatgctgcccagcactgactgtactgagcagcagtgttgtgtgcctgttgggttgatgccatggatagccaggcgttcagaactgaacacgacacctaaaaggcaaacacgaactgtgaatgtgccagtgtcagatgctgccttggtggtcatgtgtgggctggcagtaagcttttggtcccttaacactcgctgttggaaatttcccaaggctttcatctagggtagctggtgtgtgatttccctgtcctttgttactcctatctggaaactagttgaaatcttttctatgatattgatatagttacagaaaatctgaatacttactactaagttttatagttctgcttagttcaaagtaacacaacctcataagagaaagtttgaaacaggtagagaaattgaaagatgaaaatcactacccattatctcagcccacaaagatagctactatcagcattttggtttgtttcctttcagtcctttctgtgtttatgaaattttattatataaataattcatgtccaatatagaaaaagatggaaaattgagaaattataacgttaaaacaaaactgacccatctcaccagttggagatgtcttaatattctggtgaatttttttttgtcttttttctatagacacataagaagactgggaaatattgtgtatatacgtttgtaccctttttcaccaatgtatatcaatgtatatcagttcactaatgaatactaattaaatgaaaatttattaaatgtatatctatttatatctattgatatattaacagatgccagtgcatatctattaaaagagtactatgtaagagatgatgttcttaaacataaaatttaatttaggcatgaaattactttgtcaaaagatatatcagtttatattcagatatacagtgtactgacctgcccatttaccacatcttcactaatactggtattatctttaaatagaatctttgctaatatgagcagtgaaagtggcatattatctattaaattttgacggttatgagattgagcatgtttttgtatacttactggtctttgtgtttcatcttttggggtttcctattcatagtctctgcttagttttccactgaggtatttgcctttttattgatttataagagattttgttttgttttaactcagaaaaggtagtattgcttcagttgtcacagagctttggagtcagacagagctgggtttgaaccctggctttcctacttgtgagctgagggatttcaggcaatttatctgacccctctcacaattaattagttcttctttgagaactaaacgaaacaacactgactagcatgaaaaaaaagcctggtgtgtggtttctgccaatagtttttgtgttgttatttttgttgtgattcctgcactgagtattttctcagaaaaatgaccttgagctgtacgactcatgcctgttcagacccacagacacatgatactcactatatccaaagctcagaaaaatgaaactgaaatcactgaagtttgtgggttttttttttaaattcttcttgccagaaggagacaaatgaaggaaaaaaaacaagccgatttcattttcattaagaggaatttgtagagttatttctggggtcaggcaggatacattcagacgaacattttagatctagggctgggaagatcccgagactcgttatagattacatcatcttcctccaagtgcacttgccaggcaaatggacaagtgcattttagaaaggttttcagttgttcacgtttaaacagaaaggatcacctggctaacttttagttaacccattgaacagatgtgccattcccccagcccattggttattcatgtccttgttactggtttttgatatccttgccccgtaggtgggaggagggatgggtatgagcctgccctgccctctttctcctacttgggacagagctgttgcttttatttgctgagtcactgaagcaatagagcatgtgcagagtcccagcctggaggtgggcatatctgggttccagtccctgctctagcccttctcagctgtgtgatcttggacaagttgccatacctctctgagcctcagtgtcatcttctatgtgatgtcgatgcctcccccaaaaggtcgttacgaggaccaaaggagacacgtcagggcaggaaccatcctaggcacgtgtttgatgctcagtaaacgggacgtggtcagtgttcagagttgtgggggtggcaggtgactgctctgtttcacctccactcacagcaacagggcctgtggtgtcacctagacatctcataggcatcccacactgaacatgtcccaaaccagcagctcctccctggatgggtggatggtgtacagggacctcttcctccagctgtcacatggggcatgtacctggcaagtggctttgcagccctagctgcccccttggctgggggcctttgtgcagttcatggactgggagtcacccccatgtctagaccgtcaggaaacccattggcttttcctttagagcataccaagaatcaacttctcagaacatagcaagagttgactttttgtcaccctgccgtggccactcagactgactcctcttacacctcacatcccattgatcagcacagcccctggaaatatgtctagaatccagctgcttctcatcacccccacacctaatacagagggctgagtcatagcatctcttccccggactgttgtagccgtctcctaactcagcttcctgccctgcttttacacacacacacacacacacacacacatggtatcttctcaccactgcagccagacttaaaacctaagagggatcatgtcactccccattttactcagagtcaaggccaagatccttactggggtctgcaggcccccacacctggccctctgactgcacccctaccttccttagctgtctcctctccctagcatgccccaggtcgctggtcccctagcactgggcagctccctgcggccctgttcactagctgtcctctgcctggaacacatctgtcacctctcacctcctcctgtccagcctccttggggcctttctaactgcctccctcctgtggtctgcctcctccccatctctgactttcctcccgagcacttactgccatccagcacccgacataacttacttgtttcgtttgcttgccttcctcaccaggaggtgtgccagatgaggacaaggatttttatatccctacccccatctgcagcactgccatggagaacagtgcctggcacttggatgccctcagtaaatatttgttgagagactaataagtgatcgtgggccagcatgccaacagtgtcttcgttattacaaaattgtcccgaattgaaatttggctactacaagcagtttgtggtggaaatttactcaaattaccaattctttcactgaagaaattacctggcatatgtgggttctcaataaactgtgttggattgcctcaaggctttggggcagtggtagccgtctgaggcctccttgccagtcaaccaaaccctgtgctgggtgggacataagagatgcccccagcatccttagctgatgctactatgtcaccccagaatccctggggcagcccacccctcagcagcagctgtcaccctgctgggttccgcttttcctcctgtgggcttcgtctccctaaggaaatcattgtccttgctttctacatcttatctccctgagcagctccaaaattctgttattcatatcccactgacctttctcattgtcctagtccaagcttctcacaggaggagttgtctctctgttttatattaaaacaaagcggttggactcttaaaactctattcacttttcagattctttggagtcctcaatgcttcctgctatgaaatgctgcgctctggaatgccttccagacccacccccaggatacctgtagccttccctgcagccactctcctcaactccctcctcgttcccaggggtcaatgtcctggatctctccagctttaagttccttcatgtcctcttgccacccctgctctcaccatctctgagttcttgtatccccaggatttcaacctgagtttgcatctcctgacatcacttttcccagccttctcccttttcaaccagcacaaggccatccacttccatggccatagtggacgccactgagcatgctaggtgttttcttctattcaactcatgtggtctgcacaacaacccagtgcggggaatccacccctttcacagatgaggcatctctagctcctggaagtcacctaacttgcctaggacatgcagctagtaagtggcagggctgggattggaacccaagaggccccgccctgaccaccatcctgccctgcctctcctcgggcacccagaatcccctcactctattgtcaaaacccaccttgtcctgcctgtctggtacctaggggagaaccctcagcctcttcttctgctgccacttgcttcctcttctgccaggaaggtcccacgcctggccagcctgctctggagacacgcccactgcctggccttgccaggaggctctgatgctctgcaggcttcctgtcccacggatcccttcctgcctgtcctggggtcccaccaccccactttgtagttggccttgctctttattgtggtgaaaggtgcaggccattccatccaagatcctataatattccttttctctgctgttgaatgttcttcccattccccccacattctcaaagaaggcatgtggctttcttcactgcgtctcggcctgccctgagtccagcccctgctgcctggcccagcctgtcttgttggcatcccctaagccctagccagaaacacaagcacctttcaggtgctccatcctaactccaccctccctcacactggcctctctccctttgccaccagataacagcagtgcattcttttgtttcctttagaacaagatgcagatgttttccagaattttcttcaacttcaggcagtaagttttttggtgaaaggagtattactccctgagtctgtagaaccaggctctctcctcttattctgtagcaattaaagacaaagacaggcaagaaaacaatgaaaagaaacaggagccaggctgatgcaccttcatttagctggtccttgagcatgactcattgatccttcttgcttccatcagggattgcaccctgtgccctctttgaatgcaggggcatgtcaaggccaagggtcaggaagagagctttggcctcgccagcctggtccccagagtggaagtggcagggcaggaggggtgtggcagacagagcacatatcgcccccagccttgcccccagatgttgagtgctgggtgccggagtgcagaggggaacaaggcctggaccctgcctggggagaggcagcacctgggagatctttgtggcttcagatcccatgtggtcctccaggtaaagcagagcatctctggggtctaggctgggggaaaactcttgcaaaaaattcctggttctgggacagaatgcatggggtctgcgtgaggggcagaggacagtgccaggccagtgagcacgcactgggcaaaggaagtggccagagaccactcataagaaaaagtgggacatgaacctcagagcctgggctgctttcagaggagccaagagcctgggaaataagcatcttctggtgaggaaatcagcagggggaggggagggtcatacaggaggggacttttaatcctgaatggccttgcagggcatggttcccctagtgtgccccatggaacccttggctgttagatgtgaggtgataaatggtgtgtggatgcatacacttgggactcagactctgctgcccttagactttcaccctccacagggctgcgtttaaaggtccaagaagccctgcagaagaaaaacctaactattgaaccagcattccctatacgtatttggcccctgattttttcccccgaataacatcattacaatcctatgggattagtgttccatggcagaactttgggaagtgttttttgaagaatttgtaaatccctgcaccctctggactgtgcccatttcttagattgcatggaggctgtgctgtacagtggaaggagtatgggctttagatgggactggcctgtgtttaaatctgctttcccattatacaaaatctctgatcttgatcaagttacttactctctcaaacttagtttccttatctgtaagacaggggatgaaacattagctagttgtcttatgaggctgttgtgatggttaatgggaagataataatgacacttacagagggcttgttatgctccagacaccattctgagcactttatatatctcacttacttttcaccacaactgtgaggcaggtaatgttatccttatcctacaggtcaggtcaggagaccaatgacacatacaggctaaatgttgtgcccaacatcacacggctggtaaatgtgggacctaagatttgaaccctaggcactcatacatgatggggtcaggatttgaaacttgaccgtcatctcccatcagagaacatgctctgaatcagtatgttctaaagggtctagagcagtaaaagcactaattggtatcagttcccttttcagatggttcgtggatatgttagggggattgatggttcctgggactccaagtcattctgcagtcattaaaatcagccctgttgaaagagtaatctcctcgatctgcttgcccactcagatgctcccattgtgaccattttgtttgctctgctgcctcatcctgggccacttcaatttgggtggctgctcagcgttcaggtggagtcgggccactttccacagccatctcatctgtggcctgtgcctccacttccaggaccaagagtccccccaggatgcccagtgagttggtagcttgttctctttctacacctcagtgatggacttgacaaagggttaagaagacatcccttttatcattcagcaaactgagtgcctttactgagctagatgcatgccctgggggaactagcactgtttggtgacttagttagacctctgaatccctctaccaaccctcagtagctgtctgggagactgggattctgtggactctcctctatcaacgatattgggggtcttttccacaaagaccagcctggttttgattgacaaagtgcctcagatttacaaatcttaccccttgcaggatcctctcaactgatcaagccccatagctccaaatgccgtctccttgattgatgtttaatttggggatccacaagcatctagagctaccagttgaatttgggtacccaagggccacaaatgggcccccctcacaccctgacccctgacaaccagcacctttgagactgaagtaccactgcatatagtgctgtcctctgctcagggcattctccctaccagccaggccacccggcaaacccctgcaacacctcataagacctcttcgctggtctcatctccttttattaacacctcctcagcacccctccacacacacccaagcccacaagcaaatcattttttcatctgttttgctcttgtaccttacctatgctccactaatacaaaaaaagcacgccttcctcaagacacttgactgccacctgctggagagttgtcatcatggctcaacaaatatctgccacttctaaacccccaggcacctctggagtagggcagtgcattgcttgtacagctgtaaacatggcctgcctgttgaattggtcatgctgtcatgtacttattaaaacactcgtctttctaactggactgaggacatcttgaacgtaaggactgccgatttctgtcttcgtccccattgtggcttctgctaggggctagagaaatgcttattgaatgatccttgtgcaaacacctgttaccttaggttcagggcatctgctgtcattcagtgaaggtcttctaaatctgtctgttgcaaagcaaggctcgccacaggctgtcagagtaaccatggaggtcggacaggacttgcagtggggacagggccccatcagcctctcacctctgctcagaggcaccaccctctgaacagatcagagcataaacaggtcagagcaattcagcattcattccctctacagacatcagggcaggcaccatgtagtggagagtggggccaggggccatctgccatggctgtttgggctggggaaggagagcagtacttctggagcatgtgctgtgctcagggccagctccctgtaggtaggttgtgggaatgcagaggtggcaactcaagcacccctgctggggattcagagttttgtggagaagtagatcagtaagcacatggataccagatagggttgtcaaggatgttgattcactgttgtccctattttcctaagctcgccacatcatggaaggctgctacccaagtgacattcttgggcttcaccaagtgttttaacagagctccacccagctgtcacactaggggtaacacagtgggccagaaggagaggcaggccttccctggggtcccattttaaaaagggggaagtcctctgttcttttacaacacttgtttaccccaagccattcagcatagtattacttaggtcccatacagagaaccttccaacagatagctctccttgctcaggcctgtcctgatgaactccctgatattcttccaggtcttaaaagagtgagagctgagcatttccctctctgccctggctgccaggaagctcagagataacttgtttgctcagttcctgtagctttcctgacccaggacttctttttcttataaattctccttgttccttttccaggaatgcttgctttttatgttttgtttgtttatgttgcttttgtctctgtattatactttggggggtggtttttggaggcaggattggcagcagccatggtagttagaagcaccagcagtaaagctggacacacctgggtttcatccccacttgctagctgtgtcattttaagtaagataagttgcctcttcagttctcggttcctcaccttgaaaattgggataatgatcataatgaatggataggttattgtgaaaattaaacttgtttattgtaaatgcattgtttcctgttcctgctcttggatcaggcttgatctgtggctgtagaatcctagtcttaatttccttcttcctgcctgtgtctgtcagcatatgatgagttgtacaatagtagtgactaggggaccaaccatcccggtttgtctgggacggaggggtttcctgggatgcaggactttcagtgctgaatgggaaggtcccaggcaaatggatgagtcggtcaccctggtaataaacaacctcaacatctcagtggcttactgtagcaaaggtttatttcttcgttgtgctactgtccatccagggccttggctaaaggaggagcctctatcccaggaaattgacagtcatgggcacagacagaggaacacatgttaaaggtcctttagaaagttgtggctgtcacttctgccctcattcactggttggggccagtcacatggccaggcctgccaccaggctgtgcagaaccttcccactgggtgggacagctcagcctggaacactgatccactctgccaggctcacctttctcttcttttgcattttagggtgctggagcagggaccagggaaaggagagagtcacttggtctgaactgggggtcttggatgtgatcatcttcctgtagatggtcggtatgggtttcttaaggggcagggttcagcttcaccctgctctgctcagaggagcagctgtgtctcctttggacgccttctagtggttgatgccctcacctttctcagctgccaaggcctctctcgacagggcaggctgggctgtgacttctcttccaccctccttgctccttcctgtggagcccctgagatcctttccccatgctcctgggtggaatggagggtgccctctcacattcttccaaggcatcttgcgcaagtccctccatgccctgctttctctggcggtccagcatgcctccatctcacctttgggactctctagcttggaagtgggcacacctgcagcccctgactccaggaccacaggctaggctctccccaaagcatcctcatcacacaccatgtggatggccaggtcagggcggccgtcagagcccaccctcggcaaggataccctctcaaaggcacctctgttggctcaaatcccttttggaagtagcccagaaagaggctttcttttttcttatcttttgttgttttatttattgttcttgcatctaagaacaccttcttggtcagaaaacagttttccagaaataatgttaagtaagtgtcacaactggtttagctccctaacctggtctaagcatataagagaggcttttgaggctgggcgtggtggctcatgcccataatcccaatactttgggaggccgagatggagggattgcttgagtccaggagtctgggcagcatagtgagaccttgtctcttctaaaaataaaaaattagctacgtatggtggcacatgcctgtagtcccagctacttgggaggctgaggtgggaagatcacttgaggccaggagttctaggttgcagtgagctatgatcacaccactgcaccctaacctgggcaacagagtgagaccctgtctcaaaaaaaataaaaaaggctttttgatttttgttttgcagaagtaccaaaatctatattagcatttattatttttatttctataaagtaaatttgagtattgggaaaattgatcaaaatgagaaatttcatatggagtttagtacttgaaatttggatccttcatctaaatttcagggaagtcagggctgggcatggtggctcacacctgtaatctcagcattttgagaggccgagatgggcggattgcttgagcccaggactttgagaccagcctgggcaacaatgcaaagcctcctctctacaaaaaatataaaaacaagccagacatggtagtggtgcatacctgtagtcccagctacatgacaaactgaggcaggaggatagtttgagcccaggagatggagattgcagtgagccgagatcatgccattgcactccagcctgggcgacagagcaagactgtctcaaaaaataattaaataagtaagtaaatttcagggaactcagagaacgagaaaggacatgaaattgttcatttatttagcatttgttgagtaccacctggagtgaggcacgagatcaggcacaggagacgcctataaataaggccctacctgcctgaagcttatgggaggtggaggagacacgcctacaagcagagaatggtcacagggcgtgaaggagcctgggcaggagctgctgcaggagagccagggagagaggatacagctctgaaggcttctccaggaggtgtgcccacgggcacaggaaaggaaagcaggagtttatcaggtgactgggtggttgaaaggagccacacctgcaagaaacgtgggcccagcagaggcagggtggttttgggaactcttgtcttttagtctgtcggggggctttgggtagcagatgggagggttgggctgaagactaagcagtgtttcctgctgggtgggtttgaactttgtttggaagacttagggggaacagtgaagctattgcagtggtctgagcaagggggtatcccgcctctgaccacagtggagaggggatggggctggagacgacagcagactgaacagaggcagtgacaaggatctggagggaagtggctgggcccatcccttagagggctgtgtgggggctgtggggtgtgggaggaagagaggaaggaagcccagggtaggttctgggttgctaatttgggggctgggaggatagcgtgtgacctaaacagagaatcagatttagatggaattacctatattaagcctggggatttcatatctatttgctgctgctttaccagttgaggctcaagaatgagaagcacaaaatttctggtcacattatttgcatgtgcccagactggggttaacagaatcggacagtgagcgttcctgaatcagactgcaatggggaatgaatgccttgggaggctggaagcagttgtattcgcagatattcatttggagatctctatagcgatcgaggcaaagataccccaaagactgcaagaattagccagtggaatttgaaatgccaaaattttttttcagaaaggtcaggaaagccccgtttaaaatctaaattttgccatctcaaggcagtgcagggatggattaggaggatgtggggtgacccttttcttcctttcagagccagtttctgccagacacaggaatcctccacatgagtcatagggtggagaggagacccctcagtcctttcagtaaggtgggagggcagtaccgcccggtggctaccatgaaccctgtttcagaatttctttcttaacttcgtgtgtgcccaggtgcacttgagattcactgatgttttctttagaccgaggagctcgcttcagcagttagtttcaggtgttggctctgctggcattatgcttcggcttaatgttttctgaagacttgttttctgttgtttttcattgttcttgttgtctggcttcaggccactaccttcaacctagcaagagctgagtggtgccttcagcagtgaggtagcttctgaaggccaccactctcttgctgtgtgactttggctagtttctccacctctctgtgcctcagtctcttctgtaaaacggagaacacaggagtatctccctcatagagttactttcaggtttcaatgagttaatctacataaaacaataaggatagagcctgacacaaaatcacactcaacaagttttcacaattatgattacttgacccagtaggagaaataaaaaacacaactaacttccttctaaggacatgcccaagaatccagttttagtaactttgaaggcattgtttttcaccgaaaatatctcctgccagattttttcatgtgtttgcagcttagctttaacaaggagctgaaggacggccaggcagcaaggggtggtgagtgccggtagagtgtgacgagctcgcccagccttcctccctgtaattaggagtcatgaaccatctacaccatctcccttagctaataagagatttttacatttacttacctcaaagtgacctgtctgggttttcttttcttgtggcccccactgtaggtttttggaagaagctgaccgcctgaaaagaaattataaaacatgaaaatcgctttgaggtgaccaagtccagaggcccctaactcctcccaagctggatctggggtgtaagaactgtgacttcaggtaacaaagtagtatcccctccctgccccctgtgaactcatgattcttggtagcttgcatggcagttcttcctttaggaagtgtagtttcttccaggaactctgaaacttggggtattctacctcatgcggttgtttggctggtcaaaaaagggagtgggggattctggaggtacttcatgtctgctgcatggcccaagggggccagggctccataaatcaccaagaccctgagggcagggctctgtactcattcctggccctgcttctgtaaatgttaatgacaaaataacaatgtcacccacccaacagggtctttaatatgattaaataatcatgaaatacttcttgaaggataaatcagagagaatagctaggaaatttccaaaaataaagagcagtaggagagtatttgttctgctagctattaaaatgtattctaaagcacagttgtaaaaacagtatagtactgtgatggaaataactagatcagaggaacagagtagagagtccagaaataggtgataaatcaataaaggtgtatttcaagttagtggcaatgggatgcatggactagcaaatggtgttagaaaaaatctcctatccattagagggaaataagaaattcctaagcttaggtagtatatcaaaataatttccaaatagcattaaattaaaaaaatcattaaaatcttagaaaaaagaatatttatattattttgggtaagaaaagacttaaaacatgtcacttttggtcccacatacaaatatcgtaaacaaagttaaaaagcaaaagggtgggaaaagtgtttacaacatcaatgatgaacaaagaattaatattcttagtatacaaatttattcgttcattcaatatttattgagcacttagtatgtactagaaagtattctgggcactaagggcacaagcagtaaataatgttcctgttctcctggtacttagaccctgatggagaggactgccagtgactatggtagattattgtaggtcacattttgataagggctaaggacaaaacattacgtaggtggctgggctagggaggcttggcagggtttgcattatgtggatattcaagggggcttcactgatggaatgacatgtgaagaaaaagggaaagtcattgaatgtcgagctgatagcacatttgctgtttttggaatgtcgagctcataggatttgctgatggattgaatgcgggttgtgaaagaaaggagtcagggtggcttctaggtttggggcctggcaaccagaaggattgacataggaatgactgagaggcttggcttggagatagagttttggttatggatgtttcagtttaacatctctcttgtatattcaagtgaggacgtcagggaggtggtcggccataaatatctgtaattcagggtgacatctaggctggagatataaatttgggaattgttgcagtgttgatagtatttgaaagaatgacactagctagagcccctggagagtgtgtgtagatacagaagagggcccaggacatccatgggaccctcccttagagttgagggagatggagccagctaaagagagcaaaaaggagtgaccactgaaatggaaggagtcccgtgagaagggggatctcccaagccaagagacagtgagaagggcgaggtcagctctcctctggatgtgctgatgggcaaggagagaactggccattggatctagcagtgaggaggtcactggtcaacccaacaagggctgttttatgggaatgatggggagagaatctgtttggagttggattattgagaataagaggaaaaaaactggagacagagaaatgggacaatagctggaggaggatggtattcaagtaagtttatttttcccaagatgggagttacataactcttgttttcacccaagtggaaatgattcagtagcgtggggagagtggatggtgcaggattgggctggggtgagggttctgaaatggtggtctcgaggaggtgggagaggtagaatccaggcatgagctggggaagggatcctaagtaggagcatctaaggaggtggtaggtgtgcacctgcctcttttctcagttcactaagaagcagagtcctcagcggagaatggagactaaggagacgatggaagtttgaggagagagggcaaagtatgaagtccttcatagcagaatgagaaaataaatggccaggggaatgaaggattgctgggcggcatgcaggcctctaaggggtatgtttctccagccatgtcctgttacacaggtgaacacggggtaggaggccattgtggtagaaaaacaggacatgagcagacacaacgtaagacagagaaacgcctgtaaagagaaaaagcaacatcagtaatagctgaagaatacaagtaaaaacaatgaggttttctttttttctctttagactggcaagagctcttgttggggatagaaattattgtcgcttttctggagcacagtgttacagtatgttccagaatacaacgtgtgtcccgttttgacctgtcagtcccacctttagaaatttattctaagaaataattgctcaaatgcaaggaaatatatgcacaaagatgttcaccccagcagtgcttatcaaagtgaaaaaatggcagtcatctaaacaggaggcagctggttcacttatctgtcggcctaacagtgatagtgggaaacagtagctcacactcaccctcctgttttgcagatgagggaagttgggtccagagaggggtagtgacagctccagtcctactccacggagctcagaccccctggctgtaggcaggcaccctgcccaacctcttcaactgggcttggagtcagagtcccttgcaaggcacttgtcaagcccttttcaagggccggtttgcttaatgcttttaaaatacgagttctcaaaatgttttgcaaatttgtttacaatgtcttcatttcatctcatggctttccttgcaaaggatgctgacagtggggggaaaacaggccgactgcctggccgtgatagaggggaccatattttcctgattcccaagtaagacttacagtggaagaaaggatattttctgctttcttacagtgtttacaaaagtcataacaggatgtgaggactatctggctgcaacatctgtcaccccattggtcgccagagttgattgggctgatctggctggttaggcaggtgtcccattcctccctcaccactccatgtgcgtccctcccaaagctgtatgctcagaaaggatgaccatccccgatagaggaggactggtctttggtcaagggtatatgagtagctgcaatcttctgctagggacccccaaacaagctctcaaaagtcataacaggagtacaaagataataaggaacttgcatttatttgtttccttgatcatatgtttattgattagaagaaaataaaattagcagccagccgtggtggctcacacttgaaatctcagcactttgggaggctgagacgggcagatctcttgaggtccagagttcaagaccagcctggccaacatggtgaaaccccatctctactaaaaatacaaatattagccaggtgtggtggtgtatgcctttagtcccagcttcccagcgttttggatggctgaggcacgagagtcacttgaacctgggaggtggaggtggtagtgagctgagattgcaccactgcactccagcctgggtgacagagtgagactttgtctcaaaacaaataaaaaataaaaataaaataaaattagctttgtgtgtggagaaaagggaggaaaaataattagcattgtcagagaacatctgggttatttggtcccctccgtgggaactgccctgggttttcacttctagagtttctggttctggtttaatttttccacgccacagcacagggaccgagaagctgctcagcttctctaggcttttatgtcttcaccagaaaaatgagcgggtgggcttaaatttcctacaaaaactcttaaaataaatatgatgctctttccattctatcacatgcctgttctgggtccgggggtgtgagagatgcattagtgctgctgtaaaccagccccgggtctccccccccggccccccaccaccaaacccccaagcaccaacctgggttctccaccacttttgagagctcatcgaaataaacacacctttgtgcctcttgtaacaattccagatcatccaatggcagaccagagaatggacatttcttcaaccatcagtgatttcatgtccccgggccccaccgacctgctttccagctctcttggtaccagtggtgtggattgcaaccgcaaacggaaaggcagctccactgactaccagtaaggcctttggggcatgtcttcctcttgttaaacttggtgtcagttctcgggcatggaacatctagcagccagctactgtttcatcctggaaaaggggatgggaataaaaaacccaactctaggtggcgacacagttggtttttggctttaccttcccctagtttgtaagcaagaaggagccttcagcagtgctgaggcatttaacttccacttcctgtccccaaaatgttctacacccagagaaaaagaacagccttaaggccaagttctgtcttttacccctttcttcgtcttctttctttgctcctttgagcaagagggttaagtctatgggtgtcatctcagggggttcaaagagagctttgcctgagggcctctctgaggaagacagcaagtgtcaggtgcttaatgaatgtttatggaaggaatgagtggaggtcctctctgaaaacaatttaggaacattgatgttgtccttaaacattatttaaattagtatgaacttgttatattaaatagtatttttgtttatttttagacttgttgacttttcgtttgagtaagtaaattttcacacttacagtcatcccttctatatatgtacaaacacctagggaataaggcagtgtagaatattcaaaggcacattttgttttgccgaagcacctgcgtggaatcttacccaaatgtccatttaagaggttttcttttgtttaatgagggaaaatctccgaggaggtataccccctacagcagatgtcctttctgctgaagttcacaggtcgaatttggggagcacaatggctggaggtcagatgcccactaggagatgctatgattaatatgtaagttatcccagatgattaagacagccaacacccaggggctggagagtgggtatgagggctgtgagggcgttcttccatagcagtaactccccagcagaaagactgcgagatgttggccacaaaccctttgtcttgagcaagcgctaagggagccactgatgtgttctaaggcctctgtcatctggacctgtgggttccagcctggtcaccacccaagatttcccttgtggactctggtttgctaatcttctgtaattcatggagactcaattaattaagcaaccttaatccctttcactatcattttaatgtaactgaagtcatctgtgactgtcaggcagagctttttctcacctgagattatcacctggcctcaaggaacagatagaattctagacaaaagggagaggggagtttttgtccttccgtgcggcctgcgtgatctctgaactttagaactagctggggaaactctctgcctgtgaggaaccccagggcgtctaattgggaacactgttctagaatgcccatgatatgatccagtgctcctagaaacagctatttttgcccttgggattacattgtttgaagggccatgctctctcctttcctgtgggataaaggaaaaaggagagaggcccagctggcagtccatgccctcctgataaatgtatggattggagaaggcggtgagggggatttggaactccttcctctggggatttcagtctgttttcttctactgaaccacaggatgcaacgaaacttggttttctgaagtctgtgaaagggagggagatccttgctgtgaccccaggacttctgtggccctcagccccactacgcccctccatcccaattcctaaaatctaggggttcccacctacctgagaagcagaatatttggcagtagtgcctttgaaaagctgcctggggctctgctcagtactttgttggtactttaattccaccctcctcacttcgtcccttccctgccaaatagatatgtatgcacatttatctttgatgctcaatatgttttgcaaacagaataagcttcatttatccagaatgatggggggggagaatgagaggttatatagatatttcaatcctatggttaactaagcatttttataaacactacatattcccaattttcaaacaatcagaatatggtaaaatatatgttaacacacaaactcttttgagatgataacttttgtttgataacctgagaagctggtccaggttttatagtaagttcaagttaattttcatttgttttacccttattatacatcattaattgatactgtggctgttcgaactttatgattgtttggtttctggataaatgagagccttctgtcttatgataagaagctcttctgtatgtctttattaacatgcagtcacattctcttttgttttttcagagaaagcatggacacagacaaagatgaccctcatggaaggtaccatgaacctagtaatttgaacttcagcatccttatagccattttctttgcactgttacacattctgttacttggggcagcacccatgtcctcaactggagatgagcaaggaggccgtgagcctgtgggcgctcactgtgtccctccaacccccagtccccttgtgtgtctgcagagagatgacaggatcaggcagaagaaaacagcaatgtgtaactttgccattcatctccagagaattatgtttttatcttttgctttttcctccccccaggttagaatatacagaacaccaaggaaggataaaaaatgcaaggtaagcttggaccttattttgtctacaaagcatcctagttctggttgcttagagagcagctgaggaggctctgcatgtttggtcctgtctaagagttctgttgggcactgtcacctccttagggaataggcaggtagtgggccttggccgaggtggccttctgccctccatgctctccatactggctggcctttactctttgctgtctaagcacctttaacctgaagtggatttgaaggtagcagaaatcaatcaaggctcaagtttttccccagtcttcagcagagaacgtcttcctgactggagcgccctccgcaggagacatggctcagtgatttggttcctgggctgggacttgcctctgtcaggggcccctattgcactgcgagttgcaactgaatgcaccacatggggcatgctcggtgtctcgagtagattctctgcctgggtctgtcctgcctccagccacacttgctgacctcttcccattgcgtcctcagttcttctgccgttagtaccaggctgtgttctgaggctgcgtcatgacagactgatacagggggctgcagaaattggctgccctaaggcttcaagctcttccctcggaggccagccttagcaggagctcccatggctctgtatctgcggcagctgcagcaaactacatttccatcgttgctgcacctccttaggaggaccatcaccaatggcaggtgcacatcagtcagtgtcaccctgcctcagcgggaggagtgtgacattcctcagaggaggctcctggggacagatgtagcatctgctgcacctaggtggggacctagttttgatccaaggatgacggcgttggttactgggtgccctagtcagtgaggctgtgactggaaagaattggtgccctgcccaggtcacatggccacacagcgggctcctcacagacctcagggacagcccacggggctctggatgctctgtgctatgaagccaccacctcccttctctttcctttcacccccatttcaaaatccaatttgacaaaggctgagaggaaaagaaacgaggagaaatgaacaattcagtttactctgaagagacaatttttgtagcttttctcctgaattctaaagatgaggtaaacataaaaaaattaatactgacctggcagtgagaccattttcttggagactttagttgaaaagtctaattttaaacattctgcaaattctaaatttgccttgtcagatgaacattgaaaacagttacaactcatttatttttgtcatcttttcttgatgcttggttacattttataagaaatcgtttttcatattgttgttcagggaagctcacagtcagattgaaaagcggcgtcgggataaaatgaacagttttatagatgaattggcttctttggtaccaacatgcaacgcaatgtccaggaaattagataaacttactgtgctaaggatggctgttcagcacatgaaaacattaagaggtgagaccctgggctctattgtcctttatgtccttgcccacaaatgttaccacccttgcctagaatgttcctatccctaaggcagatgtttattacttgcaattatgtagccttcagtagtatgcctttactcttcagcaacagccgtgatgccaaatgaagtgattattgagcttatgtgggttttgacatgcaattttgcagtcacacattctcagagcatagaaactgtgctttgcacgtctctgtatatgcatgtaatcaggctatgtgcctatcagagatgatactgctctgatgtctcacatcttgcctatgtttgtgcctggatcccatccttacaattataacacgcagaaatgtaggtgcacacagtgacacagaaaagtcagttcaaagatgaaaattcatcatggttcctttgaaaagtgagtcatgggttgtgggttctcgcgacattttgttgtcaggaatgaacactgaagatattttcatcttcctggaattttcccgaaccagatccactctttgtgagggaggcagtattttccttcttttctgagtgtggggagggtgagaaaacataggcagaaaagtggaagtgacttatccaaaccacaagagaaatctgaaatatatcaggcattttagtgaatgctgttcctggaattttccatagctagtcttggacttttggaggaaattggaaagtgggcgctcagtcagatctctgacctgcgtggtagaagaattgcgtctttttatatttgcacaaggccaccagaaataagaagtagctggttttgtctgactttagatcattacccaaaaatataaatgttgtatcctgtgctggaagaatggcatttaaaaattcatattagcaaagataacatgggttaaattattataaactaatttctattaaattggaaaaaagtggcaaatctcaagttacagtaaagagcagggatagggatcaataggatggttgcaacacgtcctgtctccttccctccccatggtactttgaattgttacagatccatttccttttattccttcactattctactcgctattctacagactccaaatcatttactgctggcatttttctctgttaagtgattgttctcctgaaaaatgccagattgacagccttttaaacctaagtcttgtcccctttcagtcctgggagtgcgagctgcattgactgaagcaatgcattcctccacattgccacgctcgtttaactcacccctgatgaagagtaactcacattaaatgccttccacaatatatttactcagggcctggaagactgaatggtttcccaagaacatttagagtggtgatttgaaggactaccagacaacccatttaatacagatcttaggaggagggaactctctgaggagcctctaccagtttacttccagagctgccttctttcttagaagcagattgttaaacttccttctattatctcttggttttccctgtaatgagaaaaacaggcttgttaggtctcctgtgggtaacagtgttctctcttccatggaattctctttggcttacaggattctgtccaaagccagatctaggctcatctcagttaaggcctaaacaataaaatttaaataccaggtcatagagactaggccacttacagaaggtttgaggcagcaagttagaatgagacattttctgaatatcaagtataccaattctttctctttttgcccctaaggtgccaccaatccatacacagaagcaaactacaaaccaacttttctatcagacgatgaattgaaacacctcattctcagggtatgttcaattatgggattgttttacaacgtttgtttttataaattttcaagtaagtaccagcatgtgggaatttgatgtttcaacactgagcttttttttttaggcctgcttcctctctcaggtccctccctttatcttattgtttggacaggcttcacatttcttccacaaaaccattctcctcctcttttaacctcgtctagacaaaaatggaaggtctatgccaccgcaatttaaaatcagaagagtcaggatttgttaaaaataagggggatttgagaatcacatttctgcatgaagattttaggaagggactgaaaccaacaacaattgagaatttctcttcacctgatttaaccactagcacaaaaaagtccacctaaatctttacaccaaaatctcatcaaaataacaaaactgtggctcacgcctataatcccagcactttgagaggccaagacgggcagatcacctgaggtcgagtttgagaccagcatggccaacatgttgaaaccctgtctctattaaatatataaaaattagctgggtgtggtggcagatgccttcttgggaggctgagacatgagaattgcttgaacctgggaggtggaggttgcagtaagctgagatcactccactgcactccagcttgggcaacagagtgagactctgtctcaaaaaacaaacaaacttacaaagactagtggtccaaaaaagaaaaataaatgcaagagatatatgctttcacctgcttgacttgagtgctctctctgtcttgctaaatctctgctgggagatggttgaggtggcactatgggaacctgttgtcttccatgaagaattaggtcggcacaaagctctaagttgtgttactaggtaaagtgagattaacttgggaattgaagggaaagaaactggattcagaaacgtgttcttgtagattgtaaacagatgaatagaaaaacgtaactaaaaggaaggatacccgcttccacctcccacaaagtcagggctgaccttacctgcacagccaacagaatcttcctacccatctttgagcagaagtttgcaaagctctagagtagagggtagtccatctggaattttgcatcatcactatccattttcagctctctataagcctggcctgtctgctcactccagcattctctatttatctcctcatgacgtgctatctcaaattggaaagcattcacctgcaaggaccagaagacctgatgaataaatagagtttaatttctcaagtataactggtctggagtaggttatgttgggttgctgcagtggttcaatgaggtcaataggaaccaggttctttgtctttgcactcagccacaccaagctagcatgctagcttgtttccttaatgtagccaggtacctttgccaggtctaagtagccagacccactgtaaaaacaggggtaaatgaagctctagtctggctgtcctttttatcaagaaaggatacaccttcctgaaaactcaacagtggacttcagcttattcaaaagtgtgtcacttggtcacgcctagctgcagggcagggtgcagaaacaagtgtttatagattttccagcctccctggtggagacaggcaagagagaaggggcctgggaatggtgttgggaattggcttccccaacagtgtttgccacacacactttccagagccacatgcatttgctcgattccttccagaagtgactcccacaacccaatatagtgcttcaactgtggtctgattggcctgaggttgaatgggactagtgccttccttgccaaaaaagccatctgattagtactgtatcatttggggcagctgcagtactgcctcctcccccttctctcctgaatatgaattattgttaggtcaggttttttacatcttgtataggtgcttttttgaacttaagataggacttctctttcatttctgtcaaaacctgtttgttgaatggccccacagtccagcttgtcattagtgacccttggaatctttgtgtgacttgtagatccaatacatgcctctgtgcctttcatccttgtttattcataaattcaacaaacatttttgtttacttactagatgcatggcattgttctaggaacatccaaatcaatgataaacactttagggtgggaccaggctcccgatcaagtgagtgatagtcttttggctaccactctcaggacacagttattcaaacacccaactttgcccacctctccatccttttcgtaaagatgtccgtgttctcagagaggatttgctgaggttaaaatatgaccgatgcctgtagcatctcgagagctgccgtcggtgccagcttcatgggcatgtgacctctgcagtttcacaaggccccatgcttggtttaatgccctgtcaccatcttgaaaacgtaatttttgaacaaggatccctgcattttcattttgtactgggccccacaaattatgtaactggtcctgattcccatactggtaacagatctgcagctgtagatgtgataggcctgcctctatgcctttcattcttgcgtattcatgaattcaacaaacccttttgtgtacttactagaggcttggcattgttctaggaacatccaaatcaatgacattttgggctggggtacaggcttgattattttaagaaaaagaatctatgtctttatttcatatatatatatatatatatatatatatatatatatatatgtaaaataattatcaagcagagtcctgtggatggacaaatttaaaaataaataaaacaagctccttttgcagtggcacgtgcttaatcgttttcttgttgctgcttttcttaataattttctatcagatacccatacttaccagggtatggaacaaggattatcatgctatctcagctaaatacttcatgttgggcttgtctcttctactcccttgtttatgcagcactcaagagtgatctctcttgcccgatgaaggttttgtcacctctctagcacgtgtcagtggctgtgaaatactgtccagtcccttatcacttccagggtcccagttccagggacttgcttccacagaaagccaggtctactcagatgatgttcagacagtttggccgcaggagctggacttctgcttttcctcagcaatgcaaaatggacaaactgctttctttactaagtgctttcaaaatatctttaataaagtgtatgtcagggatcagtcaactgtatcagtttacaatgtctacgttagtctacttccccatgttttgaaaactaggcagaccgtaccaaggcctctgtgtcttttattaaccagcaccatcttcccaagagtgaccctgccactggctggcccctgtggctctgtggtgctggtagtgttctcacagcttctgctccttagctgtccttcgggcccggctccttcacagatggtctgctggccagggtgctatggagttggaatgtccagagcctcccctcgctgatgcattcactgctttggaacctgctggctttcctctggagtactgaaatagctttacctgtgttgtcggttcaggcctgaccctgcccagcattacctccagggtgtcacagttcccttctgtccaggtacctttcaagccacattgccacatcaatgaaaagcctcaaaaacacttccatgagatacaagattatctgcaaggcaaacgaggaagtttttaataccctatttgttgacagaatgaggcttccagcagatggtgcttggaaagttacttccccctcactgtcatcccttgcccctgggccagcttagggacctaacttaggaaaggatcctccccagcttccttctggctgagtagcctgccagggtcttaagcaacagtgattctgttcccctctcactcatttcttctgtcccagcacaagtacatgcaccattcttttaccttctggcacattaattcatttcctagttctttgaattaaaccacatcatgaaggcccttttgtggaaaaagagaacagtttctctgtatttttccaaagagcagattaaggaccagtgaataaggtgagaaactagtccactgtgtattagaacgagggagggctgagtcataagagcaagggcatgacagagtggggcacaccctccttgtcaccggaagaccccagcaggagttgagtggttgtatgtctggaaggcagtgggtgggattcacacagcccaagctctcaggcactatagcttgggtatttacctgcttcagtctctttaccaaatgttgtcctatcttaatggctggctttattggaacatttagattttttcctgtatttaaactgaagaaggggtaagaagaatctaagcggggagttttgcttttctgaatgcaaatagtccggccctggatggagggataacatttgagagtagtagttctcagccctatgtacattagaatcacattaacgtggaagtgggatgggtttaaaaataccccagtgatcagccccatgccagaccatcagcataaaaacaaaaacaaaaaacactgctccgaatgttgagaaccactgttttagagagctccctgtacgtggaggttttcaagttgaaggcagatgatggctgagatgttggagaggggattcttgaagagtccttccaaatctcagattctctgactctccatagagttgttattattagagcaatgaaatatgattctctggaccatgataccttcaaaagaacacgtgcaagctgaattctgctttgaaatataacttactttaattggactttcttcctataataattagatgatatgcagaaacacacacacacacacacacacacacacacacacacacaatcttacagttcttcagagacgtttgttttcagcatcctgcactcaggatatcactgaaactgttagtgttcctgtgctttggatgcttagaaagcacatcctctatttgttatcagggtgattacaaattatgtttcctacagtatgagaaattgattatccatttctcctgattaggcagcagatggatttttgtttgtcgtaggatgtgaccgagggaagatactctttgtctcagagtctgtcttcaagatcctcaactacagccaggtattgttcatgctcctgttgatggtgggcagcctcacagcagtcagaagtgtcactcaattttgtcagaataattatagtatacaagtcacatgtgaacttcttccagaaaattcttaacttcttaacagataaattaatttagacttagaacaatcttgtaatatgttccgtattccccccattgaaagatctgactctgatctgatcgatagcattatggctttcttctattgctgcaaaataaatatcccacaatatgtggcaaggacagagggtaagaggctatctgacaagggagaaaggtaggcaggttaacacaataccagagaatacgtcacttggaaatccactccatactgtgtttgcagtgctgtgtcacttcttagctctattgaacctcagtttactctaaaaattaatgataacttataggatcaaataagagtaacatttataaacgcttctagaacagaacttttcacctattatgtcccccagagtttttattcatttattcattcactcacacactggtatttgcatggaagcttggtaggcagaagacttgaagaatcaaaatgacatttatgtaaattagaattaatgtaaatttaatttttccaaagatttctgctctttttagtctcagagcaaagttatggaggaagttgctgttatctctgttaatagacaaggtgactgaagcatatgatatgcgtgacttgcttgagaacagagaggctgaacagcagagctggaatcagagcccacccctatcttctgccttctgaggtcttacaggggaattccaagattgttgccttagaagagcataaactgtttatataattgagggttttcccgtcatgttatcaaaaccaacctccagatgcctccttcctggtgtcaggcaaagtggttggacatatgtacaggttcacataggaaaagtttgaggtctcatgcacaaaaacacaaaggcaacatgcagactgtgcatgcttacttgttgcataattgattttctgcatgcaattgacttgtcatgtttaacatttcatctccccagaatgatctgattggtcagagtttgtttgactacctgcatcctaaagatattgccaaagtcaaggagcagctctcctcctctgacaccgcaccccgggagcggctcatagatgcaaaaagtgagtaccagagaggcctcgcatttcctcagcagcccactcacaggcagccaaccctgagtgagcagagggcgggtgtgtgtgatgggctcagcctttccagtcctacttctctgtcctctttctggggcaccagagctatctttggctaaatggaattatttatgttctttggtcttttacataaaaagaagaaaaaaatctcaatgtccaaatttattgaaaagaagagctatttagactggattctttctgatttttagacttttcttttttctttcagaatctagaaaatcccagttgtatgctcctgagtttaaagggctaagtttgatttgttctcccagaacaaatgggctctatttacctgaattgcacacaggcagcctcataaaagtaagaaaacgtcaactataaatatggtgtttcttcaaccaaagtgttcctccttaggttggctcccccacctggctttcttcttttgcagtagtggaaccaccatccacatcgctccctctgcccccagcttcctgctactgcacacacttctgtgcaaggccccagtagctgtcatctactttagtcctgtgggaggctgtacactcctacagttaagaatgagagaatgaggactctggctgggcgcagtggctcacatctgtaatcccagcacttcgggaggctgaggcaggtggatctcttgaggtcaggggtttgcaaccaacctggccaacatggcaaaaccccgtctctactaataatacaaaaattagacaggtgtggtggtgcgtgcctgtaatccaagctacttgggaggctgaggcaggagagtttcttgaatccaggaggtgggggttgcagtaagctgagattgtaccactgactgcactccagcctgggtaacagagcaagactctgtctcagaaaaaaaaaaaaaaaaaaaaagaatgagaacacaagggagattactgggctcattccggctccaccattcactagctgtgtgaccttgagcaagttacttaacctctctctgtctcagttttctcatttatggaagagtacctatttctttgggttgttgtgaggattgaaagtgttaatgtatataaagcaggcagaacagttcctagcacatagtaagaacagtatcagtgtggcctaatgtcttgctcccaagctgtccacgttaatccctggaaaaaaataccaccagataatctccttcaagtcatctctttcattacagcacaccgcttgttcctaaaagtaaaatgcagactttggtatctgttgttctttatagtctagccttggcttttttaagtgaccttaggagaaaaatatgaatggcatttgggccttgcctttgaggctcttagcatatagtcagagaaatgagacagacagcaccctgcatagtaataggtacagccatagaaatagtgccaggcatagagaacggatgattaattctcatgtgggcgcaaggacaggcatcactgagtagatgacaaccgaggtgggtttgaaaagatgaattaatgtttgccaggtaatgaagggaggaacaaagaggaaacaatctgtgcacaggtgcaggggtgtggagccacatggcttgcttggtgctattggacaaaacgtgcacggaggggaagggctgaaccatgaagaccatttgttctgtggggacacagtgaagagctctgagttgggtggggcaggctcggattggcattctaggggagatcgcagagctggcaatgtgggaggtagatgggatgggaggaagcccagaaggagccctgggcagtggccattcctcggcacacttgctcgtgtgatggccatgggtgtgttttccctcggcttctgtactgacacctagccagtgtttggtaaggaggtgtgctcctcagaatcacctgggagcttttcaacatagtcatgctccacccccagagattctaatttggtttttccagacagcacagtccaataaaaacataatgcaaaccacaaacatgagccacatatataatttcatattttctggtagccagactttaaaaaataaaaataaatgtaaaattaactccaaaatatttcagcatgtaataattataaacaactaataagttcgttcacattcttttatttttctatactgtctttgaaatcctgtgtgtatttaacacttacagcacatttcaattcagaaaagccacatttcaagtgctcagtacctgcatgcagctagtggctaatgcattggacagcacagatctagaatggggtccaggaatctgtaggttgatcatgcatccagggtattctggcctacaagccaggttgagaacttaaggcagtccggctcccaccttgccttcccaatatccatatcctacccatccttcagtgccagcccaagttccttctcctctgggaagcacaggttgtctttgccatttatttggcactaatcatacatcaccctgtcctattattaatcttttcttggtgcacctccatttgccctttgttagccataagcgtctattgggcaagaaccccatactatatttcttttcatccccagagtacctaatccatttatttagtagcacactctgtgatttataaacatttccagactgacaacacacctgtccatgctgcatctgttaaagcctaaacttgggagatatttatctcatgtcatcattataaaacagtgaggcaggcaagaaaaggctttgctcaaggtcacactccccctcctgacagacaacactgctctcagtttatcacattttgtgtattgatttgcagctggacttccagttaaaacagatataacccctgggccatctcgattatgttctggagcacgacgttctttcttctgtaggatgaagtgtaacaggccttcagtaaaggttgaagacaaggacttcccctctacctgctcaaagaaaaaaggtaacaatttaacagtccattaaaaccctgtgacaggtgaagcatgctttctgcagcggagctctcagctgggcgttggttccatggtttctggctggccagagtggcaggtcccaggactgcagacaggaccctgcagtcctccctatgtgtagggcagttgggagcagaggagagagctgaaaagcctgatggcagagatttgtggagaggcctcctctgtttaaattgtgtttcttttaacatgattgaggaagaatactctcagccacaatcctaactgccttatgaacagccaccagtccaccaaaattactctgagctcaccagtgaccttgatgttgttaaatgcgatgaacatttttcctttgtcttccttcttgaagtgttctcttctcctggattccatgaaaccacattcttcttcctcctccccgaccccctgctgctacaggctctcttgctggcccctttgctggctgcccctctctgtcctgggctgcatctctgtctgcagtctctctctgttggtcatgtcatctactccctcagctttaaatgccaacaacttccacattcatatttccagcctagacttgtcttttgaactccagattcataaatatactgcttactaaatcaacctgctttggatatctcaggggagtctccaacaggatacgtgccgaagtaatcacctgagcctctcctccagcataaatggcactgccattcagctggctgctcatgctagaagccggggaggtgccctcacttctgcttcaccaccccactcttcaatcccgttagttatgaagtcctgccacaatgagtcccatctgcaaaagttctctgaaatgtttgtccctttccatgctgcctactttcactcagctccaggctgcccccaactctcaccaggtctcataaagtgtagacccacatgctccccacccccaacacagcagccaggatgatctttttatcagtccccttttaaaaacccttcagtgttccctattgttcttgaagaaaagctcaaaatatttaacgtgaccatgcagcccccgaccctgccactaagcacatgtgagccatgttgacttcctttgatgcctcaagccccttctgggcaatgcttctgcacatgctgtcgcttcctggttggaatttcttccctctccccatgaactcccttcacatggctctctccaacctcagactgccttatgtcttatagcaccctactggtttgctttctagtgctttcttatacttgctgttatatagttatttgtgcgattatttgtttaaagtctgtctcccccactaggctgtaaactccacaagggcatgtctgatttgtttttcactctattccagtaaccagcacagactccacgcttggcagacactccatagtggtttgcttgttggtgaagtctataggtgctccacatttaatgtgtcccaaatcgaactatcttttttctctctctctcttctagtctgttttctttcttctctgagtcagtgaatgacaccagcaaccacccaatccagaaaagttagagtcatcttcatttgtttctttcccttaagcctgatattcacagcaaatcccaacagtttgatctcagaaatttctcctgctttctttctctgctccctctcatcttcactgcactgccatagttcagtcctcctaatctcttgctgtattatagccactggcccctgaatcagccttcctacttctgttttctactgtcttccagttcatacgtcactctgctcctacagcatccaaaccacaatttgattttgctgtttctgcacttaaatacctgtagatgctctccatttcctgccttaaaaagacagaccaacattggttagaaagtaatccaaggcccttttaatcttcctccaacctgcctttccaatttgcccctcactcccagtacctccaatttcacttcaaccacacagagctcttggccagttcctatataggctgtgcctctgtgcctgtgtacgtcatcagcctttatacattctagtccctcagccactgctcatccttcttgatccacctcctctactggttttttgggggagccttcctctccctaggaagagttagatattccttccttggtgtatgtaatgaatgtccatggtataactggccctacttaagcattctgacactggatgacagtttgtttctctttccgtctgcccctttcattagatgcttacttctggagagtgaagccttgatttttttttattttttgactccctacctacatcccatcccaccatcggccgtgtacacctccatggcccaaacctagtgctgacactaaccacgaactttgctttctagcagatcgaaaaagcttctgcacaatccacagcacaggctatttgaaaagctggccacccacaaagatggggctggatgaagacaacgaaccagacaatgaggggtgtaacctcagctgcctcgtcgcaattggacgactgcattctcatgtagttccacaaccagtgaacggggaaatcagggtgaaatctatggaatatgtttctcggcacgcgatagatggaaagtttgtttttgtagaccagaggtaagagtctacatactacccttgagcaatgatggtagaggattttcaaccctgatctaaaaagcagagaagactgggccatcagctggcttttctaagaatgaagaaagaaagaaaaagctgggtgcagtggctcacacctcaaatcccagcactttttgaggccaaggtgggtggatcacttgagcccaggagtttgagactagcctgggcaacgtggcaaaaccctgtctcaactaaaaatacaaaaattagccaggcatggtgacacatacctgtagtcccatctactctggaggctgaagcaggaggatcagctgagcctcgggaggtcaaggctgcagtgagctgtgattgcaccactgcacttccgcctgggcaacagagtgagaccctgtttcaaaaaaaaagagacaaatgatgagagtctctgttaaaaaatgagattcaataggatatcatcataaatacagagatttttctgtcattctttggcatatagagacaattaagtggggtgccttgatgtccatggctaaaagaaaaacagtagggatagcatgctgtctgaatctatggaatgttccagaaccattattgtgattgaaattcttttgaatctaggacttggaagcaattatttagtcctgagctgtccaataaaatactcgttggccatggtagcctcccatgtggctaacggcacagacatagaacatttccatcatcacagaaagtcttgttggacagcgttgatctaatccaacctccttattttatggatgaagaacagaggccagcctggggactggtctcctgtaggattcacaattaattggtaatagacctggaccaaggacccaggtgtcccaaatttactgctgcctactgctttccctcagaatatgcacaggctaataatttttctggctactagagacagccacaacatgctggaaaaagagacagcctcagctgtcttgtggcctcagctgctgcagcttctggcatttggttgtcctgataaaaaggaggcagcaaaaactagaagccttgcactgaggtttagatttataccacattttaatctaattaatgtggttccttttttaaagacagatctcagtctgtcacccaggctagatctagtgcagtggcgagatcttggcttactgtagccttgacctcccgggctcaagcagtcctcccacctcagcctcccaggtagctgtgaccataggcatgtgccaccatacccagctcattgttctgtgtttttggtaaagacagggtttcaccatgttgcccaagctaatcttgaattcctgagctcagacaatctgcccaactcggcctcccaaagtgctgggatgacaggcatgaaccaccatgcccgactggttgcaatttttaaagccccctcagatttgatttcttgtgataatagtccctttacaaaggctttgctctgtttccctctatttttatagccttgattaaattcagatgcctgaaaaaaagagagaaagatccacacagtgagccctctgaaaatccatccagctcttttgcctgcagctttgaccttgctctcataggctgtagcagggtttatccattgcaaagttgcaattaatcatctgaatggctttttcttctttaaatattcctttattcccttttagggcaacagctattttggcatatttaccacaagaacttctaggcacatcgtgttatgaatattttcaccaagatgacataggacatcttgcagaatgtcataggcaaggtaagctaggatgtatgaaagatcttaagttgaaagtgtccccttgcttctagactagtcaacatgaccttccagggaaatctgtccactgaggatgtagagtcagccagcctaggactcttcaggtcagaacatctgtgtgaagaggaagctgatacctgcaggcactgtttatcccccttgtagttgccctgtgctgactgcatggcagtttctgaaagacatctcttgttcagagggttttcccagaccctgtaaagatttagtatggcccagactgatctgattctcttttccattcaagcctgcactacctcctgtgttttctgtcttgactaatgctgtggcttcatgtgcaggctcctgagagagaccaacattgaccccttctttcactgtgtctccaccagatcctgttcattcacctcagacatgcatttccaaaagtctactttttaccacctctgccatcaccctggttcaggccctcgtgcctacttagagacctgtgatagacttctcagggtttctctgatccctctcacccccagttcatcttccatagttatcctatttatccccagatagattgagcctggtaacatcagcctgcttaaaaacctcctgctttagactcaagcccaaatgcttttgacaggcaatcaaatgtgagaccttccaccttctggccccagcccacctcctcagtttcagtccccatccctgcctgcagaggcctgtgctccaggcacactgacctcactggcctctccccaaccagaccctgctgctcctcaggcactgctgggttcttccctccctccttctcttggcaaactcgtgttcatccctcaaggctctgatctcttctccctgtatagccttccctcactactcttcttgagggcaggagtcatagcctgtctcctcttgtatctccagtgcctggcacatgagaagggctcattacatgttacatgaaagaatgaggttgaataggtgagtagcctctgttgatttggatgttcttagaaatgagataagttctatattgcccttgggctttgtgattgagataaagcatgacattttggacagtgccttctcatttgctggtggtcatgttagagctgattccagttagatgtataacatgcagtcagtaattccctagagcctcaattttacagactatggaaaatcatgacagcttcacaaatgaattgaaaggctctgagttagaccctcagaaacaacctatttcctgagtgttgaccactgcagtttccttggcttactaaagagcgatgtcgttggagctcaagtacctttaatattttgtattggatgtcctgtttaatactttggtctgagaaaacaacaatgtccatgttttctttacattttcagttttacagacgagagaaaaaattacaactaattgctataaatttaaaatcaaagatggttcttttatcacactacggagtcgatggttcagtttcatgaacccttggaccaaggaagtagaatatattgtctcaactaacactgttgttttgtaagtacttttcctatatctgaagctccccttgcttcaaacagatgcctagggttcctcatctgggaaatggggtgcaggcaacatccagtatcacatcctttaatgccatcttgctaatacctgtgaagcctcaggactggcagaagctagaaaggattgttaacaaagggacaagcttcaggacttgtaccatgcaggccctggcttatgaaactgctccaggaaatagcaacatttccttccagataaagcagctaacctttgaattccacaggccctgcaccctaggcatccacttgtgctgctgtggaggaaggggttggcaatctatgaaaggctcattcaggcactagctcacactggccttggctgaggatggggaggtctccatacctgtcaggcagggggcccaagcactggcagctggaatgccatctcaaaaggctgctacctgctagatgagcagagggaggtgaaggagcctctctttggccaggcctgctccccacttttccttccccatagtgtccaaaaccccacctatggtaagagctgtgtgaggggccggggctaggtgcactgcaggctggcaggaggaggtgctgtaatgatggcagtaggttactgcagccaccacctctgctgaactgtgtcccacacatattaggaaggcctaggcaggcagtggggccaaaggccaggatgctatccattatattatcaaacagtgagacctgtttacccactcagacagacacttcattttctggcctgtccaggtccagagtggacaccggacaccttggccaagttgaatggtgcacagttctgagcaggcctgactcacgtttccttattgctgggatgttcacagagccaacgtcctggaaggcggggacccaaccttcccacagctcacagcatccccccacagcatggacagcatgctgccctctggagaaggtaactatgtgctgctggggccctggggcttgcccgtgggaaggtgcttgtggtcaaatatcctcccctaaagtattcagggtcccctccattcatattctgtggaacaagggaggcctcgaggggatgatgtgcggatttccccatgaatgcagaggacactgtcatgtcactttctctgttgagccggaatactaggagctcactgctgcacttcccaaagctgctggcccctggaagcccttgagctcgcaaactccctactccccttgtgctttcctcctgtgttggctagtggccatgatgtgaagtgctctttcgtgactgtcactaactcctgtggttggcaggcaggtgtctttcggcaccagggtgtgtaccatacccactgggctcccttctcaggctcagccttggccctgcccctgctgtccacgctggactcatccttcctgggaccatccccacatgcatggctgcagcccccatcgatgactcccacatccacatctcctggcccagtctctctcccgagctccagatctgtctctccaaatgcctcatagacagaaccacctggagtctcagaggcacctgaaattcagaatatcccaagctgattttctgcactcccctacctgattggttgtttaagccagaaacctggctgttgtctctcccccattatatctaaacacggagtcctgaaccttctatctcttaaacttcgtcaccactattgctatttcaccctcctcatctgctgcctggattattgcaaatcacttcgcaactctagtccccctctccccaccccatcctccattgtagttcattctccctgccgtggactttctaataacccagttctcatttgtgccttttctgtgtatcgtcctttggtactcctcattcccttgtggaaactgtccaaattcgttagtacggcatccaagaggcccctcatgatcggattggtacctgctgccccagtttcatctatcatgctctcatcatcatttatgatgaattccttggaggagtctcccaagttttaacctgcctcagtgctcctgcacgtgttggttgctgtgcctggaatgctttctcctccttacctctctgccaagctaattcatattcatctctcaagactcagctcggggttaacttgctccagaagctgcacctggccccagatgagttggttgcctcgtgcttgcctgtcaaacttacaacattttgctttagccattgttcatcttgttggttttcctgttaaactgtgagctccttgagggcagggacttgtctctgtaaccctggcacatacagtggtcttcaataaacgttttttttcagtgcatgaagggaaagaattagatgctgtatgaagggaaaaaactggcctcagatcctagaaggaaacttgagcctttccctgctggaatgccttttcctgacaagctgtagccctaaagtccctcaaggcacaactctgatgttgaactgcaaatggatcatgggataaactggttttactttaatacataatagtatttcttcctcagttttcccctttcctactctcagattcctttgttgtaggtggcccaaagaggacccaccccactgttccagggattccagggggaacccgggctggggcaggaaaaataggccgaatgattgctgaggaaatcatggaaatccacaggcaagtaacaccttctagttcctctgttaaaccagtggttctcaacccagggaaattttttcccccaggcaatattttgcaatgtcaggagacatttttggtcttcacaactgggtgggaggttgctacttaaacatcctgtggatagagaccagggatgctgcttgttaaacatcctacagtaaacaggacagttccctcctccccacccaacaaagaattatccaatccaaaatgttagtagtgcctagattaagaaatcctgccttaaataaagaagctaaaccaaaatagcccagcgctaaagagaattcttgagaagacttaactttcttatggctcaaggagcttctcagtgcggatagatgtacctttactttacaggaatgcaggagtagagctgtgaactatcagagtgatctggaccttaacaaaacattcactttttttcaatcaaagagctgcccaggattagtactagaaaccaagcagatcagctagttattactagctgtcttgggagagacttcctttccatatgaaagagaaggagcttagaagcagtccacctgggtctgagtcctgggcctgtctctctacctggctatgctgagacttacttaacctcttgctctctgttgatttaaaccataaaaagaaagcactatttcccaagaattgtgttaggattgtgagggcactcaggaaagttccaggaacacagcctgacatatagtgagtgcttaaaaattaattaaatctgtctttaagagcagtcgagagggaagcagttatcataagtctgtccaaatttggggaatagagaaggtggtaaccagattcttcagaacgaaacttaatgtaacataagaaaaggaagaaaacactgctgccgctggattctctcaggagaattagaggctggcctgttttccaattggccataaaggggctgttatccccctataggtaacacagctcttttccaaccccacaggattagtgggtgtgacttctgcatcaggaaggagacatgagggtagtgtgcagtgtaatcaggttcaaaccctatactttgcatttgcataccctgtattttgcttgagaccatccaagaacagtatcaaacagtccttgacctcaagaattttaaaatcttttataagtctattttctttatgataacaggaaaaagggagggtgcatgggccaaagcaagcaaaagaggaaagatttgaacttggccttagccagggtttgcaataagagtggatgttccctctagaaaagccagggctattcttgagtgggcatgtgagtggcaaattcagggtcaagaaacaagctacctaactgggcaggctttgtgtaggaaggagacacagagctatgataggcgattaagaaacacaagaaatgatactgtgcagtttggaagaaacctgtaagaccccatttgttgtaggatgctgaacaagcatccaaagtcttgtgttacgctttgtggaagttgcattggaatagggagagatgaaggtgggcatgtttgacaactcaggaatgaggccttatcctacagagatgacactgccaaaagagaaatcaatcatctaaggtctagcgtttgaagatgaaatcaggaatgatgaaacagcaattccaagatgagaaacctgggaaaatagtggtttcatagacataagtagagaaaggtgggggacactcagcaatttttccgtaagcaattagcagccgtttgtgcatgctgagaatacatgatatgtagttgtaaactgccgttaagaagcttctaatccagaaagaaaacttgttcactcataaatctagagaactaggcagtacaagaaccaaaagacttctgggtggtggaggagtggtctctgggtcacccaaaagctacattcatccatgtaggagctgagagtcctgtggttacacaactgccatcacactctccctaaactgtagctgcaatgccaagtgatggattctttcctgaggtccttcagcctgacaagtatttaggtggatttacagttctaagtcttcccttctataaatcttctgagagatatgctagataagaaaggcctggacccatttttcatcaaccactgccttcgaaggctgcttttcctgtcactactactaggctaccttttagaccctggtgccgtccatgtcctaagagtattcactagctaaacagtgtttgtggagaaggggacaaattgttttctgtggatcaaagatggaggttgatcttagaagttctcctccaattcacctggattctgtgaggaaataaaactggccacttacttgaaattcaccaactgaatgcaaactccaatccaagggctttgtcagtgagatgcttgactctagggactgcattctagatcaggtgcctgtagaacaaatccagcttgtcatctgtttttgtaaataaagttttattggaacacagccacaccgattcgtatctgtggctgctttcaagctgcagaggcagagttgagcatttgtgacaagacaccatatggcctagagagcctactatctggccccttacagaaaaagcttgccaaaccctaatctagatcttcatcccctttctcacctttaccccttaacaaagcacatacactccactgaaaaaagaaaaggcagtgtaattctcttttctgacaggataagagggtcatcgccttctagctgtggctccagcccattgaacatcacgagtacgcctccccctgatgcctcttctccaggaggcaagaaggtaagactgatgattcttagcctaagctagagaacctcttgcccaagatctgaaatgttgggggtgggagtatggaattgcaactgcgattgctgaaacaatttggactacttcctccttgaagtaaatgcatctgtgtgaggctggatacaaagcatactggtagggctagggaggcttgctgacatcctcagaggctttcttccatgtgagtggaagaagggagaaagaataaggaatggggaactgtcagttcatttaattgagggagcaattcaagagttcccatgagggaaagattattgagtacctcacatagaaaagtttctcattttctgccaggaattttcaagggagaaaatattagtgtctagggcaggcaatggaaacagcaatgccaccagcagtgctttggaaatcaagccatgctttatagctgcagaatacttggggatctgctgcctgggggttccattggtgtgacagcattggatccaagcagtggatcaatcaccagccctcatgaagagcttgctataagactacactataaataggtttaggaaccagtcatttgttttcatctttgctggagaacttataagcctaggcccatcttaatcgtaaattataaatctgtttatattgcctgatgccagtagagcttaggacagtttaaaggccatcattttggacacaatggcttcctttccccatctcctaaaacagagagagagaatatcaggaatttccataggcaggactcctagggcacaaaccatcaaaagcagggcaaggattttcaaaactgagctcctcggaggtttgttcaggttaccaagagctgtggtgttaccaggtgggatgggcgtggggatagttgctaaggagagagggtaagagtagaaatcctgcttctacaagggcagcaatacttcttttttatacaggaatcttctgcaaacatttctatttgaaaaagcgttttgctccccccaaaaaaggttgaaagttaacaaattaatgggtaagactacaaagtaagacctgggttcgaagcttggccttgccatgtgctagttatgtgaacttgtacaactttcaagccctagttttctttataatggagctaataatggttagggtagccagcatctttgcacgaggtcctactgtgagataatatatgtgaaagtgcttggcccaaaataccactgacagatgaagtctgagcttggtgtcccgtgacccccgcccccctgcccacaacacacacactgcttgccagctgtcttcttagctgttcttctgttatacctccaggtccttcctgcatattggatccaccatcttcttagggtggtcttccagtctctgcttcttaagttaacttttaggcacttgacttgactcctggtattaccaaggattctacttcttggttttgaaaggttatcagtccagtataggcttaaatattactcaaagaactttcatatacattgtctcatctcaccttcacaacattatagtgacaagatccaggctcctcagcgttcgttttataagtatggcccccaggctacaatcctgggctcatggcttccaattcttttcacatcaacaactaccagaaatcaaaagctgtgctctgcatcataaagccccagctatttttgaggcacttatgaaaattctcccttttctttgagaagaatggattataaaatggatctgtgagaagaaatttggatgtgttctcacgagatgagtcctgggcagcaggacttataagaaaagcagcttaaacaagacagttaaaactgacagcagtattaaatggtgcaccatacccagccctttccagtcactttcaaatttggaaggtccaaaaatgaaccatttagcctgcagttgtttgtcaggatcaagctaaaaaggaagcctaagtgagcctccataggtcgcaagagagtacagacatccagaagcactaaggaaaattcagataaagcagcagttctacaaatgtcatctgcagtctttttccagaaagagagggggcacaagatccttttaagggtctgcaaggttaaagctattttcttaataacattaaaacgttaattttttccctgtattgataatgtgcactattcatactaaaagcacggttgggtaaaattgctggcattttacaaaaatcagacaagtggcaccaaactatactagtagtcattgtattcttcaccaccacacactcacagtaaaaaaatagtttaaagccagtttcatttaagattgtccatcatggctaggtgcagtggctcacccctgtaatctcagcactctgggaagctgaggcaggcaaactgcttgagtccagcagttccaggcaagtctgggcaacatagagaaatcccatctctactaaaaaatacaaaaaaaattatccaggtgtggtggtgtacctgtaatcccagctactccggggactgaggtgggagaatcacctgagcccaggaggttgaggctgcagtgagctgagattgtgccactgtactccagcctgggcaaccagagtgagaccctatcaaggagggaaggaggaaaggaaggaagggagtgagggagggagggaaaatgtccatcattacttttataaaattctcaagcacacatctttttaatgctctgtgacaaaatgagaagtacacagaacttgtgctgcataccaaagtatgatgtttgtctcaaaaactacttgtgtgattaagttgtgagttgaactagctactattttcattggacaccatttttattgtatatggtcattcggttttgggtatttagaatactttttttttggaaatgaatgaagtgaacctgtcactttaaggaaaatgactgacatttgttgccaatgataaaatctgagctttcaagcaaaaattggaatttttagaaaacttgtctctgctactttgaccttgagatcttcctaaaacttaaaaaatgttgttgatgagatagggagtattaataatagtgatattttgatgctctataatgaaatgtgtcaatatatagaagatctgcataactcagtgaaccaatattttgtaactaaacaatgcaaggtatttcaaaatcatgtaagggtaaaagatccatcctaagtgccaagatataaagagtacaaaacattcattgatatggtttcagattccacattgcaactcacctttaagaaacttctacgtgtcaagttttgaagtggtatcaaaaaagaatacaattatttgaaaagtctattaaaatatgcctcccttttccaactacttatctgtgggaggttggatttccttcatatacttgaatcacaagacgtatctaaatagactgaatggaaaaacatatatgagaatccagttgaaaattattaagccagacattagatttgcaaaaatgtaagataatactctgcctggtaattttttgttactgttttagaaaatagttatttttcattaaaatactattcattatttatgttaacatgtagcgggtttattacatttaagaaatctattagttttaatttcaaatacagtaaatattgataaatacagcctacataagcaaaagttctttggagtcctcaatgatttttttaagagtgtaaaagggtccctagaccaaaacgttgctgtggaaataaagtaagttataatgccacctgctggcaaagcctgaaatcattgctgctcctgaaagcagcagctaccaaactgtttcctcacgtatatccagataggtctcaaagaatgctcttctttgagactcagccaggggaaggcagctggggtgagtgggggagattttgagacagagttctcttactgagtagtagtaataatcctccccagtagcctgtcttaacttaaaccacaggttactgaagttggcacctgtagtataagagatttacttctgttttcttcatttgactccttgagctgtgtctcttcacagcttgttaactccactttttcttcttcagaaatatctgtcactataagatgttttattcccttataggggaaacgtctagctgggctcattgaagtttaggcattggtcctaaagaaatatgtgggcatcatgattccaggcagttgaatgctcttgggattttattcagcctttaagttgcctctgtgggctcactaaaatggagagaaaagaatagttcgggggagaggttttttcttactctgaccatgtctgtctaacagttccttgtttgaaatcatccaatagaaaactgaagccatttgaagcttctccccaccccaccccatgcttcattttccttttggcattgctcataatactgattcaaacttcacacttccctccttttgtttgtagattttaaatggagggactccagacattccttccagtggcctactatcaggccaggctcaggagaacccaggttatccatattctgatagttcttctattcttggtaagtggcatcattattcgtttccattgcaatgagcttgcaaaacatcttacataaagtcaattttaagaactgaactgtgtgaaacaagctaatcctagataaatttgataggaacagaataaaagtttaaaatttgtttaaatctctaaaaagttgaccagtatttgagttttggtggaggtccaagtttgtgcctggaactcaagaggaggctacagctacctagacataggctttctcccatgtggggcataatctcttcagagagagaaggctaatgaaggttcagagataatgcctagaagggtgattagtaagcatatcagaaggtattaaaagtcattaagtgaaaagagtttgcttttcccatcacatccatctttttctcccctgggctttctagatctgtttttttcctaaactctcccttcctatttgcctttctttttgtaactcctcttaactggttacatcagattattaaaataagcttgactcaaatatttttaacatttactaaattttaagcgctttgtacttatttctaaaatgatcatttgattccttagagctgtctcttcacaacgtaaccccacttatttcttacgtatttttaaaaaattggttctttcctctaaaaaacagcgatataaaaaaagatagccatgcagcccaaaaagcagcatctcaccctaccattaaatgtaactttcttattaaaaatgtgcttaggaattgcttacttaatctgaagatgctttaaaaaagaaatcactgaccagtctttatctcctcccacaggtgagaacccccacataggtatagacatgattgacaacgaccaaggatcaagtagtcccagtaatgatgaggcagcaatggctgtcatcatgagcctcttggaagcagatgctggactgggtggccctgttgactttagtgacttgccatggccgctgtaaacactacatgttgctttggcaacagctatagtatcaaagtgcattactggtggagttttacagtctgtgaagcttactggataaggagagaatagcttttatgtactgacttcataaaagccatctcagagccattgatacaagtcaatcttactatatgtaacttcagacaaagtggaactaagcctgctccagtgtttcctcatcattgattattgggctagctgtggatagcttgcattaattgtatattttggattctgtttgtgttgaattttttaatcattgtgcacagaagcatcattggtagcttttatatgcaaatggtcatttcagatgtatggtgtttttacactacaaagaagtcccccatgtggatatttcttatactaattgtatcataaagccgtttattcttccttgtaagaatcctttactataaatatgggttaaagtataatgtactagacagttaaatatttttaataaatgtttcccttgttctataaa

SEQ ID NO: 1140 - DNA, 56006 bp, Homo sapiens
gaggaggatttggaagacccagagcgggatgaaacgggacagagccctgaaggggcagggatgggggaaggcggaggagtttctactgaggccaggggtggggcatcgcgccagggggcggggtctgaggcggtgaggggctgggggcgtggcctagggggccggcgaggggccggggaagcggcctgacgcggtgcggggccgggaccggggccggagcctggaccttggcggtggaggaaggcgaggagccgggggcggggccgtcccagctgaggagcggagagcggctggagggtcgggggcggggcgtgcggaggggcggggcgtgtggaggccgggacggcgcccccggccggcggtgaggccggctcagcgcggagcagctcagtgccccccgcgccccgctccggcagctccacgctcgcgcccgccatgccggagcagttcagcgtcgccgagttcctggccgtcaccgcggaggacctcagctccccggctggggccgccgccttcgccgccaagatgccccggtaccgaggggcggcgctggcgcgggaggaggtgagggggccgaggcgggaggggtcgggggtcggcgccgggcctggccttgacctccacaggcgtgtcgcacccgagctgcgatggcccttcaccgcgccccgaaacctgccccctccctaggtctgggaggaccgagcgcatctccaacagctgcgtcctcaccgtcgaggcgggggaaggcccgagggaccgttttggggggcctcgaggtctcttcgatgacaaactccacaggtcgggggacgtaccccaagtgccccgcgtgaccgcctcatcacatatgtgtttgcctagcgccttccagcctcagtttgcgttttcatcttcggagccccacaagtgtgccccccgagtcactccccttctgagaggcaggcttcccgcctcagtcctgaactttcttccccccggctgcagagaggccccctcccgcttgcggctggttcggagatttggcccgcgtttgtggaatgaatgcggatgggaaggcgccaggagccggggttcaccttggccgggctgttggcaagtttatcgtctcctctcccctcccctctcctctttgtctttcccagcaaagcgtcccaggccttttctttcggtcttgcaggctgccccaccccattcccatgctcttcggagttccttccattcctcttctctgaacctgctgcagctttccgcagctcctctgcaaagaatattctaggacagacaccccgtggccttggtccaacggagaataatgtgtttttgcagctccccatccaaaggatgccctcaatttgggtggcattttggacctcagcaacggctctagccttccacccttcaccttaagtgtactaggcacccactgcgtggcagatacaaagctcagtagttcataacaccctgcgccagtgtcaggaaatctgtcctcttctctcttgtcagggtgaccctccatctcggagtctgtttgtatcactttgtaagggtgatagaggattgtggaaggagcatcgactttggggaaggcagaccttttttctttccttttttttttttgagacggagtctcgctgtgtcgcccaggctggagtgcagtgacgcgatcttggctcaatgcaaactccgcctcccaggttcacaccattctcctgcctcagcctcccgagtagctgggactacaggctcccgccactacgcctggctaattttttttttgtatttttagtagagacggggtttcaccgtgttagccaggatggtctcgatctcctgacctcatgatccgcccgtctcggcctcccaaagtgctgggattacaggcgtgagccaccgcgccggccaaggcagaccttttttcaaacgctggctctgcagtttgccatttgggtgaacgtgggcatgtgacctgtcctgtcatctgtggaatgggggtaataatgtgtacctcacatgagacaatgcatataaagcatgcatcttttttttggagacagagtcttgctctgtctcccaggctggagtacagtggtgcgatctcagctgactgcaatctctgcctcccgggttcaagcaattctcattcctcagcctcccaagcagctggaattacaggcatgctccaccacacccggctaatatttgtatttttagtagagacagggtttcaccatgttggtcaggctgttcttgaactcctgagctcaggcagtctatccgccttggcctctcaaagtactaggattataggtgtgagccgctgcactggcccatgcctcttgataaatggaatgattatcgtcagattaatcggcagatctctttagacagtgattgggtctcttttgtcttcatttgtctcacagagcctcaccttgtctcatttgtctcacggagcctagcctactactttgcacatagtaggggtacatgttttattaaaataagaagcagccggtcagatttggcttccttccttgggcagagtccactgcctgtggatgtgggttatattttactgtggggctcacagggaaacactgctgtccagcccatcctttggagagcttcctgagatttgtcttcatagcctcacatttcatgacccagaatagctcagtgccatccacattcttagggatttcatggttcatcctcctccccaggttgttcattagaatcttagagcaggagaaggggctccaatatgaaccttatccatggacagaaatgcccatttatgcccatacatctggccttgcctggctgtgtaagtgtaagcactgtgtgttgggggagggacccttagaatgggtctggaggccacagcaggctctgttcagggctcagctttgccccagttcaggcaagacaaaacccatcctcctttgccttcagatttttggtttggtgcacgtagaggttcattgttacaacagaaaggcttgcggcacccaaacacagcttttctcttcagcatctcagggcccaaaaagttagagtctgaactttggattagacttccctgaggtttcctgtttggttttgcatttgcatttatattttgcgattatattgtgtttacatatagtttgatgctgcaattttttcccccagttctgggcttgactaacccacccccaggcttgtagctctatttgactgaatcaaaatgcaactgattcttaagtcaagtcttccagttctgactggtttcctgggagtaactagggaccctgtcctgggactcgcagcccttttgtacagtcctgctgggaaggaccctgggcagatcacaggaaactagaatgtcagggctgagggacccttttaagatagagaccagctagaaactctctcagataagatggagtaactgatgtccagagaggccaagagacttggccaagctcctgcggctggatagtgggaaagttagcatttctacccacgtgttctacccccggtcctgttctctttccttttaaagtccatctgtctgtcctccctacgtaacttctctgaaccttgttattttatccttaaaatggatctcttaatcactccctgcttaccttactgggttgttaaagttttttgtgttcaattatgaagcaccatgcaaatgtgagggagtatattaagatagtcattacgtcaaccagcctcttcctgtcttgggcccctttatgcccatcatctcattgatattcacaacaacaggtgaaaccgggcctagggcagtggaggcagctgccctgtgtcacacagtgggtctctctgactctgctgtgctctgcctgggctctgtccagctctctgtgccatctctatggacataaaggacactaaggacataaagatgctactttgatttgctgactgactagggagaagtagcctgttacagggagatcagtaagaaccccaggagtttgtcctgagtccccagagaaaggtacagtcaatgccataagaggcaagtggagcaggagagggagagagcagtaaggactggtgcaatgagggagaagttcctggaggaggtgacacttccaggtggaaggatagatgaaccccatttatcggagaggacaagggagtgaattcagagactggtgggaagagagcatattgggaaccaagtaagccattttgaccagagctaagaattcatactatattgtgtgcctcaaactgctagtggacacaccccctccagtaggtctcagatgaagcagtctgccacaaataggagatcttcaaaggcttgttttgtatatatttttgaaattttaaaagaaagttttaattggacaagtggcataatttattattattttattttttgagacagggtctcactctgtcacccaggctagagtacagtggcacaatcatggctcaccacagcctcaacctcctgggctcaggtgattttcccacctcagcctcctgagtagctaggattactggcgccggcttaatttttgtattttttgtagggttggggtttcactatgttgcccggctggtcttgaactcctgggctcaagtgatctgcccacctcagcctccaaaaatgttaggattacaggcgtgagccactatgctcggccagggcataatttgtaataagtaatttaaaacataacagaaaaggcctatgaacaactatctcaatccctgtattctccccagaggtaattgctatggaaatgtacatgcttcccaatgtatctcctcatggaaaatatattatcagtgggggaatgggagtggctgggggaatgtttacctaaattggtatcaggtcttataatgcacagtttaaattgttttggagttacatttttcttttcctttgtgacttttgcttttttgaatcttgttttagaaaggatttccttcttaatttttaatattcttgtgaattttacagtttgctttgtaaaatgtattttagtgtaaaaattgtgtaatcttagagattgtttgcaagaaacataaaccctgtcaagcttgtttctgttggagggaaatttgtttgtttgttttttgatcgtcagagaagaatattgagggaaattggctttaaagaattagaggtgcctcatgagactgaagagccggaggtaaaagtacacctctccagggcctggaactggaggctgggaagttgtcaggaactaaggcagctgcttcgtcattcttgttctctcctgcctctgcttccctctgcacatctgatcagtgctttcgctcattcatcatcacataggccccaaagcacagcccccatgctcacatgacctcactgggccagtgtctaaaggtaaccggacactagattgagccagtctcatgtcccacttccaagttcctggcagaggttgacagcccggcccagtttctggattgggtccagtggctgggtctccacccctggtttcatcagcagaggtcatggagggaaagtgaccggcagggtaaacatggccattgagacctatggtgtgggagggggcgcttctcagagaagaggggcagggcctggaaaatcccctcagaagtatctatggcgattcctctttatttcacacagtccaggttccagggagaggtgctgtgtccatcctgttctgtacctccctggtttagatcatttatgcatactctcaggtatagaagaacccctttagaaaactcaggtataggagttttttcattttttattttttattttttttttgagacagagtctcactctgtcatgcaggctggagtgcagtggcacgatctcagctcactgtgacctccacctcccaggttcacgccattcttctgcctcaacttcccgagtagctgggactacaggtgcccaccaccacgcccggataattttttgtatttctagtagagacagggtttcaccgtgttagccaggatggtcttgttctcctgacctcgtgatccacccgcctcgtcctctcaaagtgctggcattacaggcatgagccactgcacctggctggagtttttttttaagatagagtttcactcttgtcacccaggctggagtgcaacggcacgatctgggctcactgcaacctccacttcccaggttcaagcgattctcctgcctcagcctcccgagtagctgggattacaggcgcccgccaccatgcctggctaatttttgtattttcagtagagatggggttttgccatgttggccaggcttgtctcaaactcctgacctcaggtgatccacccacctcggcttcccaaagtgctgggattacaggcgtgagccactgtgcccagcagtttaaaagatttaaaagatgagattagaatgctaagggggtgcagcaagacttggagggttttgaatgccaattgagcattctgactttttgttgggcggtgtggaccagtggacccaatcatgttgctcaaggaatggatggggttggccctgccagcatagtgcctgggggactgctccatgccaggccctgtatgaggcactgggcagatgcatcgctcagttagagatgcagtccctgccctgtggaccttacagtcttctggcaaagcccaacagtaagcaggtaaacaaataagtcacagccgggtgcagtggcttatgcctgaatgccagcactttgggaggccgaggtgagaggatcacttgagcccaggagattgaggctgcagtgaactccgatggtgccactgcatgctagcctaggtgatagagcaagaccctgtctccaaaacaaaacaaaacaaacagaaagaacaaataagtcagaagttgctcattgtactaagtggcacgaagactcatcctcctcgtcaaggccttctttgaggtttgttctgggtcctcatctcttcagggaatcttgtccacacgtgtggccttagttacctcccatctccaggtgactcacacatttgtacctgtagcctagatcctcatgtcccagtgcatacttgaccacactcctaacttccctcaggctcccttccagagctgttttcacaatgagtggtgcgacctctcacctccacgtgtgcccctcatcaccaaggaacatcttcttttttttttttttttttttttgagatggagtctcactctgttgctcaggctggagtgcagtggcgtgatctcggctcactgcaacctctgtctcctgggttcaagtgattctcctgcctcagcctccccaaggcagatggatcactggaggtcaggagttcgagaccagcctggccaacgtggcgaaaccctgtctctcctaaaaatacaaaaattagctgggtatggtggcacgtgcctgtaatcccagctacttgggaggctgaggcacgagaattgcttgaacccgggaggtggaggttgcagtgagcccaggtcacgccattgtactccagcctgggcgacagagcaagactctgtcccccgacaaaatattattttattaagatctaatttgtcaatagattttgacttctatgagaatagaaactaatctcactgttgtgtccctagtatttaccatagaaccatagtgtgttttcagaaaatgttggttgaataacaaataaatgaaagaaaaaaaaaaactaaaaaggagcattcatagagaataatggtatgggggtgctccagatggaggggacctcttaggcaaaggtcctgaggcagtaaagaagctgaaatatatgtgaccctgaaagggggcccaaggggcaaaagcactgagatgggcaaagggaagagtggcacctgctgagtttgggtggtggtggcaaggccatattcaagtttgatggccctggtagtgagtttaagttttatttagtacacaggcaagcagcataatccagtttgtattttagaaagatcatatcagttgctgtatggaaactagattggaagggccaggagaggacccaaggaggccattctgttatttagggaagagatgatggtggtgtggatcgggttgtggttggtggaggaggagagaagtgcacagattgtagaagtgttttataagcagtcaagatttgtcgatggagtacatgtgggcagtgctcaagattgtgtcccacatttctttttttcttttttttttttgtttgattgggatggagtctcactgtattgcccaggctggagttcagtggcaccatctcggcttactgcaacctccacctcccgggttcaagcgattctcctgcctcagcctcccaagtacctggggctacaggcgcccgctaccacacccagctaatttttgtatttttaatagacatgaggtttcaccatgttggccaggctgttctcaaactcctgacctcaaatgatctgcccgcctcagcctcccaaagtgctgagattacaagtgtgagccactgtgcccggccttaaatttctgatggaagggtgccatataccgagaaggggaaatctggcaggggaacaggtttggggagaaatcaagaattctatttttttttttaattttttgttttttagagacagggtctccttcttttgcccaggctggaatgcagtggtgcagtcatagctcaccacagccttgaattcctgggcttaagcaatcctcgtgcttccacaggcacatgccaccacatccatgctaatttgtttcttctcttggtaaagatgaggtctcgctgtgttgcctaggctggtttcaaactcttgggcttaagtgatcctcttgccttggcctcccaaaatgttagggttacaagcatgagccacttgtgcctggccaagaattctatctgtatatctttataggtcttgagacatccaagtggagatgtcaagaaggcagtatgtgagtttggaattcaaaggagcgggctggagatacacatttgagagctgttagcatcgagaccgtgggtttcaaacctgcatctgtgtcagaatcacttggcgtcattcccagagagtatgattcagtggtggtatcttaggctttttatggcaagcaagagaaaccatcctgagctgatttaagcagaaaagggctgcactgaaagggaatgttcagtagttcacagaatttctgggaagttggaaaactggggctgggcagcaggcaggatctcagccaaaatcatgccaccgagccagtttggcaggacactgctgccacacactaaatgccatcgctgtgtcactgttccctgaacactagacaccattgctgtggttgccaccagcattggaatggatcttccactgtgctcctgattcaaagtctgtagtgagggcttctgattggttgagcttaggtgtaagggaggctggaaaagcaagaatttgttgttttcagctttcacaggaggtgaactctgccaagacctgtgcagtgaggaagtccccagacataggaaggaggtcagatgccagactggcacacaatgacagatgtacttgacagcaagtttgccagcttgtgggattgtctgggaatctgcatttaaaccagcaccctggaaattcccatgcaggtgctgcctgaaccacatttgcatccattgcttgaactggtacttaaagctgtgggggctgggcgcggtggcccacacccgtaatcccagcactttgggaggctgaggcagggggaccacttgaggtcaggagtttgagaccagcctggccaacatggcgaaaccccgtctcactaaaaatgcaaaaaattagccgggcgtggtggcacgcacctgtagtcccagctattcggaggctgaggcaggagaatcgcttgaacccgggaggtggaggttgcagtgagccgagattgcgccactgcactccagcctgggtgaaagggcaagactatgtctcaaaaaaataaaaataaataaataaataaagctgtggaatggacaagatcacctagagagaggaacgaagaaggcccagacccaagccctggggaccctcggtatcaagagattgggataggaagaggaattaataaaggagaccaagaacgggctgtcagtggggaaggaaggaaataagacagtgttgtgcctcagaagccaggagagaagtgttccgaggagaaggggtgctcggctctgttagatgctgcccagatgcccagaggtaaaataagacaatgacagagacacagcctctggctttggcaacacggaggtcattgggaaccttaagagcagatttatggctcacgcctgtaatcccagcagtttgggggactaaggcgggtggatcacctgaggtcaggagttcgagaccagcctggccaacatggcaaaaccccatctctactaaaaatacaaaaattagccagccatggtggcaggcacctgtaatcccagctactcaggaggctgaggcaggagaattgcttgaacccgggaggtggatgtttcagtgagccgagattgtgccactgcagacacagcaaggctccatctcaaaaaaaaaaaaaaaaaaaaaaaagagcagatttaatgccattttcgcctccacaccatcctggactgatttgaggagggggcagatgagaagttctccctagaaggggagcagagacatagggtgtggctagggccctgggatcagcagggttttctaggatggactggggacccaactccactgaaccagcctcctccctaccaacagcctctgcacagggggccgagggtcttcccagagttgtcaaccttgagcctgtctctcaaagtctccttctctccccaaatttgtctttttttgtgctcacttccttgcctagtgttcagctgtttctggccactgaggtacaaggagacagatgactcaggcagatttggaggcagaaactgtaactttaggtcagagcagaaggaacatgctttccctgaaggcaatttgatcatatcattctcagacaagatgctgctagaaggtcccttcgatgggcctagaacttgggcccagggcagatgagggagtgagacccacaggggaacagtgagtggcttctgtgactctaggtcagggccctggaaaaactgattccacctcaccaacgtcacaggaggtgctttggagggcatgggaggctgagctgggaacagctgctgaaggttctctaacttgactggttttagaccttgaaagagcttttaagaatctcagctgctgcgggctacacccagacccactgaatcagaatctcccaggggcgaggcctgggcaagtgtgcagttcagaagttcccaggtaactgatgagcagttggggtgaaaactattgtggtaagctattgcatgcccactgaaggttagtaatccattaagccatatttactgaatgcctgtggtgtacaaaggcaggctctgagggcacggagagaactagacaaggtctccttctgggtgggaggactctgccagtgaaaagttgattgacaacctgtagcatacagggatgtggctgaggtctgtggcgagagtccagtaactaaagtcagacagacttgggtttgaattcctattggctgtgtgactttgggcaaatgacttaacctttctgaatctcagttttctgatctgtgaattagggatgaagataattgtcttatgggtttgtttgaggggataacacatagaaaatctagcaagcatgaacctagcacgtaacaggtacttagtaattttttaaaattccctcttactgtaaacacaagtacacctgcacatagggtagttaaaaagatcaggaaacatacagagaaaagaggaaagtaattgcaatagggatgaggtaattaccatgagtgagtgttgagattatctgtgcggtcctggcaccagagcaaaaagagaaaccttatgtaccttggaggttttggggaatgaacagctaagcctgattttggacaaggcagggtcttccctcagctctgccctttgctctctgcctcctgttcatttctttgtcaaacatttgctgaggccagtgtggtggctcatacccgtaatcccagcactgtgggacgccaaggtgggaggatcacttgaagccaggagtttgagaccaccctggtctcaaacaacaaagcaagaccctgtctctacgaaaacaaaacaaaacatttgctgagaggctacctagcagttctcagtcctggctgcaccctacaatcccttaggttgcttttaggtagatttcctctcattcaggtaaaattcacataacataaaactcaccattttaaaatgtacaattcagtggccttaagtatattcacagtgttgtgtagtcatcaccactatgtaattccagaacatttccatcatcccaaaaagaaaccctgtattgattagtagttactctccactccttttccccggcccccgacaactttccatctctatggctttacctattctggacagttcatgtgaatgaaatcctactatatgtggccttttttgtctgatctctttcagttgcacagtgttttcaaggttcatccgtgttgtctgggttgtgttaaaaagcaataaaaataggaaaaacaaacacaccaggcagtgttgtaagcacttttcagatattagcacatcataacacagggcctgtccagttatttggatacagagaaggtgtctgctgggcaggaatagctaccatgaagccctttctgtgtgtattatgctgggccacgtgcttaaatgcctgactgagttcagtctgattagatagatgctgttattatgccatttgacagatggggaacatctatcagagaagctgtgtcacttgcctcaggtcacacagctaagaggactggaaccagaatttggactttaggacagtatgacttgaaagccggagtccttaacccttgctgtcttttctatattgccactgggccttgctagtatgtattcatacatttaatcattcattcattccacacatgcttattaacacccacatcctgagttttgtgttgagtgctgcagatacaaaggtaaatgagccattccctgcctttctggagttttcagccccgtagagatcagacatgtatggcaaataagggccaggatactctaatgaaagcctgtagtgggcataggatggaataaaggtaggcaggatcagttctgttgtggtggggagggggtgacctgtaagttgagtcgggaaagatgaagtgtttactagacagaatggggcaagggccctccaggcagagggagcagcatgagcaaaggtctgatggctggaaacagtttggcatatttaggaaattgccaagagttcaatagggatggttttaagggaccagtgatggatagcaagcccaagtggggggcagggagggattcatcctggccaacaagggaacccagaaggtgggaagtactgtttgctgctctgtccaagagggcaggccaggttcttccccaggattgggtggaattcagggcttgaggccaggggtcgggtaggaggaaccttccgcggttagtccagcaaagttcttgttctcttagctcatcaccgccaagcaatctcctgaggaaaatcccagccaggaaacttggggtttgcagaggcctcagcatacatcgagggtgtggctcccttcttgcaacccctcttcctccctgcttcccaccaccccacaagggacagccggtaaggctgagctggtgaggctggacaagtgcccaggctgggaagacgtctgcagaggcctgaccaaggggcgcacggccagtcacaggccccagcagtgcaggaaggaaaacagcaagaggccaggggatcctgaaataataaatgtcagagcatacaggagccttccctgtcaccacccaaacccttcattccagaagaggagtcagaggctcagggtgggaaggagactggccaggtcacaccgcgagacaggggcagggctggggctggccctgggtcctggctcccaggccttgcagtgtagccaccgtaggggctgtggggtggcaagcagggccaagggccaccttggtatggatgaggcagaggggtagctgggaagagcactgccctcctctggcacccccttctgccccagcctggactctcaggtgctgggggtgggggctgatccagaggaaaaccatttggagtctttggctcactcttgctggtggctgaggttggagcagccttgtagggtatgactaacctcaactgtgtcctagcgctttggcctggaaggggatttagagctcgtgtctgttagctcaaaattggacagatgaggaaactgaggcatagaaggaggaaggaactcgctcagaggcacactgagggcttaatggcagagacagccctaaaattcagcactttccagttcagggctcttggtctcatggccttgttctatatgcagtagaaggccattctctcagaatgtttctgcagcacctctgaagatgcctggcttccaccattagaaaaaacattacctcaatttcttttcacagcaatccttacagagataactggggctcagagagagaagatttagctcgtagtttgctttagtgtgatagcaagaaagggctctggaggcagaggtctctgcgtttcttagaacttcctacatgaccttgagcaaactgcctaacctaccccagcctcagtttcttcatctgtaagatggggaggataataactacctcacagagttgttgggaggaataggccaggtaacaaacataaaatgcctgccccaaagtgagcagtcagttagtggggcgataggtagttgaattcatgctaataatagactcaagctgggagcttggaatgggagtccttcctgttgggtgatctgctccgggccagggcctggctgtgttcctatcaccctgtcatgcctgggggacaaggctgaaccctctttgtcccgcttgaacatggatctgcagcccagccctggagttaaactttctatgttgagaattaccaagtaactgccctgttcagaacccttcaggagcaccccatcacttatagaataaaacctagaggtttggttaaaagcatggactctggagcccaactgcctgggtttgagtttattttatttattattattgttattattatttttgagatagggtctcgctctgttgctcaggctggagtgcagtggtgcaatcagagctcactgcagccttggactcctgggctcaagtgataccctaccttagcttcccaagtggctgggactacaggtgtgtgccaccatgcctggaaaattgttttgtattttttgtagagacagggtttcgccatgttgcccaggctggtctcaaacttctgggctcaagcaatccacccacttgggcctcccaaagtgctgggattacaggcaggagccacaacacctgacctgcattttctgtaaattggtaattggatctagaagtgagaagccctgggttttttttgtttttttttttgtactttatcattttgttaaatattttaagtgtaacttggtttgctcattcaggtattgtactttttttttttttttttttttgagatggagtctcactctgtcacccaggctggagtgcagtggtgtgatctcggctcactacaacccccacctcctggattcaagtgattcgcctcagcctcccaagtagctgggactacaaaaattagccaccacacccggctaatttttgtatttttagtagagatagggtttcaccctatctcaactaaaggatggtctcaaactcctgacctcgtgatcctcccacctcagcctcccaaagtgctgggattacaggcgtgagccaccgcaccctgccaaacgttgtatttttagcatcatgtttaatatgtagtacatataatttaatcatctttgtggacactggcgtcagagaccaaagagccaggattcagccatcccacaggaaaactcctttttagcgttggagtttcattgatcttcccacatcacgtatactgttagtattgattgattgaaaaatatgggaaagaacaaatgaattcaagaatgcttttaaagggttctgtgtcttattgatcatagagttgcacatatttggaatgtggtcagactaatttgtgaaacatttttatactcgtcagtagtgctcatgatgagtgtggcttcacagtgtcctgctagtaacaccatggaccttcagggtctgggtccattgcctggaaatgaacaagggagttagagtcttaacggtttagttcccaggtccacattttggctgtgtgagctcaggcaatgatcttcactgttctgtgcctcgctgactcatcagccagatgggaacaaaaatgatgactgccccattaagatgctgtgtgtctgaaatggtgggtgtcaaactcccttacaaactgtaaagctctatacaagttttaggttgtattttttttttctttttctttttttttttttttttgagacggagtctcactctgtcacccaggctagagtgcagtggcgtgatctcggctcactgcaacctctgcctcccgggttcaagcagttctctgcctcagcctcctgagtagccgggactacaggcacctgccaccacacccagctaattttttttgtatttttagtagagacggagtttcaccctcttgaccagggtggtcttgaactcctgacctcgtgatccacctccctctgcctcccaaagtgctgggattacaggcgtgagccaccacgccgacctagtttgtatttgtttcttagtttgtttgcatttccagtgaaacctggggcaagaaactcacctgagcctttattttgcagtctgtaaaatgaggaggtaatgttagataatctctaatattctgtgacttcgtctcttaaggaacaacaccatagtccaaagcaaagatagaaaatgtttttcatctcctctgccaactctagtttaattggtagaggctaccatcatatcttaacagaatgatgaaccaaatccacagtcagtggggaaaacactgtgatcgattaataatggctataatgggccaggcgtggtggctcacgcctgtagtcccagctacttgggaggctgaggcaggagaatggcatgaacccaggaggtggagcttgcagtgagccgagatcacgccactgcacttcagcacttcagcctaggcaacagagcaagactccatttcaaaaatagtaataataataataataataataataataatggctgtaatgggccgggtgaggtggctcacgcctgtagtcctagcactttgggaggctgaggcgggcggattacctgaggtcaggagttcaagaccagcctggccaacatggtgaaacccctgtctctactacagaaaattagccaggtgcagtggcgcatgcctgtaatcccagctactctggaggctgaggcaggataattgcttgaacctgggaggcggaggttgcggtgaactgagatcacaccactgcactccagcctgggctacagagcgagatttcatctcaaaataataataataataataatggctgtaatggtcatgggatgacacagaagtgataactatgtactatattataatggtccaaaggaatgaatgtctaatggtgaaatgtaatctgtatctcccaaggccttagctctagcagctctgcccccttggcttgagttgccttggtaaccacagctggctctgagaaaccatgggaatgaagaatgggtcctattgatgaatcctgacccagaagggggcatgcagaaggcccttctaggcagggcagctgggcatggcctagtgctgccatctgtggtcttttgcctgcagagaacacaaaccagagagccagagcatggtgtgtgtgtatgttgggatcagggtaggggacacaaagggcagtgccagcagctggaatttaggccttgtttagggccagccagggtaggctgcccaaaggactccagtgggctttccaagctcagacgtgtctcttacactaagatgtgtttcagccacctttgcccagtgcctgccaggctcttgcatggatccattgactcttagctttgaatgaaatctaaatagctgtccattctaatccaaaatccagtgtctgaatcactctctagcacctaaagtatttgaatacttcaagtgacagggagctcactgccttcaggggtggcctgttcttccttagaaatgtcccctgtttgagctgaagtctgtttctgcctccctaacttccacctctcagtcctgggaatcctctctgaggccagcctgaacaaatccgttttcttttcagtaggacatcctttacagtgtttgtattcggggcctcaccattgctgtcaaccttgttttccttggacagatctccctctgtgccctgccttctccctttcctaagcctgaggggatggtgagggaatatggtagaggtggtagaattgggatttaggtttggaggcagatccagtcccaagatcaaataagctgtgccccctaactttgtggggcagcttagagatggggaaagaacattggccctggatttggctagtcctggatttaaattgtaactctgggccaggtgcagtggctcatgtctgtaatcccagcactttgggaggccgaggtgggcagatcatctgaggtcgggagttcgagaccagcctggtcaagatggcgaaaccctgtctctactaaaaatacaaaaattagctgggcatggtggcacacgcctgtaaacccagctactcaggaggctgaggcaggaggatcgcttgaacccaggaggcagaggtggcagtgagctgagattgtgtgtctgcactctagcctgggcgagagtgagagtctatcccccccccaaaaaaaaagaaagaaaaaaaagaaaaaaagttacagctctgccactgttcatcactgtgtgacttggacatgttcctcctcctgacagcttcatctttaaaatgggaatggcaatgccttcctcaaagagtggccaggatagtgacaagtaatgaggctgcacagagcaggcacttgggacatgctgcttgcactctccctgcccggcggcagaggtctgctgtggtccctctccacctgtgcttccccacagcttgctgacgaggatcaacatggagttgggggtgtggggagatatgtttaattaattcaatgaaagttgagaaattcctaaaccaaattcaatttaattttgaagtagataacatttttagttatcaaatagtggacagtattctaagcactttacctatagaatttacttaatctccccagtaaccttatgtggtacgcaatattatcatcttcattttatgaatggggaaattgagggactgagagatcacatcaggtacctggtggagctggaattcaaatccaggtagtttggggacagccccatacttttagcaatgatgatgtactgcatctctgaagagaattagaacagtaattcccaaactttagcatgcattagaatcacctggagggcttgttaaaccacagattgctggacctcacccccagattttctgattcagctggagaatttgcttttctaacaagttcctggatgatgcctgctgctggttgagggcccccaccttgagaatctctgactatcagggattaaatgggcccacctgaacccagaagctgatttttttttttttttttttttttttttttttttttaagacagtgtctcattctgtcactcaggctggagtgcagtggcatgattatagcttactgcaacctcgaactcctgggctcaagggctcctctcatcccagcctcccaaatagctgggactacaggtgtgtgtcacagcacttggctaacttttttaaaaaattttttgtaatggtcgggtgcagtgcctcatgcctgtaatcccagcactttgggaggccaagacaggaggatcagttgaggtcaggagtttgaaaccagcttggccaacatggcgaaaccccatctctactaaaaatacaaaaattagccgggcatggtggcgggcacctgtagtcccaactacttaggagcctgaggcaggagaatcgattgaacctgggaagtggaggttgcagtgagccgagatcacaccactgcactccaacctgggcaacagagagagactgtgtctcaaaaaaaaaaattttttttttttttggtatagatcggggtgggggtctcactttgttgccgaggctggtcttgaactcctgggctcaagcgatcctctcaccttggcctcccaaagtgctgggatgataggagggagccgccacacctggcttttccttcatctatccagtttcatgggaaacgagggctgatctcacacagaggcagaaaacaaaccacagtaagaaccatactcatgttttccaaatgcctcaagccttgccatgtttgtgatctcattaagcctcacagtaattctgtgagttaagcagagaatggatttttctgcctgtaatcccagcactttgggaggccgaggcaggcggatcacgaggtcaggagtttgagaccagcctggccaacatggtgaaaccccgtctctactaaagataaaaattagccaggcatggtggcgggcacctgtaatcctagctactcgggaggctgaggcaggagaatcatttgaacctgggagacggaggttgcagtgagccgagattgtgccattgcactccaggctgggcaacagggcgagattccatctcaaaaataaaaaaataaaaaaataaaaatctattttaaaggagaggaagtttagaaaactagctgggctagtatcacccaaggagataattttggagatgctggggctagaatcttagttactgactcatcatagcactctggaaacctctgcctttcctcaaaataccttcctttccccaggctactatcagaatcgtctccttaaaactaaatttttttatgagtgtgtggatgagtggattaaaaaaaaaaacctgcatttctttagcttaaatctttgagccctattataccacaggataggtgttatcaaccagtgtaaatgattttcagatattttcttgagaaaggagtaattagaacttttcccttttcatgctccctatgggcacttgcatgttcttaagtctgtggttctcttgaaggaaggggccatgtcttatgtgtccccaccatctggcaccatgcctggctgaaacagtcaccaagaaatgcttgttgaaatgaatgaatgaatggaggaactatgttcctgtccttgtccattcttcccagagcacgcctcccttcctggcagtcctaccattttttaccaagcattccctcccctctacctcatagtgtagtctctttagtctcttttctgcctgtccaggggccagagttaagcaacacagcttaagggacgccttccccattccttcaaagcagacatggctctgttttccctggactcccaggaaccttccatcatagccctcatcacattgcatgataagtgtctgcttataatggctttttcttcccttcaatgatgatgtccttgagagctgagattgtgtcttttttgtttgttttttgagacggagtctcacactgccctcctggctggggtgcaatggcgtgatctcagctcactgcagcctccgcctcccaggttcaagcgattctcctgcctccgcctccctagtagctgggactacaggcacatgccaccatgcccggctaattttttgtatttttagtagagacgtgttagccaggatggtctcgatcttgacttcgtgatctgccagcctcagcctcccaaagtgctgggattacaggtgtgagccactgtgcccggctgagattgtgtcttttttacacagggtgtagtgggcactcaataactaattgaatgaataaacagccatgtgaacttggctgccaagagcagtagggacgggaatggtatctggctgggaagctgtttcctgatagatgtctgacaagggcatcgaaaaacagtttgtggccgggcgcggtggctcacgcctgtaatcccagcactttgggaggccgaggcaggcggatcatgaggtcaggagatcgagaccatcctggctaacacggtgaaaccccgtctctactaaaaaatacaaaaaattagccgggcgtggtggcgggcgcctatagtcccagctactcgggaggctgagtcaggagaatggcgtgaacccgggaggcagagcttgcagtgagccgagattgtgccactgcactccagcctgggctacaaagcgagactccatctcaaaaaaaaaaaaagaaaagaaaaacagtctgtgagtgattcgggtgacttgtctccctttaccagttagagctagtttcagccacaagtggcagaatacccagtataacagtggctcaaataagagatttctctttcatattaaagaattccacagataagtagactggggctgctagggtagtttcctaatcactagggacaaggctgatatcttgttgctccgccatccataacaaatggcttctacttcatggtccaggattgctgcctgagctctagacatcgccagcacattgtagccagaagaaaggggtgacagagggtacccttgcattccccttttttcttttgttttttttttttgtgggggggtgcgtttgagacagggtcttgctctgttgcccaggctggagtgcagtggcacgatcacagctcactatagcctcaactccctggggtcaaacagtcctcccacctcagcctcctgagtagctggaattataggcccatgccccatgcctggtttttaattttttgtagagacagactctcactatgttgcccaggctggcctcgaactaggctcaagcaatcctcccgccccagcttcccaaagtgtgagattacagccgtgagccaccccaccccaggccctttttttctaaattaaaaaaaatcgactttattttttagagcagttttaggttcacagcaaaattgggcaggaagtacatagagttaccatatacacacagcctccccctctgtcaacagctcttaccagagtggtacatttgtttcaatgaccatacattgacacatcatcaccaaaagtccatagtttacattagggttcactcttagtgttgtacattctgtgggattggacaagtgtataattccatgtatccaccattatagcatcatacagaaatgtttccctgccctaaaaaccctctgtgcttcacctgttcctcctcactacccccatccctggccaccactgatctttttactgtctccatagttttgccttttccagaatatcgtatagttgaaatcatgtagtagccttttcaaattggcttctttcacttagtgatgtgcatgtaactttcctctgcatcttttcatggtttgatagctcatttcttttcagtgatgaataatatttcactctctggatgcatgacaatttctttatccattcacctactgaaggacatcttggttgtttccaaattttggtaattatgaataaagctgatgtaaacatccgtgtgcaggtatgtatacgttttcaactcattgagaaaatatgaaggagtatgattgctgactcatttggcaagagtacgtttagttaagaaactgtcaaactgtcttccgaagtggctgtaccattttgcattcccaccaacaatgggagtttctgttgctccacatctttgtcagtatttgtgttttggggttatttatttatttatttgtgtgtgtgtgtgtttttgtttggttttttttttttttttttttgagatggagtctcactctgtcacctgggctggagtgcagtggcactgtctcagctcactgcaacctccgcctcctaggttcaaatgattctcctgccttagcctcccgagtagctgggactacagcggtgtgccaccacgcctggctaatttttgtatttttagtagagacagggtttcaccatgtttgccaggctggtcttgaactcctggcctcaagtgatccaccagcctcagcctcccaaagtgctgggattataggcgtgaaccaccgtgcccggcctccctttgccagtatttggtgttgtcagtgttttggattttggccattctaacaggtgtgtagtccctcccttcctttttatttttcaattttttaaagccactttattgaggtaggattgacatgtaaaaagctatacatagtcagtgtatacaacttgatgagtttgggggttatctcccttctttgtaagatactttttggaagttaacaattaaaatattatattccatggccaggacttagtcccatgaccacagttagctgcaaggtaggaaatgtagtctttattctaggtcgccaagtggccatctgaaaagtcaggtttcttgtgaaggaagaagagagaatggacactgggagccacccagtgatctctgccacactgcagggaagggaaatcttctcaaacttgcttaaaggaacttcgttgggtggattcaggggtatttcatggaatttcaccaaagacataatgtgtggaggttgcctctgaagaggtagcatctggaaagttgccagaaaccagcaccactcttcctcttctgccttgctgtggcggtgtggggcttgttcatgtctttctacacatctgctctgttcttttctctctgcatgtggcaggaaggacatcccagctttagcatttcagtcagtcaactagctttccagagcccaattccaaagtccttggagagagaatctgattggtccagcttgggtcaggtgggagagagaatctgattggtttagcttgaaccaggtgtctgtcgactctggctagaacaaacaaggctgcaggggcccacctccagaggaagggagggcagttttcagaaaatgggtgtcatgggatgggaagactcctcagaatgtatctagagcatgaacatactcctctcaggtccatgtcccaggactttgcaaaccatcattcatttaggtaaacatttattgggcaccttctgtgtgctaggtacatggatctgccctctagggattttggaaatttttttggaaattgttcatatcttttttttttttttttttttttgagatggagtctcgctcccattgtgcaggctggagtgcagtggtaccatctcagctcactgcaacctccacctctcgggttcaagagattctccttcctcagcctcctgagtagctgggattacaggtgtgcaccaccacgcccagctaatttttgtatttttagtagagacagtgtttcgccatgttggtcaggctggtcttgaactcctgacctcaggtgatccactgccttggcctcccagagtgctaggattacaggcgtgagccactgtgctggcccagttgttcatatctttaacctgaattgtcttttagagcgaaatcatagctccttaaattactcaccttttagctttccaggtttcaagatggggatcaagggatttggtaaacacatgcttctgtttccccatctggattttggggaaccatagaagtggccatgttcttgcctctttttttttttctttttctgttggccagtttagaaagaaacgttctcccctccacctctttgtctctttagtaagaaacattttggttgttttttgtttgtttgctttgctttttgagacagggctctctctgtcacccatgctggagtgcagtggcgcaatcagggctcactgcagttttgacctccccaggctcaggtgatcctcccacctcagcctcccaagtagctgggactataggtgcatgccaccacatggagatggggtttcgccaagctgtccaggctggtcttgaactccttggctcaagtgatcctcctgctttggcctccccaagtgctggaattacaggtgcaccccaccacacccagctaatttatttattttttcttttcggtagagacaaggtctcactatattgcctaggctggtcttgaactcctggcctcaagtgatcctcctgtttctgcctcccaaagtgctgggattataggcatgagccaccatgcccagcctcatgttttaaccaactcaaatatgatgccgtctccttaatcttcctgattcttttgttttctttcttcagccctgggatgggcctccacggatctcaaatatgaaagtgtctcaagttcacacccgaggaggagaatgttagatttctagcccctgtaggaaaagcacctggaacttggcagaccttcctagcatcagcagcagctgatgataacgatcacaggtgctgttcattttgaacatactccatgcctagcaccaagctaaatcctgtatttgcatcctctcatacatatagccctcataccaaccctgagaggtaggcatcgatttccccattttacacatggctaatcaggaagctcagaaagaataggcaacttgtgcccgggcacggtggctcatgcctgtaatcgcagcaccttgggaggccgaagcgggtggatcacttgaggtcaggagtttgagaccaacctggccaacacaatgaaaccccgtctctactaaaaatacaaaaaattagccaggtggtgggcacctgtaatcccagctagtcagaaggctgaggcaggagaattgcttgaacctggcaggcagaggttgcagtgagccaagattgtgcaactgcactccagcctgagcaacaagagcaaaacttggtctcaaaaaaaataggcaacttgttcaaggtcacatagcccccgagtagtggagctgagcttcgtaactagaccccccttcctccagaggcttcccacatgccaccggcctctgagaacactccacattgcctctgagttctgccctatgcatgttctcctgtgggtatcattttgaatctttggcagtaccatttccaatgtgtttactaactcttgtcatgtaactctggaaatcagactctgatcccattttatttttgtcactgggaagaacagctgggctggggtcagggtggggctgtggtacatggatggaacactgttctgttgcacccgggaagtccagctctgtggcttccccaccatgtgtctctcggtaagggcctcccatctcttggcttcagttttctcatctgtgggccccttccagctcgacattctgtgttttccaagttaactgtgcatttcgcaaggatttcatgaggttgtcaacttccatgccccactgaaagggggagtgtttcccatctaggctgagcctgcttggggcatgtgagacttgcttcttgccatcacatctctggcctttcccacattctgatgtttgttctgcagcctctgggctttggggttatctggtgttgtctctccagttctccccagtggtgatggagtgtgctcccgccaccctctgccatctccccagactcaggtaactgaatgcctccaacccctctctgctcacccatagcatcctggcctcttcctccttgtcctgacataactgtttattgagcctggggtttggtgaacaagtgtaccctgctttgtatcttaagggaagatagagatgtgtgtgttctcccctctggccttttgctcagcattttgtacatatttacaaatcattcatcttctcagcaactccacaagtcccctagtatcatccccattttgtagacaaggcactcaaggctcagagaagttaacagatttgtctaacggacacaccagctactgccagaggcaagattcaaacccaggcctggcacaccctgtcatgccacgtacctttgactcactacatttacgctgcattggattcagggagaaaagtctgtggtcttcttggagtggtgtgactggtctgtggtttctgtgtggttttttgtttggtggggtaaacaggaagaccctagggataagttccagaggacagcaaaactcaatgtatttgtttggagggcggttggggggtggaaatcatagatacagcgttcctgaaggaagcaccctattccagcttggcatccctgaacctctgtccacatttgcttccagatcttggaaggagaccaagccatcctgcagagaataaagaaggctgtgcgggcaatccatagctccggccttggtaagtgagcctcctgggtgccccgcctggtcaggaagcccctctcccagccccagcctggagctaactccaagctcccgtctgtacctccacaggccatgtggagaatgaagagcagtaccgagaggccgtggaatccttaggcaacagccacctgtcccagaacagccatgagctgtccacaggcttcctaaacttggccgtgttcacccgcgaggttgctgcgctcttcaagaacctggtgaggcccctgtctcttccttgcccagactcagggtaaatctagtggtcttaagaacctgactgggaaagggtccgtttccttccttctcccaatttgcccttgatctctgacctgagttcagacctgaggtccctttccagccctgacccttcttttggataatcctcctttctctctggcttcttacccaactaactcttctctctgttctcctccttctcttcacccaggagcagagggggtctcacagcagggaagagccccgtgcaagggagggttccctggaggagctttgggataaaggagagacaggctcgggggttcctacctttataccactactgctgccactgccaccaccaccgctgccaccgcctcctcctctcctcactccctctttgtcctctgctttcccaatccacatctgcttcgtacttaaatcccaggacctgtccctgcctccacaagcgtctcagcccctgtacatggcccagtggcctcgggttgcttcccgatggcctccttggtgactgcctcctctctggtccttcaagtcctttcctcaaggccaccctgtgacagcagctcttcccatgtgcaggcacagttctcactagttcatgtgttcactcattcgatccggatgcacagctctgtggggctggtgtgactgttgtctccaccttacaggctaggaaactaggacctcaaggttaagcagcttgcccgaggtcacacggttcggtttgaacccaggttgtctggctccagagtccaagcataagcctggctacactgcctcccaggaaagcctctcatctccctccaggctccatggcactggaccagctcttgtggctccagtcctacccagcatcctccctggttggcaggggccacatcatccttgagaggcagtgtgctcagtggttaagcacccaaccttggacctagactccagcttggaatcttcactctgctgcttactaggtcaagtcactcagtctgcccaagccccaggtctctcatctgtgaaactgggataataatgctgcctacctcacagagcggtaatgaggattaagcaagttagtgcctactttatggtaagcgctcagtaaatgttggctaatattatattaatggcaaaacagcaattacttttgcaccaacctaataaaatctatcattgttatagctcttggcatagctgtgcctcgtacactgtcctgcatgtaaaaagcctttaacagtgtttgaggctgggtgcaacatttcaaaccttaatcccagtggtttaggagcctgaggtgtgtggatcgcttgagcccagaagctctagaccagcctgggcaatgtagtgagaccctgactctacaaaagtatgaaaattgccgggtgcggtggctcacgcctgtaatcccagcactttgggaggccaaggtgggcggatcacttgaggtcagagattcgagaccagcctggccaacatggtgaaactgtctttgcgaaaaaatacaaaaattagttgggtgtggtatcaggtgcctgtaatcccagctactcaggaggctgaggcaggagaatcacttgaacccgggaggcggaggtggcagtgagctgagatcatgccactgcactccagcctgggtgacagagcgagattccatctcaaaaaaaaaaaaaaaaaaatgccaggtgtgggggcgtatgcctgtggtcccagctactcgggatgctgaagtaggaagatcagtttagcctgggggaagttgaggctgtagtgagtgtgatcacaccactgtgctccagcctgggtgacaaagcaagaccctgtctcaaaaaaaaaaatagtgtttgagttcaattgaattagtgtccttctttgtcttcacctcttctctccctgtttcagtcaaactagtgtttcctgggggtctgctgtctagtggacattgtaccaggggttggtgacacaggaaagtgtcagactgcctcagagagccacagtctagtgggggagagaaaaactagggtgtggactagtgtcaagaaataccagcagcatggcacaaactcaaggacccagcagctggtgtcagaggcctagtgctgccatggttcagaaaaggggagatcagcatagaccaggcgggaggagtagccaggagagacttcctggaggaggagagacccaagctgtaccttggaagctggttgaaatattaggcctctttaggttgcgaaatcacagaaacccaactcaaactaggttaaatttttaaaagggaattcattagcccctgtaatgagaagtccaggggcgcagctggcttaggctctatcctttcctcttaaggtagtttctctgtctctgctcagtggacaggatagcccagcaggcccagatgcccatcttaccaaaataaagatggtctttctcccacaacttaggcagaaaaatcccagcgaggattgtgattggctggcttgggtgcgtgcctgttccctatccagtccctctatcctggggctggggtgccctgctcagatctgacttctgcgtttaccccatctgaccacagaggaggagttccccacaggaaagggggttctatgaccattaataggggaggctctgaagcgttagccagcccagaacaacagacgtgcactacaggtcaacttgagagagtcagagaggagaagggaggctgctcctggcgaggaacaggggagagattgactgtgggatgctgctggagcagtgcagcgatgaggctggagccatcagggaaggggctcactctgacacacctcggcctcccctcctgccccctttcacacaggaagcctggcgggcagcaggtcagccatcctaagcagaccccagagctggatcctctagtccccccccgcaggctcagcactcctgccatgacggtcccccttacttggctgtcatctctttgataacatcttttcctctcccctacttcccttccccgctgctctctttgccaagtgatgcttcactgtacaccgaatccctaggggctggatgccggtcacctgaggcgggaatgagcgtctctgttttttccagattcagaacttgaacaacattgtctctttccccctggacagtctgatgaaggggcagctgagggacggtcgacaggtgagtctccatgctgggagtggtggtgggacagagtaaaagaggggtgggcaggagactgttggggggcagggctggactgagggtggaggccaggtgaaggggctgtcttagcgggagtgatgagcctggggaggtctggaggacctggctcgggtcagcctaggatggctgacctgctgtctgccaggccccttgtgtgaaacatgtcatgtaaatcttacaaccatcctatgaggtaggctttgtgggtacactcatccccattttgcagttgaaattcgaggccaagggagttaggtaacctgctgatggtttacataactaggaagtagagagcccatgtgggaatccagggatcctgaatcccatactcgagctgctttctctgtgcctggcagcccttggctggatgcagagtggagctcaaagaaggtgacagaataatctctctgggcaatctgccccagacggcccaggggaggagccgtgctcccccaagagggttccctccctgccctaggctgccagcgtggcaccagcctgctaaccacacaaaccagacaggcagctttttcaccttgggagtctcggggttgttcagaagggtgtgagcagcctggctggatgaggcttaggcaagctaggcagggggtagtcaggtctccctggtttgctgtatggcctggggtagacttctcaacctctctgtgcatgttccttgacctgtacccttgctctaagaggatgatctagcaccaggcaggagaaaatgctgggctaaagttaggcagggggaatttggccttcatcctcccatcctcatggtcatgactgatctctcttctgagcaagaggactcagggtagagcccaaagatctcttcacaccccaagccatggcccaccaaacctgactgattcttggcatctctggggaggagaaggtctgctgggaggagggccttagctctgagaaatggggtcagctgagcctgtttggtgggggcaggtttgcagcaggactgtgggggcaggggctggttagagaagggctctgagcagctcaggggagcacactagcaggtcctcctacaggcagcagagcatactgtttattccagtgctccagcttccctctgggcaaattgtccttttttaacccacaggattccaaaaaacagctggagaaggcatggaaggactatgaagccaaaatgtaagtggccacagccagggtcgtttgtctgggagagtagcacttaggctggatagggaagaacctaaatgctgccgagacatgtcatccagaattgggtgacatctggctctgtagaggcatttacagcagattgtttatacccagacctgactggattctggggactgggccacgagaccaccaaaggagctattgtgaagggacctcaggatgctgctctcagagtcccatctgctcagtggtgccagacatgggcagggatgggaaggagctagcactgaccaaacacctccgcgtgctggccatttaatcttcacagtcaccctgtcatgtgtgagagaggtattagtatcacaattaccacaggaggactcagagaggttaagtcacttgcccaaggccccacagcttggcagaggcagaactggggtttatgccccttgctcctcgttcctcagtgtcagttggtatatctagagaaggaaatggctttctgtgtcctgtgcacaccacacgatactccagatctctcaccagctactgggacatcatggggaaagaaggagcctcagtcaaccagtggccaattcctcctgggcagagactccttgggctctgtcttatgaggagtctgtccagatcccagcctttgccctctgcccagccaggcccatactgtagagcattgtttgtgcttttttgtaaaattttgttttctcttgcattttgccaaagcaatttatgcttattatgaataattttgaaaatatggagaagtaaaagaagaaaaaaaattaatcatccttagcagaggcttagggttatggcaggcggataatactctctgttgtttgaatttttttttttacaaggtctgggtaacattgcagttttcatcattaaaaaaaaaaggttggatggggagaaactacccaaaaataggagaaaaattcttaattttcaagcctaaaatattaacattttaacatttatttttctatgtatgaagaaatgtttttataaaaatgagatcataacaacatactgttttgtaatctgcttttttcattcaaaaaatacattgtggccatctttgtacaccattacatattcttccacatcaatcaaacgggtgtgccaaaacctgcataagccattatgtatttaatctgttcctgtcattggagaagcatccttggatttaaatatttgtccctactcataattatttttgcaggatcaatttcaagaagtagatcctggagctttttattgttccctcagctcccagagccatggcaccgctccaagtctgaggcaaggtcacatcttgtccctgcacaagcatctccagccccagctgtgggcatagatcctgtgatgaagggtgtagacactgtgtggccatccctgtggggccctatccctgcctgtgatggggcacggccatctgctctcactggaggcccagggacgggtagtgagggcacaggctgaccttgtcttcatgatttgctgtggggccacatggccctcttcttcctgagttaccttaactaagccgttagactttcggggatcgtctaccaaatagaaataataagctctactctgctgaccttcccaaagcaggtctgcttttcctaggtttctatattgagccttcctgtagcatttcatttacaggccagactccatttagttgatgggaaagggggcttggctgaggttattcggtgagttatcgataggacctggactagaacccagggcttctgagtctagtgctatttctgccatgtggtctcctggctcccaccatggagccacatagtttgagctaatgtcttggcacgggtgactgtacactccttttcatacgggctccaggtgtagccagatatgcgtgagccgtaagttcctatgtaatttcaccacattcctaccaaacaagtctgagccccagctggaagggcccagggccctgatagcatctgtcaaataccactgggagcttcacccctggctgttcatataggaggaggattacctctccacgtggggctgctgagaaaggcatcccgggccctgtacagaggccaaatttatctaggcagttccatgtacaggtctgtttcctcatctgtacaatagggacagtaatacctttcagggtcaatgcggcgatgaataagcacggtgcatataaagcactcagcacttcagttcagcaagtatttattgaccacctatatgagccagaactaggaccagaataacacaggaagagattgacaggcagaaacccacacatctgctggtagcatttaccctagccagcttttaatcttgtgcaagccattttccttctctggatctcagcttcatcatctgtaaaatggtccctgttctgagagagactgttatctctcagaaaataaacagtgtgactgtcagcagctcgcaggaatgaggcagggaaggaggaatggaacaaacctgagtcacagtgttggttgcttgggctgcccctaaggcttaggcaccagccagtcctgggttcaactcctggccccaccacttaacagctgtgtgacttggacaaatgacttatctcagccataggctcctcttctataaaatgggataatgatcctgccttatggggctataattttaacatatgaagggcctagcagagtgcctgggcctaaaaattataactaggagcctgtaatcctagcactttgggaggccaagacaggaggatcacttgggctcaggagttcgaaaccagcctgggcaacatagtgagaccttgcctctatttaaaaaattgataataataatacatatataataaatataatacatatatttagaagccacacatggtggctaatgactgtaatctcagctacttgggaggctgaggcaggaggattgcttaaggccaggaaatttgagaccagcttgggagacagagctagaccttgtctctaaaaaagaataataataataattagtaataatagcagcttctactttagagtttcctttgtgccaggcagtggagtaaggtctttgcatctattaccagatttattctccctggcagggaaagctgctattgttattcccaatttataggtaagtagtgaggaatccctgccacctaagcgtggctcaaggtttcaaggttggtgggtgtgtggtatttaaatactttcctgcctgcaccaggagtacctgtacccatcccatgaataacactggactgttgctgtagtctccttctgcaatgatctcggtcttagtaactagcatttaagtactttcacccactatttcatttcattccttctattgcaattccactcataagacagaaaaatgtttctaacatttgaaatgttttagaaatgttttaaaaatgttggtgatcctttgaggatagggaaggaatgggacttgttattttataggggaagaaaagcactccccagctattaggtcatctcagaatgactatgtcagactttgtagggaaaatctctatgaattatcttagctgaggctgagggacagaactgtgataattgacaaagccattttgtcacagctgtgtacattttgtcaaagctgaagtacattgacaaagttgtgtacttcacggcttatctacaccttgagttaagtagcatcttttaatctctactagcattcaaaaaataaaagaaagaaagaagaaagtaccatatgctgaaaaaaattatctaaaagggatcaccagtatttactactctgtcatcattgccatcacttgaatcatcataatcctaccattcattgagggcttgccatatgccaggaactgtactgtttcctatgcattatattatccaaggactaggtgtcattacagtggttcccccttatccttgggggatacgttccgagacccccagtggatgcttgaaactgaagatgatactgaaccttacattaggttggtgcaaaagtaattccggcagtttttggcattaaaatgtaatctgtgctttttcctatatatacgtacctatgataaaaattaagcacagtaagagatgaacaataatagtaataaaacagaacatagtagcatcactactcttgcactctggggccattatgaagtaaactaagggttacttgaacacaagcactgcaatagtaaaacagctaatctgataaccaagaaggctactgaatgactaatggcaggtggtatagaccaggggtcctcaacccctgggccatggactggtacaggtccaaggcctgttaggaacctggactgaacagcaggaggtgagcgttggcaggcgagcgagattaccgcctgagttccgcctcctgtcagatcagcatggcattagattttcatagaagcacgaaccctattgtgagcttcacatgccagggatctaggttgcatgctccttatgagaatctaagcctgatgatctgagctggaacagttccatcccaaaaccaccctcccccaccctgctatccgtggaaatattgtcttccatgaaaccagtccctggtgccaagatgttggagactgctggatagacagtgtaaatacactgaacaaaaggatgattgatgttccaggcaggatggagcagaaggatgcaggatttcacatgccactcataatgatgcataatttaaaacttacaaattgggctgggcatggtggctcatgcctgtaattccagcactttgggaggccgaggcaggcagatcacctgaggtcaggagttcgagaccagcctgaaacacattgtgaaaccccggctctactaaaaatacgaaaattagctgggtgtggttgtgggcgcctgtaatcccagctacttgggaggctgaggcaggagaatcgcttgaacctgggaggcagaggttgcagtgagctgagatggcgccatggcactctagcctgggtgacaagcaaaactccatctcaaaaaaaaaaaaaaaaagacaaaaaaacttatgaattgtttatttctggaattttccatttaatatttttggacaggggttgaccatgaataactgaaaccacagaaagcaaaactacagagaaggggggactacagtattattctcattttccaaatggggaaacaagctcagaaagttttataaaggttaagtaagtgaaggagctgccattcaaatccagaatctacatttctaaccactgtactgtattgtggtttgctttttgtccatttactctggagcagatatatttccatgtcagtacagtcatccctcattatccatgggggattggttccaggacccccgcagataccaaaatctgaggatgctaaagccccttagtcagctgcctatatcctcaggctttacacccacagatatggagggccaatcacatgtacagatattccttcttcttttttttttttcttgagacagagtctactctgttgcccaggctggggtgcagtggtgcaatcatggctcactgcagccttgaactcctgggctcaagtgatcctcctacctcagcctcccatgtcgctgggacttacaggaccatgctaccatgcctggataatggtttaaaattttgttttaaagtagaaacggggtcttgctatgttgcctaggctggtcttgaactcctggcctcaaatgatcctcccacctcagcctcccaaagcacttggattacaggcatgagccactgcacctggccaatcttcattctaacagctgcatgatatttctatatatcgccatactattatttgtctaactacttcctactgatggacatttagcttattttccatttttgactattgaaagatatggtaacagtgtacactgggagacttcccctacgccagcccacctgatgtcacttggtctccctcattcctttttttttttggagagacagggtcttgctctgtcacccaggctggagtgcagtggcacaatcacagctcactgcagccttgacttcttgggctcaagggatcctcctacctcaaccttttgagtagctgggactataggcacacaccaccatgcctggatcatttttaaatttttctgtagagacagggtttcaccatgatgcccgagctggtttcgaacttctgggctcaagcaatcctctcaccttggcctcacaaagtgctgggattacaagcataagcttccacgcccagccctccctaattccatagcaagctgccaggcactgctgctgagatgctgcaggcccagccatcacctcccctctctgctgctttttttcagattcacaaagaagtctgtcctgaccctcaggcctggttcacaggatcagttcctaccctacttctaccactctttacaaactcttgcttggggtatcagaaagcttaaggaaataaaaaataaccccctctttaaaattaaaaaaaaaaaaaaaagcctacagagcctgcaatgtctggagacatttctggttgtcacagctggggggatgctactggcagctagtgggtggaggtcagggaggctgctaaacatacaaaccaccaggcagccccccataacaaagaatcatctggccaaaaatgttatcagttccatggttgagaaactgctctacaggtccccagggacagattctgtatatgaacactatcccagaggtcttacctactcaggagggcccagaactttagagtcagaagggacctgagaacttaccgtagaccattgcttcctccatttacagatgggaaaacagaggccttgaggggcctacagtaaaagctgccatgtgtcttctatgtgctgagtcttttccatgctgtgcctcatctgggtacagataagaatctccgttttccagatgaggagaccaaggctcagagaggggaataaatgcagccagcaagcagcagagtttgtattaatcccactctgtctttgtcttctctgctcagggctggcccccacttgagagcagaactattaagcaagccctttcctttacatgggatttggagtcacatgcacccagcctgagatgtggaaatactctcctggctgtgagtgggtagtctgctgggcgtgggatttccaggaaaccatttacacacagatccacccatccccaaagagggaaaacagccaacctctgagggggaaggccccagttactcttagctacaaggatgggaagcgctttctgtctccacttaaaaagagaagagcacggtggggcgtggtggctcatgcctgtaatttcagcactttcagaggctgaggtggacagatcacttgaggcccgagttcaaagaccagcctggccaacatggtgaaactccgtctctactaaaaatacaaaagttagctgggtgttggccaggcacggtggctcatgcctgtaatcccagcactttgggaggctgaggtgggtggatcacctgaggtcaggagatcaagaccatcctggctaacacggtgaaaccccatctctactaaaaatacaaaaaaattagccaggcatggtgacacccacctgtactcccacctactcgggaggctgaggcaggagaatcgcttgaacccaggaggccgaggttgcagtgagccaagatcatgccgttgcagtgagccaagatcgtaccactgcactccagcctgggcaacagagcgagactccgtctgaaaaaaaaaaaaaaagattagctgggcatggaggtgggcacctgtaatcccagctactcaggaggctgaggcatgagaatggcttgaacctgggaggtggaggttgcagtgagctgagatcgcaccactgcactaaaaaaaagaaaaagaaagaaaaagaaaataaaagaacaaaggttttctgagctttaagtatgaagctccatgggctcagaagaatgaaagcactttgaaataactcagaaacagaaagtcaaacactgcatgttctttctcccttataagtaggggggtaagcaatgggtacatgtggacagacagagcagaatagtagacattggagacttcaaaaggtgggaggataggtgagagatgaaaaattacctattgggtaccatgtacactattcgggtgatgggtactctaaaagcccaggcttcaccactgcacagtatatccacgaaacaaaactgcacttgtaccccctgaatctataaaattaatacaaataaaaaagattgaaggcacctgtgttcttaaatcctttccaggaaaatcagaactgtttgccccaaatctcacttggcccttgtttgagtccttcatccccctgaataaacaccttcaaatccttcccattactcttgggataaagaccaagaatatattaacatggtgtgaattagaccctgcatggtctggcacctccttaccttagctggcaccagccctctccatcttggcactcgctcctgccttggggccatcacatggtccatccctcttgcccagcagtagcttcctccaagcttctcaggcttcagatcccagctcagacatcacttcccaactagccccaacgaggttggatccccattttctctcccatagttctctgcgtggctgtgatttgattcatgtctttctcccccaccactctgtggattccctaaactgtcttgttcattgtacccagccccaccacacagctggcacaggagggcctcctgcaccatgtggcccctttgctcatgcatccttggcagaagaggatataggggctggtgagacttgttcaggcttctctttccttggggtctagggccaagctggagaaggagcgcgatcgggccagggtgacaggagggatccctggggaggtggcccaggacatgcagagagagcggcgcatcttccagctgcacatgtgtgaggtaaggggtgctctggatgagggagggggggcgtgggatgtgtcttcctgtctgcctctccaggggaccagtcacagcctcagctcaggtcctggccacatggccctgtgggatgtcaccaaggcccagtcgcagccaggaggattagcctgggatggggactgcagcccctcgttcccaggattctgcttcagctcacatcacgtatcttgccctgccctcctcctagtatctgctcaaagccggggagagccagatgaagcaaggtcctgacttccttcagagcctcatcaagttcttccacgcccagcacaagtaggtatcttcccgcgtccctgccactaacccttccagtgtcacagaacaaggcccctctcaaggtgtgatagacctgagagtctctttggaggcctgcatctttttggcagaactttcatagttcctcattgagtgctcaccgggtgtcaggcatgagtactttacaaacatcaattcgctcaattccccaacacttctgggagcaggtactctattatccccattttatagatgagaaaactgaggcttattttccaagattacatagctagtaagtgggatttgaacctagtcaagagagactcttgtctatggagtgtctgttcttgaccgtcagactacaattccctgaggtgccctgtgatccttacggcagcttctcccacacttctggcttcatctctcatttccatctttatctggacccttgtttggcctctgacacctcttagctttttccaagatggctggaaggctgcccagagcctgttccccttcatcgagaagctggcggcctcagtacatgcagtaagttgggtctcacccttgggcacgtgatcaagccccctgtccttccaggaaaatctgtgggtgtggaagagctggcttctgcccacagagtgaggctactgctctgctcttctgggtctgggctctgtgcctgacatatttgttggctggtgatgggatcccatcctctgtcccatagctccatcaggcccaggaggacgagctacagaagctgacccagctccgggactccctccgagggacactgcagcttgagagcagagaggtcagcccctgaactatcccaaaaggaatgccctcccccaaggcccaccgtggagggagggagagaaggaagacccacagggtcccctggagaagtctccctgagtgagcccccgcagaatggggctcttcccactgagatgccctgaggtctcctttgcatgtccgagggacaggaacacctgagccggaagaactcaggatgtggctatagcatccaccagcaccaaggcaacaagcagtttgggacggagaaagtgggctttctatacaagaaaagtgacgggtaagtgattcagagcttacataatttgcccaatgtcacactgcaagtaaatgacagggttggggaagctgcccaaaggaactgttctaatcatttgtgtagacaccgagggttgcaatgtaaaatcctcaattcctgggttgtccaggacacctgggcatgtgaacttctgctaaaggtgactggttattttaagttaaagaagaagaatagcagtagctaacacttttttttttttttttttttgagatagagtctcactctgtcgcccaggctggagtgcagtgccatgatctcggctcactgtaagctccgccttccgggtcatgtcattctcctgcctcagcctcccgagtagctgggactacaggcactcgccaccacactcggctaatttttttgtatttttagtagagacggggtttcactatgttagccaggatggtctcgatctcctgaccttgtgatccgcccgcctcagcctcccaaagtgctgggattacaggcatgagccaccgcgcccggctggcagtagctaacacttattgcaacacttactatgccctcattcttttttttttttttttttttttttttttttgagatggagtctccctccgtcacccaggctggagtgcagtgacgtgatctcagctcactgcaacctccgcctcctgggttcaagcgattctcctgcctcagcctcccgagtagctgggactacaggtgcccgccactacgcccagctaattttttgtatttttagtagagacggggtttcaccgtgttagccaggatggtctcaatcttctgaccttgtgatctgccagcctcagcctcccaaagtgctgggattacaggcgtgagccactgcgcccagcctatgccctaattaatctctgcaatatactgaatatgcctagaaatgaaagtattggctgtgccttgcttcctagtgtaaaaaaaaaaaaaaaaatcagtctgtgggccaggtgcagtggctcacacctgtaatcccagcactttgggaggccaaggcaggcagatcacttgaggccaggagttcaagaccagcccagccaacatagtgaaaccccatctctactaaaaatacaaaaaattagctgggtatggtggcgtgagcctgtagtcccagctgcttgggaggctgaggcatgagaattgcttgaacctgggaggcagggattgcaatgagccgagatcgtgccactgtattccagcctgggtgacagagaaagatcctgtctcaaaacaaaacaaaacaaaaaaacaaaactgctgtgaaatgcaaaggcccttgtgggatatattcatgtttctacctaccaatcagtttaatcggagaagaataactttgaagaagaaaccaatgaatatttacctgttacaggagaagtgttacggagttttggatcatggacttgctaattttattttggggatattaatattgatcttgcttagttgaaccacaatttatttgttgttgtcaagagcctgtgcctctcagactaggagctccctaatgatataagctatgtctcccccatcagactgggagctctcagagggccaaagtcacatcatccccttagaataaggattcccagggagtgaggctgtgtttctccatcagactggcatcttcctaagagcagaactgtgtctcctccatcagaagggagccccagagagtcaggggtcaggggtgggggtgtagggttaggagaagaaagaggtaaagggatgtggctagagatcatacaggtgggggcaaatttctgttctctgacacctgcgaactaggtgtgagccttgggtcactgtccttctatccctctgggctttagaattcgaagagtctggcagaaaaggaagtgtggagtcaagtatggctgcctgaccatctcacacagcacggtgaggcctagaggtggtgggagtctcagggcacgatggaccctcttcttctggtgttctgagcaaataatgtcaagccctccctctaagactggcccccaaacctaggtccagggagctggagacccgtttgggaggacagatgggacctgaaggccccaatctagtcttagtctacacttcacatccttgaggtgctgctgggtgaggagaaacacaaatggaacaggatgattatgcccatttaacagagtgggaaatggaggcctaaagaatgtggagggccagaggtaatgcatacatcctccgcccctaaattcccacagataaaccggcccccggtgaagctgaccctgctgacgtgccaagtgaggccaaaccctgaggagaaaaagtgcttcgacctggtgacccgtgagtggtccctgtgcctctcccccacccacagctgctcagggcttctctaagacacctgtcagctcccggggggcttcagtgaggggtctgtgtccagttccacacatggtgtcgaattgctgctactgcagacataagaatccttaggtctaggatacccacatcacattaaatgtcaaaatgcacccactttacataataaatgtggctatttatacagagcatatttgagtggatttgggtcatctgggttttgaaattatttctttttttaaaattttacctttttttcccaaatacccagacttgaaggagatgaaattattgtttctttacattttctacttttcgttcttcagagcctttggtgcaggctttgtgtgagagcagacacaggctgagaaagacctagatcttgtcctcaggaaactctctggcaggggtgtggggtgggtacccaggactgtaagatgagggggctgtccagaagatgggtgcagatatagccccatagaagattagggagcaggaaggcctgcactgctgtggggaatcaggaaaggctcctggaggagacagtatttgagtttagccttgaaggacatgtagaatgaagagtttgtggggtgggggcttttgaggagacaggattagcatgatgaaaggcatggaagcaggagagtgggtctggccggtttggccagagtggagggttcatgtagcagagtgagagatgaggcctggaaatccctcttaaaagtttggaccttatttcctggcaatagagagccatgggagatcttggggcagggcagtggtgtaattagagcagagccttgggcacaacagttgggagctggtacaggctaggggaaaggggaaatgggaagcagggagaccagacaggaggcctggtcgcccaggaggagaccaggaagggcccagtggggtggtgacagttggttcagaggatgccctgcctcagagctgggttctctggggttccaagccctttgagacctcgtctgagcctggaaccagggcttcacgcagagggagctttgttgggatcctacttcggaggccagttctgagaaactgcccctggtgctggccactgtcattccactcccttcccactcctagcttgagagtccgacttgtcagggacacatctccatgtggccccagcggctttggtgggggctccctgggctccgggaaggccagcagcatttctgtgggtcagaagcccccttctctcccgacagacaaccggacgtaccactttcaggcagaggacgagcacgagtgtgaggcgtgagtgccccctcggccagcccggccagccttgtgggtgggggccggcggccctatctcttcccacttgacatccccatcccaccccgttcaatctccgcaggtgggtgtcagtgttgcagaacagcaaggacgaagccctgagcagcgccttcctcggggagcccagcgctggcccggggtcctgggggtccgccggccatgatggggagccgcacgacctcacaaagctgctcatcgcggaggtgaagagcaggcctgggaatagccagtgctgcgactgcggggctgcaggtcggtccccggggccggggcaggagggaggcttaagtggaggggaggggctgcacctccaggctccagctgctttcctctgcagaccccacgtggctcagcaccaacctgggcgtgctcacctgcatccagtgctcgggcgtccaccgcgaactgggcgtgcgcttttcgcgcatgcagtcactcaccttggacctgctgggcccctccgagttgttggtgagggcggggcggggcctggaaggggccagaagcggagttaggggtgtagtttcatccgggggcggggcttgcaggttgtgggtgggacctggccgaggtgggctgggacaagccaggtagcgggtggtcaggggcggggcctgaaccgggagggcggccgaggggcgggactctgggggcttggagctccaccctatgcaggcttaaccgcccggtcttactccgccccacgtctattttcctacgactccagctggccttgaacatgggaaacacgagcttcaatgaggtcatggaggcccagctaccctcacacggcggccctaaaccctcagctgagagtgacatgtaaggggattctcagagagaggggcaccctgcctaggggattctgcctccgcagtgtccagggtcgtagaaaagtcttggatcagaagtctggggaggctgggcgcagtggctcacgcctgtaatcccagcactttgggaggccaaggcgggcggatcacttgaggtcaggaatttgagaccagcccggctaagatggcaaaaccccgcctgtactcaaaatacaagaattagctgggcgtggtggcacacgcctgtaattccagctactcaggaggttgaggcactagaattgcttgaaccctggaagcagaggttgtagtgaaacgagattgcgccactgcactccctcctgggcaatagagtgagactgtctaaaaaaaaagcctggggagaggggagcctcagatctagacgtcttcaggacatggttctggagaaaaagagagctgtatctcctgtgggagggccccagggatcagctgggcagacacggtccatgctctgagatcctgtggttgtttttggtaggggcacccgcagggactacattatggccaagtatgtggagcataggtttgcacgccggtgcacacctgagcctcagcgactctggacagccatttgcaacagggacctcctgtcggtactggaggcctttgccaatgggcaggactttggacagccgctgccagggcctgatgcacaggtgagaacccctccaagggccacttataacccacctgtctaacatattccccagttcttctccaggaccagctgttactcccctccaccccacctctgacatctgctcagatctcacccatcagagtggtaagtgggaaagagcacagcttcagtcaggcagacctgggtgggaatcctggctctgttttttcctagctgtgtgatctagggcaggttacttctctgagtctcatttcctcatctataaaaggggttaataatagcacccacggtgatgaagtgagaagtcatgtatataaagggcttagtgtacaatgggcatgcaataaacgttaatatctttttctttcacctaaatagccctgaaatataagggcatgtcagtttagagccaggaaggccacattgctttggctattccaagaacaaacacatgagcatggagaaaggatatcagagacatttgaaaaagtaaatcaacaggagttgctgactgattcgacatcaaaaattggatgttggctgggtgtggtggctcacgcctgtaatcccaacactttgggaggccaaagtgaaaggatcacttgagcccaggagttcagaatcagcttgggcaaaataaggaaacccccatctctacaacaacaactaaaattagctgggtatggtggcacacacctgtggtcccagctactcagaaggctgaggtgggagggtggcttgagcccaggaggttgaggctacagagagctgtgattgcgccactgctctccagcttgggtgacaaagcgagaccctgtctcagaaaaactaaaaacgggtatctttgaactgtctgtctgatatcttggtgggctatccaatgggcagtgcagcacttaggtgaggtaagaatttggaacagcctgcacatgtgtgatagttgaaaatgtgaggttgctgaggtcttggtggggaagtgcgatcagggagaggagccgagagctgagaaagaagtttgggaaacacttgttgggggcagaggaggaagagccgtgaatgggaacaatgggagaatggcccttcaccttcctcccagacatgaggctctgcccttgcagtctcatctctccagggttctggcagcttcctatggggggataaggggttagcaagagttcaagagggaaatactgggttggaggcaggtgcactggggggggaatctcagaggtgtggatgtgttttcaggcacctgaagaactcgtcttgcatttggctgtcaaagtcgccaaccaggcttccctgcctctggtggatttcatcatccagaacgggtgagagcctccctgcctgtctgtctggctcctcacactccctctcctttccttcctcttctcccattctcttccctcctttcccctcccactttttcccctgactttgatcccctcattgatctgttccccttcctttctccctgaaccctcctctccccagtggtcacctggatgccaaggctgctgacgggaacacggctctgcactacgcagcactctacaaccagcccgactgcctcaagctgctgctgaaggggagagctttggttggcacaggtggggcttgaatacctcctccgtcagactcctattcctgactaccccttatgtggacttccgatggtctcgggctctaatcctggcttgcttctgaccacctctgtgatcttaggggtttgtcattcagctcttgaatttcagcttcctcatctgtaaaatgggaataataccactgacctagcaggactgctaaagaaaaaagaaaataatatttctgggagtacttaggcaaataaatattagctagatctgaatgataatgattgtaatagctaatatgtattgtttaacatatgcctggcaatgggacaagtgctttttgtatgttaattaattgaatcctcacaaccacttcatcaggtagttccaagtattatactcatttcataaacaattttgtcccaaaaggttatataacttgcctatggtcacatagccagaaaatggcagagccaggattcaaacccatacattctgattccagaggcccgtcttaatctctaagctgtaatgtttctttgactatgaccatgaaccctgactttccccgctcacagtaaatgaagcaggcgagacagctctggacatagccaggaagaagcaccacaaggagtgtgaggagctggtgaggactcggggaggcaaggggcccctgactctttctctctccctgctgagcccccaaccctctgaaccaccaagcctttgtttttggcagctggagcaggcccaggcggggacctttgccttccctctacatgtggactactcctgggtaatttccacagagcctggctctgacagtgaggaggatgaggaagagaaggtgggtcccagccctgtccctcaggcctctggatggcagaaggaaagagccagattgggcctggtgtgtgttggcgggggcggtgaggcggggggacagggctacaccggaggaaccaggctgtcctcatcctcaatcttttgctctggcagcgctgcttgctgaagctcccggcccaggctcactgggccagtgggaggctggacatcagcaacaagacctatgagactgtcgccagcctgggagcagccacccctcagggcgagagtgaggactgtcccccgcccttgccagtcaaaaactcttctcggactttggtccaagggtgtgcaagacatgccagtggaggtacagttggatgcccagataaatgctcaccatgccattcacagaggacctgtatatgctggggcactgagctgagtgcatatgttagtccgtactatccttatgatgacctcccaggaaggggttctcatcttccccttacagataaaagaacagaggtgttaagtcacatgtttaagatcccacagctaataagtctctgatgtaggattcaaatctcagcccatcttattccaaattcctcaatgctccacttaacaagagagaaacgagtttattgagcatccccttcatcctgagtcctttgagggctaccaagacacagtctagtaggggagataaaaactggaatgcaattcattataatacaaggcacaatgtgatatagaatgtaaatcccaaaaggacaaggactttgagtgtttcattgaatactatttgtccagtgcctagcgcagagcctggctgttctcaagaactatttgtcgaatgaaggaacagacttgttgtgggaggttggggcagttggagagggagcatgtcctgctgggattgggggttggtttaagaaggcttcctggtgaggatagcatatgagtgaacctgagggatgagcaggagaatccaaactgggacagggtatgagcacaagcaaaaaagtgagtcagcatggccctggccaccgcgaacaaaggcttcatcagttgaaggagaatactggacaggtagatggggaatggactattggcagagaaccagaagagatcctaggccagatgtggtggctcgtgcctgtaatctctgcactttgggaggccgaagcaggcggatcaccccaggtaaggattttgagaccagcccagccaacatggtgaaaccccatctctactaaaaatgcaaaaattagccaggtgtggtggcatgcacctgtaatcccagctactctggaggctgaggcaggagaatctcttgaacctgggaggcggaggttgcaatgagccgagattgcaccactgcactccagcctgggtgacagagtgagactctgtctcaaaaaaaaaaaaaaaaaaaatcctagaggccagagactgctttgaggttgggcacagagcaagtgataaagaaaagctttatcatttctgatgtttctgattccagatcgttctgaagtctccagcctgagttcagaggcccctgagacccctgagagcctgggcagtccagcctcctcctccagtctgatgagccccttggaacctggggatcccagccaagccccacccaactctgaagagggcctccgagagcccccaggcacctccagacccagcctgacatccgggaccaccccttcggagatgtacctccccgtcagattcaggttggtgagggcccagctgtgcaaccagggcaaatcccctgacttctctgagcatccattgatttccacacctctaaatagtacctgcctaaagactgggtcacacgccatctctgggcccatcacttatgcagaaatgctgaaccctgggaccccttcccccttcacacacttgctcccaaatcctgcatggagagctgaggaggagccagggatcctccctgctgatgttggagtaaagtaggcttagccccctgtgtggcttattctagaggctctcagtggggtcttcactctgtccccacctccaacccaggatccagtcttctcccttccatacaaacccattcagtctggagtttggggagaagtagacctgcagatatccacagagtcttctggaggtcagttccagccttcttgggcctgtgatggacctggcctgggggccttgtggactctacccacccatcctaagcccccagactggctctgttcctgagccctttctccccactctgaggggctctctggacatgagggtcatgttggcctttccctgccttccagctccgagagcactcgctcctatcggcggggggcgcggagccctgaagatggtccctcagccaggcagcctctgcccagaaggaacgtgccggtaggaactctgggaccatggtttgaggggcggtggcagggtgcctgggaggcagagttagtcaagagtaggcgtattggggtgggagacctccccatggttggggtacagatgggcccaggcagccacagtttggacagtccctgtcctggtgcccaggtgggcacggtttggccagtccctgtcctggtgcccaggtggccacggtttggccagtccctgtcctggtgcccaggtggctgcagtttggccagtccctgtcctggtgctcctctttccatgctccagcccagggctgggtgaagctgaggagagcccaggccttgagggatggcagtgatcatgaggcccaagctctggcttctccccaggggaggatgaggaaagttgtgttagccaggccagtcgctcagagaaggcatcacttccctgcagaagaggcaggattaggtggccgtgtaccagcccttgtttgcctaactctccccttgttcatgagtctcctggaatccacagggactttcagatcccaggcatagagggatgtgacagggacagggcaagagctgtcatccttaatccagcttctccctgctgaatcaccaagtctccaacaatggcatatattagttgaacctaggagtgggcacagatcagagccagttgtgttgggaaagaagcctcttctgtcccttgttcctctgggaattcctcagaatggcattggttgtgttgggagtcaggatggcaggggcaaaagctggttctgtctggggaatcgtcatctttagtccaccagagttagtcagcagacacaaatctatgtccatattctggttccactattgccctgaaaaccaagtatccatcagatggcatttaattgatgcctgtgattgtggtgtgtatgatagcaagagcttgggctttagagtaaggagactttggataagtggcttcacttcctcaagcctcagtttctttgtctgtaaaatgagaataatttaatttatctacaataggacagatgtgaaactgagtgagatgaacacctggtatgttacaggtgctttgaaaatgtcagtttcatccttctttctgcaggttggcatcactgaaggagatggctcaaggactgggagtctcccagcaagttctgtgcaacttttgcaagactagctccttgctggcccccacatgccccatgctaggccccaatgttcagagctgggacttgagctcacaaaactggggagctgagacatttgttctcttggatctcactctctctgtcccttgtgcctctgtagctggccttcttcctgccacaggccatgcctctaccaaggacacatggcctttccctgttaggactgatggcggttctttcctatctcattacccgctaggggcctgggagccctgtggctggatctgagtgctcctgagctggcttcagctgcagaactctcagtccctcatcagatcgagactctatttcccccgtcagtctgggggcttcacaagggcaggagagccctccatcactgacttccagatcagggaccctgccaagtagggactgtcttctcagccagccatttattagtctaatattccttcactaaattccaactctatgtctggacctgtgttaggcacttcagataccacacgagtaagacaagggccctgcaggggtggtcctttggtggaaagctggtcttaagggttgggcttgggaataggcagggtcagattccagggcatggctctggactcagctggtttatacctatatgaccattacaattgtctacagatcacatccattctggctggtcaacatgcatgctgtactggctgttaaataaaaatattctgaatgtcactccttttgagggacagcacagccttccctaggcattctcctatattccccagccaaattgtagagtcagatgcacccacatttgcctgtgtccttgatttagcaggaaggaaaggaatagtcagggttgatggatgcccacttctcttctctttctcttggtcaactcaggagccttttagtctgagggaatggagaggcaaagaaagaagggagagtaatagaattgggagggcagagacttaagggttctgcttcccagccctagaaattctatcattgctcagccccaatgagaaagcagatacacctaagccatcatcaaccactaacatctcaacttgccagttgctgggtgctgggccctggcaggaatgggccaagccaagcaggggagactagagagcaccaatggccaacacagctgcctggctggggaggctgtgctgtttcccctggagacctgactggtctgtggttcccacaggaacagggttgtcttttgagcccccagtgtctggtttcattcatctcagacttgttatttcactcatctctaataaaggattggggggtcagtt

SEQ ID NO: 1141 - DNA, 281356 bp, Homo sapiens
aattctcctgcctgagcctcggcccaacaaaatggcggcggcagcggtgtcgctttgtttccgcggctcctgcggcggtggcagtggtagcggcctttgagctgtggggaggttccagcagcagctacagtgacgactaagactccagtgcatttctatcgtaaccgggcgcgggggagcgcagatcggcgcccagcaatcacagaagccgacaaggcgttcaagcgaaaacatgaccgctgagcccatgaggtaaaacgcaaccccgtctcatgggccccagcggtctgggcccaggcaccgtctgagtcgggtgtttgggaaggcgttcgcttggtgggttaggcctgtgtgttgcttagccgaaagaggcatcgttttctctttaggtgagaagggtttcggggtatcggcgcaaggctccgacgggggtgggggtggggatggggtggggggaggtggggggggcgcggcctagggtatggggcgcttcttgcaatctcccctaaacggtgacgcttggtcgggctcctctgtttattctttggtgcctgtgggattgagacctcgaagtcggaggcggtctttggtatcccggtcatttttgctaatctttgggcctagaaactgcgtggggaagaagcggggggagggtgagaagagggggaggggtgggcgggcgcgaggatgtgagatcccaggacgacttagaggcgtttaggttgctggagatgggaagcacccgggccctgcgggattttttttctgcagccccaggagacaagcctttttttgattgggttgtggtgcagttccaggtatttaggtatcttttctactccatatcctgaaggatatccttgggtttatttctaggcgaggggggacttaacacagggttttgcttccagaggaccctagtatactactttttgtgatgtccagccttaatgggacctcaagtgtttccccactttctgggcaaatttcgaggagtaattaggccctatctttatttacttatttattccatgaaggatgaagggcaggttaacgtgggctgatgcgaagtaagatttattgcaagggaaaatgcctggcaggcctcctcttaaccaatcaagcacgtttattaggttgaagctgtttttctgtgtgcttctgatttgcctcttgacgggtctgaaaatttgggtagtcaatatgaaatgtatacacttttacccaggtggctggctggcgtttcagtttgacatttgaattttcatcccacaatgtgaattaagtaatttttttactcggagatgcatccttggcgtccagtggcaaaataaaattacaaggagcatgggtcagaattgcatttcaagttggcgaaatgtgcctttgagtaactcttagattggcatatgtttttagagcaatttagctagaatgtagaattgggcaatgagcctatgatacgtatgtctgtatttctgcatgaacaagcagtagattatattttctttaccttggggaaagatatgcttcagttcttagattgtagatctctagttgtgtacacgattgtggccttggtttctgaatttgtcagtaggctcaaatacaacaaatctttatctgtggggtattaggcacgtaagtggtacccagtataacttgttggcctgtaattaccaggcactcatgttcatatgcatggatggtgtaccttacagttaaattatgacctctagattttactaagtttcacaaagtctacatttgaaactatagtttgaagtcggatcttctcagtttctttagaatgaacaaattacgtatatagaatttctgaatagaataattaattttacacaagggtcagtttttcttactagtcttggatttttgtagatcttgatgataagagtaataatcataactaagttgagtgcttattgtcgttctttataatcttgatgaattctcaaacctgtgaggtaagtacttggttttgcccattttaccgatgaggaggaaagtgagacatagatcaagaacttgaccgaagttatacagcttgtaattggtggagctggaattgaaccccatcttgacttcacagcttatgttcttaaccacaaggcattaatgcccccttcagctgccaggtctaacctgattatgaccatttaaatttagcccaagtgttacaatgaaagaagttcatattacctactctgatttgttgcaggtctatgattttgtagctgtttataatgttacattttttgtgtccaggtgtactatgtagtgagataactgaaatatttaatgctaggagagtcttaagctacatgaaaaacctctagtaaagaactgcatatatgcatgtagggaattaattaaaaagtgtgacactccctgatgatttactatgaaagagctccaagtaggtgttcagaactgtctcaggctgaagtgtcatcgatctcctaaaccataatcatggttaaaggagaatctgacaggtaatgcttgagttgaacccacagtaccaaatccctcttgagtcttttctaatgtgaggcagaaataatataagcattattgttaatattattttacacagtagttccagattttctctttatcaaatattttgtcaagcacttaaaaagcaggaacaaagactagttctaatttttacttgtgtttataaaaaaaagtaatattctaggattctgtggtggaaaaatggccagaagacaagaggaaggaaaataaaccgatgacctggctaaaacatacactgactaatcagtggctcagtctttaaaggttttgttgtttttaaaggatttttttggttgtttgtgttgtttgaaataagattgacttgcttctggcattataaaagataaggtcttttataatcaccaagctctcaatgtagtacttgggtacctgggtgtcactgctgattattttttaatttttaaatttatttttttgagacagagtctcactttgttgcccaggctggagtgaaggggcgtgatcttggcttactgccgcctccgcctcccaggttcaagtgattctcatgcctcagcctcccaagtaactgggattaacaggtgtgtgccaccacgcctggctaatttttgtatttttagtagagagggagtttcaccatattggctaggctggtcctgaactcctggactcaagtgatctacctgccttggcctcccaaagtgctgggattacaggtgtgatccaccgcgcctggctctctgctggttattcagggcccaagggctcttcagttatcaggtgatgtatgctgctaggactgggaccttcccttcagggcagcagattcccttctggcccaggatgtgtctagaattgtcatcctggagctagggcctggaatggaggcttcatgactgatgaactttaatttgttttctttatttttattttttttgagatggagtctcactctgttgcccaggctggagtgcaatggcaccatcttggctcactacaacctttgcctcctgggttcaagcgattctcctgcctcagcctcccaagtagctgggattacaggcaagtgccaccacacctggccaatttttgtatttttagtagagacggggtttcaccatgttggccagccaggctggtctcaaactcctgacctcaggtgatctgcccgcctctgcctcccaaagtgctgggattacaggtgtgagccactgcgcttggccttaatttatttgcatataaagatttcagtattgggagatttggtgaaatttgtcattctaatccttatggcaattgattacttgaaaagctgacagctatattaccttgttattgatcttaaatataaaaaggcagaagttgtctaaattgagagattttgaatgtcttagaaagtatctgttaaggtggtagtttacaagcagttacattgtaacctaattgttgaaaaatgttatctgtgaaatacttgcatttccactatgaaaagcatgaaaccaggcccttggagggggaggagatgcaaattttataaaggtttttaaaaagcatttaaatatcaatggcttggttatgtaatgggttggggtgaaaagaaagacatttgtgaccttaatttttatcaggcccagttttattattggccacccttggcatagttggccttgagctttcagttatgtattgtatttctagagataagataaatgtagtacttaaaataatatttaagtattgatgtaggtgtgtgaaataattgtttcataagtaattgtatgtgtctttttcacttttggggtctgaataaacttatgggttgggtaataggatacgggcaattcttgaatttacatgaagtgctttcccccagaccgtgaatgttcttttggatatcagaaactatttaaatagttgaagccagtgaaaactgatgcatagatcttcctttagaaatgttgaatataacagggcagtgaaaggagggtctaagcagtctgtctctaattttatcctaatgcttgtcttatgatcagcttggaagctgacatgcaagatgtttaacttctatttttccatctgtaaaatgggaataagctcaaatgggagtaaatatcaatatttatcaataatagatattgataaagtctaaaggtattctgaaggaggtaacatgtttgtaacaatggttcttaaaagagaaactaaagctctggggtcctagttttttttttttttttttttttttgagacagagtctcactatgttgcccaggctggagtacagtggcacgatctcaggtcactgcaaactccgccctccgggttcacgccattctcctgcctcagcctcccgagtagccgggactacaggcacctgccaccatgtgcggctaattgtttgtatttttagtacagacagggtttcaccgtgttggccaggatggtctcgatctcctgacctcgtgatttccacccgcttcggcctccaaagtgctaggattacaggtgtgagccaccgcgcccggctgttaatttttaagagtgaaaagaggtgctgcgactaaatggtttgagaactgcttgtatagaggaatgaacactgaactgtgagccaagccttggtttttcagttatagctctgttgcttgattgtatgactgtggacaaatcatttatctgttccaggcttctgctttgtcatttgcagaacgaacaagactagatggtctgtagcattaatttttttttgggacaaggtctcactgtcacccaagctgtagtgcagtgacactgaacatggctcactgtagccttgacctcctggctcaagcaatcctcctgcttcagcctcccatgtagctgggaccacaggtgtgtcatcatgccccgctaattttttgatttttttgtagaaacagtggtctcactttgttgcccagtctggtcttgaactcctggacttaagcgatcctcctgccttggcctcccaaagtgctgggattacaggtgtaaaccaccataccctgcctaaagttagtttttaaaaaattctgcttacaggccacgtgcagtggctcacgcctgtaatcccagcactttgggaggccgaggcaggtggatcatgaggtcaggagttcaagaccagcctggccaagatggtgaaaccccatctctactaaaaatacaaaaaaaaatcatctcggtgtggtggtgggcacctgtaatctcagctactagggaggctgagacagagaattgcttgaacccaggaggcggaggttgcagtgagctgagattgcgccactgcagcctgggcgacagggtgagagtctgtctcaaaaacaaaaacaaaaacaaataagcaaaaaattctgcttatatgagtgtttatcattttctcttatctgccttttgtgggttagggagaagggtagtggtgagataaagtttctttattcagtgtatttatatctttttgccttaaaacttacatggttaggttacaggtgttttgttgctgatacttgtcatagtatcatgtatacctggttgtataaacatttattggaaaggaaaaaacatttttgttggaaagtttggtaattattgtggcttaggatatgttctattttgaaagattgctatatccagtatatttctgcccttttatgattgaagatgtacgtctgaaaatacctatgttagttctagccggttgttctttttgcgctgggaagtctttgaattttgcactgtagctgctattttcagatcctgtctctgaaactttgtctctcagttttagcttgaagtagccatttcctgtatctgtagtccagcactcttgttaactgtcccatacaatatttgttaagaaattattgttctggcagtagtattcacatgtatatatcctgcactccatattttgggggaatgctttattagttgatcaaatacttaagtatcaatttggggccaggcatggcactgtgttagggttatgccaaaggtaataaaattcctgccatcttaaggcattcttagtcaagtgagggagattggtaagtaaatgagcaattagaaagcagtgctaaaatatggaaatatattgattgcgctagggatcagaaatgaaagaaagcctaatttgggggatgtctaggaaagttttgcaaaggagatgttaactgtattgagtcttgaatgagttagcagttaagggttgactgtgagagggcagtccagacagctattagtatggttaaagattagtcttattttccatatatcagaggaaataagacatgtacacgattagttttggtgcaagatataaagtgataaatgctgcatgaagtaaaagtaagttgttgtgtgagttcaaagtagaaagacatttctggtggggaccaaggaaagctttatagagagatagcatttgagccgggcgccgtggctcacacctgtaatcctagcactttgggaggctgaggcgggtggatcacgaggtcaggagatcgagaccatcctggctaacatggtgaaaacccgtctctactaaaaatacaaaaaaaaaaaaaaaaaaaaaaaaatccgggcatggtggcgggcgcctgtagtgccagctgctcgggaagttgaggcaggagaacttcgtgaacctgggaggcggagcttgcagtgggccgagatcgcgccactgcactctagtctgggcaacagagcgagactccgtttcaaaaaaaagaaaaaagagagatagcatttgaatctagtccttggaatataggtacagttttgacaaaggagactgtgggagaattccagatgtgaggagtagcagcttgagcaaaggaatgttgtgtatattagcattttctatttggaagaaggtcaacatcgaattttaaacttaatttctggacaaatactgtataactattgtgcctttttttttttttttgagacgtagtctcgctctgtcacccaggctggagtgcagtggcatgatcttggctcactgcaacctccgcttcccgggttcaagcgattctcctgcctcagcttcccgagtagcttggactacaggcgtgtgccaccatgcctagctaatttttgtatttttagtagagatgggatttcaccgtgttggccaggatggtcttgatctcctgacctcatgatccgcccgccttggcctcccaaagtgctgggattacaggcgtgagccaccgcgccctgcctattgtgcttttttttttttttttaagagacagggacttcctctgtcacccagcctggagtgcagtggggtgatcatagctcatagcttactgcatcctagaactcccgggctcaagtgatcctcccacctgagcctcctgagtagctgggaccacaggcatgtgccactatgcccagctactattgtgcattttgtatggtagcttttgtggcttgatgatcttgtaaaaggtacatgtgcctttgtgaatgggcctgataattttagttcagaattgtcaaaagtattatctacttttttttttttttttgagacagagtctcactctgtcacccgggctcagtggcaccatctcagcttactgcaacctccacctcctgggttcaagcgattcttctgcctcagcctccgagtagctgggactacaggtgtgagccaccatgcctggctagtttttgtatttttagtagagacggggtgtcaccatattggccaggctggtctcgaactcctagacctcgtgatctgcccacctcggcctcccaaagtgctgggattacaggcatgagccaccgcgcctggccagtattacctacttttaaataagattgtgtaggatttaatgcacagattttgaatcactgtgataaaaatgcatccttagttgtcttcattttgctcatttgaagtgctcagttgacttttgggtgggtaacatttgacttatagaatctaagataaaaaattatttctgagtaatactggatttgttattttgcttatttggattatattagttattttttggtttatttgatagcattccagatttagttttgctataatgcttgttttgaaaatgtggattttttccaaaagggttgatatttcagggaacaatttgaagcatacgacaaaatttgcatttgcttatgggggattttgtctgcagggtcagggatcagcatactgtggcctaccaaccagtggcctgttttttgtaaataaagttctttttttttgtttttgatctttgttttgttttgttttgttttgttgagacggagtcttgctctgtcgcccaggctggagtgcggtggtgtgatgtccgctcactgcaacctccgcctcttgggttcaagcgattctcatgcctcagcctcacgagtaggtgggatttcaggcatttgccaccacgcctggctgatttttgtattttttttttttttttttttttttttttttttagtagagacagggttttaccacattggcctggctggtcttgaactcctgacctcaggtgatccgcctgccttggcctcccaaagtgcagggattatagatgtgagccatgtaaataaagttctattggaatacacctatgtccatttatttacattgtctgtggctgcttttgcactgtagttgcagagttgaatagctgcagcagagacctagtagcccacaaagcctaaaatgtttactgtctggccctgtattgaaagagtttgctgattattgtgctagatgaatgcaggatactacacccctctaaaaagagctgcatagaaatacatgcatatagatgcacacacgtctgacatctaccagctacctcatttcaccacttgggttataaaccacacatatttacatctgttgtacaattttcaatccgatttcagataaccttccttctaccacttcacaataattcatgagctgcaacccttttgatgcccacttcacaagcaaacttcaggtctttttcaaagtaaagtgccacatttattgttatatttgagcatttattatttaacatgtcaaactgtgctaccatttttctttggtttctttgttttaaaaaaagtcactgatgaaatttttgaatgttgtgcttctaacctcatttttcctatgagttctatggtgttaattgcacaattttacatagtttggtggtttttaggaacccatatgttacattattgaggaactgactaattatcatcctgtaaaaagtactaattcattcaccaaacatttctggggtgatgtaaatattaagtgagttaaatgggcataaagcacttatgtctttattgttactcaaatattagttattactgattactattaccatgtgtcaggaactgtaataagtagtgcattgatgaacaagacagataagggacctgtctccatgaagcttacattgtatttttaaaaatctattaatatacattttggctagtaaccgagcccttgccccacagaaaagttgtgctgttacacaaaataatattttaagatccatccacaagtcaaagacatttcacttaaaacagctttctcagcagtgtctccttgatagggtataatattttattgaattattgtttttggctgggtgcagtggctcatgcctgtaatcccaccactttgggtggccaaggcaggtggttctcctgaggtcaggagttcaagaccagcctggccaacatggtgaaaccccgtctctactaaaaatacaaaaattagccgggcgtggtggcgcatgcctgtaatcccagctactcaggaggctgaggcaaaattgcttgaagccgggaggcagaggttggagtgagccgagatatcaccaccgcactccggcctgggcgacagaatgagattccgtttcaaaaataaataaataaataaataaataaataaataaagaattattgtttttaatttttgtttttttctgagataggctgttactctgtcactcaggctggagtgcattggtgcagtcatggctcactgcagcctccgcctccctggttgcaggtgatactcccacctcagcctcccgaatatctgggactataggtgcatgccaccatgctgagttaatttttgtatttttttgtggagatgagtttttgccatgttgcccaggctggtatcgaactcctggactcaagctatctgccctctttggcctcccaaagtgctgggattataggcatgagccaccaaacctggccatgtgattgtttttttgtaactgtaacctcaggagatgaatccgatctatctttagggagataaagagtaatcatcccttcctttttttactgtataaaaggttacaaaatataatttcagacttgtagaaaatttgtaaaaatagcacaaagattctcagatgtgcttcatccagatgcagcaaggggtaacattttaccatgtttactttatcatcctctattattatttttctgaattgtttcagagtaaattgcagacatgatgtccctttactcccaaatactttaatacatatttctcgaaactaggaatagtctgttacatgatcccagtatagttagcaaaattaaaaattagcattaaggctgagtgcggcctcccacacctgttatcccagcactttgggaggctgaggtgggaggattgtttgaggccaggaattcaagaccagtcttctcaacatagaccctgtctctacaaaacaaacaaacaaacaaacaaacaaacaaacaaaagtactaaattagccggtgtggagcatgcctggagtcccagctactcagaaagctagagtcaggaggatcacttgagcctagaagttccaggctgccatgaactatgatcatgccactgcagtctagtgtgaatgacagagtgagacccccatctcttaaaataaaagagagattagcattgatacaataccatttttttttttttgagacagagtctcacactgtcgcccaggctggagtgcggtggcgcgatcttggctcactgcaagctccgcctgctgggttcacgccattctcctgcctcagcctcccgagtagctgggtctacaggttcccgccatcacgcccagctaattttttgtatttttagtcgagacgggttttcaccgtgttagccaggatggtctcgatctcctgacctcatgatccgcctgcctcggcctcccaaagtgctgggattacaggcgtgagccactgcacccggccgatacaataccatttttaatctacagaccttattcacattttaccaattgcttcatgacatccttcatgatgaaagacaaaaagttcttgttttctgatctaccatctaattctagaacactcattatatttcattgtcatctggaacagctcaccttgccatttttttttttttgagacagttttgctcttgttgcccaggctggagtgcaatggcatagtcttggctcactgcaacctccatctcccaggttcaagtgattctcctacctcagccacccgagtaactgggactacagacatgccccaccacgcacggctaattttgtatttttagtagagatggggttgcaccatattggtcaggctggtcttgaactcctgacctcaggtggtctgcccgcctcggactcccaaagtgctgggattacagatgtgagccactgcgcccggcctcttctccatttttaaaagaacacaggccagttgatttgaatttgtctgatgtttccctttgattatatattttggtaggaacactatgaagtgatgttttgtccttcacagcacattttatcaggaggtgtataatgcctttgcttttactatgttttagaatgattttgctttgtttttttttttctgagacagagtcttgctctgtcgcccaggctggtgtgcagacgtgcgatctcggctcactgcagcctccgcctcctgggtccaggcgattctcctgcctcagcctcctgagtagctgggactacaggcgtgcaccaccatgcccagctaatttttatatttttagtagagacggggtttcactgtgttgatcaggatggtctcgatatcctgacttcgtgatccgcccgccttggcctttcaaagtgctgggattacaggcgtgagccatcgtgcctggccgattttgcttctcatgctaaaattattaatcagctcattctctgccattttatttagaggtttgaagtttggcttgattaatttctacagaattggggagagttttcccacctcccatttttcttgctttttccatttcctccttcctcagatacccccaaagttcaaaaccaaccaccccgattatgaattttcattttgtattctgaacatatagctaaaagcagagaattaagggtgaatgtttcatgttaaagtgattggacctgttgttaagcatatgaaataatatatttccttcaaaggctgactatactatagtgcatccaacatagcttgttgaatatctcagttcttttttttttttttttttttttttagctgaaatttgccacagggaaatatctctccagcctgggcaacatagtgagactctgtctcaaaaaaaaaaaaaaaattagccaggtgtggtggtgcacaactgtagtcctaaatacttgggaggctgaggagggaggatcctttgagcacaggagtctgaggctgcagtgagctatgattataccactgtactctagcctgggagacagagcaagaccccgtctctcaaaaaaaaaaaaaaattggtggtgaaatacacataccacaagatttagcattttaaccattaaaaaagtttgtttttggctgggtgtggtgactcacgcctttgggagtgatcccagcactttgggaggccgaggcggatggatcacgaggtcaagagatggagaccatcctgtccaaaatggtgaaaccctgtctctactaaaaatacaaaaaaaaaaactagctgggcatggtggtgtatgcctgaagtcccagctactcgggaggctgaggcaggagaattgcttgaacccagggggcagaggttgcagtgagccgagatggcgccactgcccgccagcctggagacagaacgagactctgtctcaaaaaaaagcttttttttttttttttttgagagaagggatctcgctatgtttcccaggctggtctcaaacttctggcctcaagcaatccttctgcttcggcctcccaaagtactgggattacaagagtgagccactgtacctggcctcatttttctattttgataaacacttttttttttttttttgagacggattcttgctgtgttgcccaggctggagtgcagtggcatgatcttggctcactgcacctctgcctcccgggttctctgcctcccgggttcaagcaattctgcctcagcctcctgagtagccgggactacaggcgtatgccaccgtgcccagctaattttttttgtagttttagtagagacgggttttccccatgttggtcaggatggtctcgaactcctgacctcaggtgatccgcccgcctcggcctcccacagtgctgggattacaggcgtgagccaccatgcctggctgataaacacttttaaggcttaacatgagctaagtattattttagaacagattgtctcaaccttggcactatagacattttgtccagaaaattttttgttagaggctgtcctgtgaatgcattttatccctgacctctacccactagataccagtaacacccctaccctgagttgtgacaagcaaaaatatttccagaaattgccagatgttccctgtgggcggtatgggtttgagaaccacttttctagataataggcatttgtagataatgaatactgagctaagtggaggagtaaatggttgaaatagactatgtggttaagtacagttacagagatataaaccaagagatgtggaagaatagcaaaaaatttccttagagagttgatagcaagtattttcccaagagagacagcaattctgagttgggtcattggggatggtggggggaaatgtgctgaggagggggaaatattctaggtggtggaacgggttatgtctagagatacggtagaggagcccttgggtgccttgagaaaaatgagataataagtatgattggagagaatatgggaggtagaattggaaagaaggatgctagttggggtcaggtttgagaaaggcttttttttttttttgagacggagtcttgccctgtcacccaggctggagtgcagtgcctcactcggctcactgcaacctccgccttctgggtttaagtgattcttctgcctcagcctcttgagtagctggcattacaggtgcgtgccaccacttccggctaattttgtatttttagtagagaccgggtttcaccatgttggccagactagtctcagaactcctgaccttgtgatccgccagcctcggcctcccaaagtgctgggattacaggcatgaaccaccacgcccggccgagaaaggctttttatgctatgctaaaatgtttcattttccccctttcattatagaaaatcaacaaatacttttaaagtctgtagagttatatgatcagctttttaaaagaatagtgatacagtgaaatggtaaaaatggtcaatggtgaatattaaactcaagaagataactctagcctgtaaagtaggaaaataggaagggatggagatttatataaaactaaaactagatgtcatatgttgcccttaaatcacatcaccctgtgtgtagacttcttcatcctcatttgtcaaaattctgacatattgtcaatactgatgaagattcttgatattcaaagcaggagtgaagtgggcaaaaatctgtattctaattttcattaccctaataatgtccttttaatttggagcagttctgtggcctctctttgtctgtcctgatcttgacatttttgaagagtatagaacaattattttttagaatgtatctctatttgggtttgtgtgatgcttctttatgattagatgaagggtatgcatttttggaagaaataacagaagtgatggtatgttgttttcagtgcctctgtaacaggagatgcatgacattggttggtcccattactgatgatggtaattttaatcacttgggtggtttccagtagatttttctatgtaaagtttatcatttttggccgggcatggtggctcacgcctgtaatgccagcactttgggaggctgaggcaagcagattacttgaggtcaggagtttgagaccagtctgaccaatgtggtgaaaccccatctctaaaaaaatacataaattagccaggcatggtggcatgcgtctgtaatcccagctgctcaggaggctgaggcaggagaatcacttgaaccctggaggtggaggttgcagtgagccgagattgtgccactgcacttcagcctgggtgacagagtgagactccgtgtcaaaaaaaaaaaaaagtttatcatttcccatttttattttgaaacagtcttgctctgttgcctaggctggagtgcattggcacaatctcagctcactgcagcctcaacctcctgggctcaagtgatcctcccacctcagtctcctcagtagcgtgttccaccacacccggctgctttttgtattttttggtagaggtggagtttcaccatgttgctcaggctggtctggaacccctgagctcaagggcactgatcacctcagcctcccaaagtgttgggattacaggtgtgagccaccacgcctggccctgaaaaatatttttaacggttacattatcatggagaattggatggtataaaacaatagcagttctcatatttgaaaataaattgatgtaatgaaacaaatgagaggatcaaataatattgtaaaaagaataaaaacccacatatggacaggtctgtggaaattgtattaaagcctacctctcccagattgtttccgtttgttgcaatccatttaagaacagtttttgggctgggcacggtggctcacgcctgtcatcccagcactttgggaggcccaggcaggtgtatcatgaggtcagatttcaagaccagcctggccaacatggtgaaaccctgtctctactaaaaatataaaaattagctgggcatggtggcatgcacttgtaatcccaggtactcgggaggctgaggcaggagaattgcttgaaccaggactcgggaggtggaggttgcagtgagccaagatagcaccactgcactccagcctggcctgggctacagggtgagactcagtctcaaaaaaaaaaaaaacaaacaaaaaacagtttgtgggaaaaaacaatccttgtgtatgacataatttgctgcttttcccatttagaaaatttaaaaaatacttatttgagatggggtctcactatgttgtccaggctagggtgcagtggctattcacaggtgtgaacatagtacactacagcctcgtactcctggccttagcatcttgagtagctgggactgcaggtgcacatcacagtgcctcgcttactttttccatttttgtctgttgatcctctctctcttcctttggggtaaaaattgtggcttgtgatggtggtttgtggggaaagaaaaagttggtaagctacaagctctgagcctttaatgtgtttttgttaaccatgcagacagacattagatacatagatacaacatagatgagttaaatttgaaagaaggcaccaaactttgttactttaaagcaggatttctcaaagggacactgttgacattgatttcagaagtgagattttcatggtttttaatgttattattataatggtatggatagtgttttgccctctaagaagtagctaggagtgtttccatagatgcatttagtttatatcacttatgtattctgtctctattttgtaagaaaattgcctatgaacagaattttttctgtatgtggatttaatgtcttcttctaaaggaaacatgggtgtggttcacatttccttagttttgagtagcatggcttaagttgtgatccaattttaaaaaatcagttgaataaataaatagaaaataaaaggataatttctgtactaaaaaagtcagctggacagttaaaacatctccttttattcgtaagtttttcaataaaaattgttaaaagcagtattcatttgtgtaatgatataatctttgttattgttttatgtgcttttctaaaatgcaggaaacataaggtaaggagaagtctttccttaccctgggaccagatgtctatgaggactgttgacttttctgctataaacaggatgataaattaacagtggtgtgataggtaaagtagatttgttatgacatatcttccattaagcgataataacttgatttttacttagttgatgaaataaaataactttgaaaccttgggtaacatgaaattgaatcaaaatattttcaagttatggaacatagtgttattaatagaatggagtgttgaaaaagcactggattatgctttctgtaacttttagttctgggtcttatgataactgtgaccctgagcctcagtgttttccttttaatctgtagtgatattttttagttcagtctctcattttaaactgcttttagctctaaaattttatctcagtgacctgttgagttatataacaatcgtatcaggtaacctagataagaagaggaaggcagtaacatttcagaaatacagtttggggttgggaatccttaagtgatccagacttctcctttggtccgaagatagtgtgaataaaacagctgagggatgtgggcatcaatatattgcagaggaaaaggttatttccaggagtggatttgcagctactcttaaatctattatgttggggctgggcactggggctcatggctgtaatcccagcactttgggaggctgaggcgggcggatcacctgaggtcaggagttcaagaccagcctggccaacgtggtgaaaccctgtctctacaaaaatacaaaattttgccgagcatgatggcgggtgcctataattccagctacttgggaggctgaggtgagagaattgcttgaacccaggagtcggaggttgcagtgagctgagattgtgccattgcactcctgcctgggtgacagagcgagactctgtctcaaaaagaaaaaaaaaatctattatgttggatagatggtcttttccagaagcaaattttatagatggaaagcattttaattaatctagtaaaattctctcattttacaaatgaggctccctctacctctctccccctctccccctctccctctctccctctctccctctctccctctccccacggtctccctctccctctctttccacggtctccctctgatgccgagccgaagctggactgtactgctgccatctcggctcactgcaacctccctgcctgattctcctgcctcagcctgccgagtgcctgcgattgcaggcgcgcgccaccacacctgactggttttcgtatttttttggtggagatggggtttcgctgtgttggccgggctggtctccagctcctaaccgcgagtgatccgccagcctcggcctcccgaggtgccgggattgcagacggagtctcgttcactcagtgctcaatggtgcccaggctggagtgcagtggcgtgatctcggctcgctacaacctcacctcccagccacctgccttggcctcccaaagtgccgagattgcagcctctgcccggccgccaccccgtctgggaagtgaggagcgtctctgcctggccgcccatcgtctgggatgtgaggagcccctctgcctggctgcccagtctggaaagtgaggagcgtctctgcccggccgccatcccatctaggaagtgaggagcgccttttcccggccgccatcccatctaggaagtgaggagcgtctctgcccggccgctcatcgtctgagatgtggggagcgcctctgccccgccgccccgtctgggatgtgaggagcgcctctgcccggctgcgaccccgtctgggaggtgaggagcgtctctgcctggccgccccgtctgagaagtgaggagaccctctgcgtggcaaccgcctcgtctgagaattgaggagcccctccgcctggcagccgccccgtctgagaagtgaggagcccctctgccccgctgccaccccgtctgggaagtgaggagcgtctccgcccggcagccaccccgtccaggagggaggtgggggggtcagccccccgcccggccagccgccccgtcggggaggtgaggggcgcctctgcccggccgcccctgctgggaagtgaggagcccctctgcccggccaccaccccgtctgggaggtgtgcccagcggctcattgagaacgggccatgatgacagtggcggttttgtggaatagaaaggggggaaaggtggggaaaagattgagaaatcggatggttgccgtgtctgtgtagaaagaggtagacatgggagacttcattttgttctgtactaagaaaaattcttctgccttgggatcctgttgatctgtgaccttacccccaaccctgtgctctctgaaacatgtgctgtgtccactcagggttaaatggattaagggcggtgcaagatgtgctttgttaaacagatgcttgaaggcagcatgctcgttaagaatcatcaccactccctaatctcaagtacccagggacacaaacactgtggaaggccgcagggtcctctgcctaggaaaaccagagacctttgttcacttgtttatctgctgaccttccctccactattgtcctatgaccctgccaaatccccctctgcgagaaacacccaagaatgatcaataaaaaaaataaaaataaaaataaaaaaaattaaaaaaaaatgagaaaattgagctctcctgaggttgcagtttgcttaacagcatagatctaattagtaattaggactagaaccaaggttatctgactcccagttcaaggttcttggtacagtaccgtgtttttaactagtccattaggttgttttctgtgtattttataacacttctgtaagaaagtggaatatttttctctaaggtatgttaaaactcttgttcgagaaaatacagtaaaggatacctgttgtatcttaaagtgatttttatgtttttctgtcaatgccacaatctgaagaaagtaaattagctacacttctattgctgtgacaatagattatttagaatcttcttgattacttgtattattgttcccgtgcttcagagctgtttccttgctatttaaaatcattatggtatagcccagaggctaagggggttttctaagagtatgcaatttgtcattgacatagtttttttgtttgtttttgtttgttttgtttgtttttgagacagagtttttgctctgttgcccaggctggagtgcaatggtgtgatctcggctcactgcaacctccacctcctgggttaaagcaattctcctgcctcagcctcccgagtagctgggattacaggcacccaccaccacacctgactaatttttgtagaggcagggtttcaccatgtcggcgaggctggtcttgaactcttgacctcatgtgatccacctgcctcggcctgtgaggattacaggcatgagccaccgcaccctgccaacacagttgtttttgattggaaaagtttattttcctaatctcaaagtagcttgtatctgttctttattgtgaaatgcagtttctacattgaatttgtgtagtctgtagttttgactgttttaagttcaataactagcttagtagtatacttgttagaggtcagagtaggttaactactagaaagaacagtccttctgcttactgtactaggaggaagtctgtggtggagggaaaaaaggagtaaaacaattccagtcttctgtaaaatttgagtaatttctttctctactccttctacatgaaaaatacatcttatttgatttttgcatcacatgccttctatatgtgttggaatctggatcaccatttcttcattacttgtgggtttttgttgtgaaaaatgtggagtaagttagaagttgactgtagaataggtaacattctcttaaattctttgatcagagtgagcagagtccagaagcttggctcagacttagggaactcatgacacttctcttaatatcctaagttcatgacatgtctcttaataccctaagtgtacaatacaatagtagatcaaggaaggcagaggtatctggcagacttagaagtaactgttcataaaaacaaggatcagtatgtttctacaagataatgatttaaagttgagccaggattagttatacctttaatataaaaaattgaaatagcttatttaatctgttctaggctatagtatacggagctaggtattaaaacattctctatatatttaactcttttttttgagacagggtctcactctgtctcccaggctagagtacagtggcatgatcttggatcactgcagcctagacctcctgggcacaagtgattctcccaccttagcctccacagtagctgggactacaggcctttgccaccacacctggctcatttttgtattttttgttgagacggggtttcaccttgttgcccaggctggtcttaaacccctaagctcaagtgatccgcttgcctcagcctcccaaagtgctgggattacaggtgtgcaccactgcgcccaggctatttgacttttttattctgtaaaattgcaagcatattcagaaataagaaaatagtataacggggccgggtgtggtggctcacgcctgtaatcccagcactttgggaggctgaggcaggtagatcacgaggtcaggagttcgagaccagcctggccaacatggtgaaaccccgtctctactaaaaatacaaaaattagccaggcgtggtggtgggcgcctgtaatcctagctactcgggaggccgaggcaggagaatttcttgaaccagggaggcggaggttgcagtgagccgagatcgtgccactgcactccagcctgggtgacagagcaagactcattttttttttttttttttttaaaaaaaagaaaaaagaaaatagtataatgggttgggcccggtggctcacgcctgtaatccagcactttgggaggccaaggtgggcggatcacctgaggtcaggagttcaagaccagcctggccaacatggtgaactcttgtttctactaaaaacacaaaaattagctgggcatggtggcaggcacctgtaatcccagctacttgggaggctgagttaggagactcacttgaacctgggaggtggaggtttcagtgagccaagattgtgccattgcagtccagcctgggcaacaagagcgagactccatcccaaaaaaaacaaaaaacaaaagacaactatatatatatatataaaataacgaaaccccctaagtacctgtcacccagcttcaacaattatcatcttgcagttagttgaatttggttaacacttacccttcagtggattattctagactaaatttccaaacataatcatattgtattgaagtgttttttgaacaaactatactatggggtatttacctaaaatgaactatttgcaaaaagataagttgattttttttcttctggtgccagtacacatcataattgtagttaaaagctattatcctcacattaaagtttaatttttaacacattatgaaaatttaaaacttacagcaaagctttaaaaattttacactgaacaccaatattattaacatctagattctacctttaacattttactcttcttttttttttactcttcttgttttatcacatattgatccatctgtccaactctccattgatgtaacatttcattttattttcttattcatttcaaagtaaattacagatattagtatagttgaggttcagtttttaaagtcatattttcaactaattgtttttcctgttttgaaagactgttatatctgaagttccacattatgacaactcatagtctctatggttccagtgcttcccattttgaacttttctttcatgttctacgaacctttattaaaatatttagagctatgtacaagtaatatatacagtatttagctaaaactaagtagaatgaatgagggttttgcttgtgtgtttattgcagtctttaaaaaaaatctcttctagtgagtcaatgtgtatcttttttttttttttttttttttttgagacagagtcttgctctgtcgcccaggctggagtgcagtggcgtgatctctgctcactgcaaagctccacctcccggattcatgccattctcctgcctcagcctcccgagtagctgcgactacaggcgcctgccaccacgcctggctaattttttttgtattttttgtagagatggggtttcattatgttagccaggatggtcttgatctcctgacctcgtgatctgcccgcctcggcctcccaaaatgctgggattacaggcatgagccaccgcgcctggccaagtcattgcgtatcttaagatggtacactaaactaatatgcttgccattggtgacaacatagatgaacctggaggacattatggcaagtgaagttagccagacgtggaaaaaataatacttcatgacttcaacctatatgtggaatctaagaatgccaagtctgcaaaagaagagagtagaaaagtagttaaatgggtaggaaggtgggagaaatggggagatattggttaaaggttaccaagttggaatcacgtaggatgactaggtctagagatctaatgtacagcatgaacactatagttaataatactgtatcatgtactggaaagttgttaaaagagtagatttcaggtgttttcagcacacacagaaaaagataactatatgtggagatgggacattttgcttgaccatagtaatcatttcactatgtatatgtatatcaaaacattcatgttgtacactttattgattgattgattgagacagggtctctcgctgttgcctcagctggagtgcagaggcatgatcacagttcactgcctgcttgacctcccaggctcaagcgatcatcccacctcagccccccaagtagctgggactacaggtgtatgctaccatgcctggctaatttttatagtttttgtagagatgggttttgccgtgttgcccaggctggtattgaactcctgagctcaagcaatctgcccgcctctgcctcccaaagtgctaggattacagatatgagccactgcgcctggccataccctttaaatatatacataaaaagaagaatgcctttaaaaattttccatttaacaattactctcagggccaaaactcactgtttaagtattttgctcttttactttgatcttggtgttctatgtagtgctaaaatatactttcatctccatatgactgcttgtaacaaaaagctgttcaccacattatgaactccctgaatacacacaataatcatatagtaaatgcttgttgaataaacaagacaaaattcatcagtttttatccttacttaattttttgaacttttccttgaacttctgttatcaaacttaatacatgaacaacagaaagatgctacggatctatgtagtacaaagtaaaatatgaaatttacacactaaatatttctgtagcatattttcagaagtaagtaattgaatataaacagaagcaagcatattctatttttttattatttaagtgggaaatattttaaaatcttatgtcatatttgctttagatttcttttaaagaattaaaacattacagatagagttgaagcctcatgggttattttaatgttttctacataaacatgtttccatatacataaaccttatttagaattttttcagtttatttatttatttttattattatactttaagttttagggtacatgtgcacattgtgcaggttacatacgtatacatgtgccatgctggtgtgctgcacccactaacttgtcatctagcattaggtatatctcccaatgctatccctcccccctcccccctccccccaccccacaacagtccccagagtgtgatgttccccttcctgtgtccatgtgatctcattgttcagttcccacctatgaatgagaatatgtggtgtttggttttttgttcttgcgatagtttactgagaatgaaattttttcagttttatacgtttatgtaagtggcaccatacagtacatattattttgcaacttgccttttttttttttgtttgtttgctcaatgttgtttttaggattttgatgtaactccagatctgcactgtccaatacaatagccactaactatctgtggctattgagtactggaaatgtagctagtccacattgagatgtgctagaaatatatttgtacatggaatttcaaatatttagtattaaaaacatgtaaaatatctcactaaaagtttagtatccctaagaatctgaaatagaaaatgctccaaaacccaaaattttttgattactgacatgactctcaaaggaaatgctcaaaggtttaatgcaaatattccaaaatctgaaaaaatctgatatattgaccacatatggaactgataatagtttggatgtattggattaaataaaatgtaaaaattttaccagtggtttccttttttaaaatatggctactagaaaatttaaatatatatttgaaatgccttacattatatgtctgttgggcagcactgatctatattgcccacttttcattcctgtttatttattattattttatttttatttttattttttgagacagagtctcgctgggtcgcccaggctggagtgcagtggtgctatctttgctcactgcagctgctgcctcccaggtccaagcaattctcttgccttggcctcccaagcagctgcgattacagctgtgcaccaccacacttggctaatttttgtatttttagtagagacggggtttctctgtgttggccaggctggtctcgaactcctgacctcaagtgatccacctgccttggcctcccaaagtgctgggattacaggtgtgagtcactgctcccagccttcactcctgtttagtattaagttatatagataatagtttgctactggtggatagttgttgttttttttttttacgaatttggtgctactaaagactgttctcatgagcattcttaaacatgtctcctttgcacatatgctagagtttctttctccctaatggttcttctgatttatacttccactggcagtttgagaatgttcttgttctgcagttcttcatcctggtcgatgtttttgtgtagataactgtaatttaatacttaaagtcaaaagcataaggaagcattggtaattatttaagtgaatataaaatgtcagcttatttttctcagtgaatcttttgtaatagtcaactcacattgcctattttttattgtagtgcttctgatctgaataaataaatttaaaatttaacagccatgttatgtatcttattagtaggcagctgcagttatgcaaccaaagaatgtcccatctttaagttccattagcttgaaaaagaaatggcagctttacgtcatggaatactgtgctgccactaaaaatgatgttttagaagaatatttaatgatgcagaaaaatattcacagtatcttaatggaaagaaaagattataaagcagtaaccatttcgttttgttaaaatcaggtctatgttagctttttttttttgagatggaatctcgctctgtcacccaggctaaagtgcagtggcgtgatctcggctcactgcaacctccgcctcctgggttcaagtgatgctcctgcctcagcctccctagtagctgggattacaggagcatgccaccacacccggctaatttttttgtatttttagtagagatggggtttcaccatgttggccaggctggtcttgaactcctgacctcaagtgatccacccgccttggcctcccaaagtgctgggattacaggtgtgagccaccgtgcccggcgagcatttccttacatgcttatctctggatggtcagattgtaggtaacttctattttgcacttcacactttttttttttttcttgagatggagtttcgctcttgttgcccaggctagagtgcaatggcgtcatcttggcccactgcaaactccgtgtcccgggttcaagcgattctcctgcctcagcttccagagtagctgggattacaggcgcccgccaccacacctgcctaatttttagtatttttagtagagacagaggttcaccatgttggccaggctggtctcgaactcctgacctcaagtgatccactcgcctcggcctcccaaagtgctgggattacaggcgtgagccaccgtgcccagcctgtacttcacacttttaatatttcattttctgtagtggatttactattaccagggaaggggaatgcaaggaggagggaagagttcttaacctaaaattttcatagttggaatattattataggaaagaagagattgaatgaggtgtcactgttcccatgtttaaagataagtcaattgggaggccgaggcaggtgaatcacgaggtcaggagttcaagaccagcctggccaatatggagaaaccccatctctactaaaaatacaaaaattagctgagcgtggtggcaggggcctgtaatcccagctactcgggaggctgagggaggagaatggcttgaacccagagggtggaggttgcagtgagctgagatcgtgccactgcactccagcctgggcgacagagtgagactttgtctccaaaaaaaaaaaaaaagataatactttccttctattcaatttcaggcttttcttaagttacaaatggaaccagccaaactatgttattgcttacccattgtttttccagcgttagaggagtttttcaaagaatattttttgatttagagattattttatttattatctatttagagattattcatcatttagagattgccatttaatttcagtaagagttccatttgcatctgatattttttagtttcggagaaaggaaatggtggagaaatggattcatctccaatcctttggaataaaattcagacagtttaagctctagtctcaacttgatttaatttggaattgcatgatgtggtgtcagatttgggttcacatccagttctcttgctgtgtaaccttgggaaatttacccagcatctgagttgtttcttcatgtgtgcagtggagacaataccaagatgaagatttcatgagatgtctagtgtagacatctatttttcagagtggatgcatttaacagttggatgctgaatttataagagtatggatttcataaaaagagcataaatttcatgatatgatgtatatatcaaaagatataggtcgggtgcagtggttcatgcctgtagtcccagcactttgggaagttgaagcggatggatcacttgatgccaggagttcgagaccagcctggccaacatggtgaaacttcgtctctactaaaaatacaaaaattagccaggcgtggtggtgtgtgcctgtaatcccagctacttgggaggctgaggcaggagaattgcttgaacccaggaggcagtggttgcagtgagccgattttgtgccactgcactccagcctgagtgacagattgagactccatcttaaaaaaaaaaaaatgatggctgaataggaacagctctggtctgcagctcccagtgagaccaaaatgtagaaggcgggggatttcttcatttccaactgaggtacccagttcatctcattgggactggttaggcagtgggtgcagcccatggagggtagcagaagcagggtggggcgtcgcctctcccggaagtgcaaggagcgagagatctcccttccccaagccaaaggaacccgtgagtctatgctatccggcacagatactacacttttcccatgatttttgcagtccgcagacccggagattccttagtgtgccaactccaccagccctgggtttcaagcacaaaactgggcatctgggcagacagtgagctagctgcaggagttttttttttttccccctcttcataccccagtggtgcctggaaccccagtgagatagacccattcactcccctggaaagggggctgaagccagggagctaggtggtcttgcttagcgggtcccactcccacagaacccagcaagctaagaaccactggcttgaaattctcattgccaacacagcagtctgaagctgacctgtgaagattgagcttggtgaggggaggggcgtctgccattactgaggcttgagtaggcagttttcccctgacagcactaaggaggctgggaagttcagactgggcagaactcaccacagcgtggcaaagtggctatggccagactgcgtctctagattcttcctctctgggcagggcatctctgaaagaaaggcagcagccccagtcaggggcttatagataaaactcacatcttcctgggacagataacctgtgggaaggtgcagctgtgggcgcagcttcagcagacttaaatgttcctgcctgctaggtctgaagaaagcagtggatcctgacaaggaggattctcctagcacagcacttgagctctgctaggggacagactgcctcctcaagcgggtccctgaccccagtgcctcctgactgggagagacctcccagcaggggttgacagacacgtcacacaggagagctcccgtgggcatcaggctggtgcccttctgggacgaagctcccagaggaaggagcaggcagcaatatttgctgttctccagcctccgctggtgatacccaggcaaacagggtcaggagtggacctttagcaaattgcagcagacctgcataagaggggcctgttagatgaaaaactaacaaatagaaagcaataatatcaacatcaacaaaaaggacccccacacaaaaaccccatcaaaaggtcatcagcctcaaagatcaaaggtagataaatccacgaagatgaggaaaacccagtgcaaaaatgctggaaattccaaaaacccgaatgcctcttctccttcaaatgaacacagctcctctctagcaaggccgcaaaactggacggagaatgagtttgacgaattgacagaactaggcttcagaaggtgggtaataacaaactcctctgagctaaaggagcatgttctaatccaatggaaggaagccaaggaacttgataaaaggttacaagaactgctaactagaataaccagtttagaggacataaatgacctgatggagctgaaaaacacagcacaagaacttcgtgaagcatacacatgtatcaatagtcaaatcgctgaagcggaaaaaaggatatcagatattgaagatgaacttactgaaataaggcatgaagacaagattagagaaaaaaggttgaaaaggaacaaacaaagcctctgaaaaaatatgggactatgtgaaaagaccaaacctatgattgattggggtccctgaaagtgatggggagaatggacccaagttggaaaacacacttcagggtattatccaggagaacttccacagcctaccaagacaggccaacgttcaaatcaggaaatacagagaacaccacaaagatactccttgagaagaccaaccccaagacacataatcgtcagattctccaaggttgaaatgaaggaaaaaatgttaagggcagccagagagaaaggtcgggttacccacaaagggaagctcccagaggaaggatatctgggcagaaaccctacaagccagaagagagtgggggccaatagtcaacattcttaaagaaaaaacttttcaacccagaatttcacatccagccaaactaagcttcgtaagcgaaggaggaataaaatcctttacggacaatcaaatgctaagagattttgtcaccactagacctgccttataagagctcccgaaggaagcactaaatacagaaaggaaaaactggtactagccactgcaaaaacattccaaattgtaaagaccatcgacactataaagaaactgcatcaactaacggtcagaataaccagctagcatcataatgacaggatcaaattcacacataataatatgaaccttaaatgtaaaagggctaaatgccccaattaaaaggcacagactggcaaattggataaagagtcaagacccattggtgtgctgtattcagaagacccatctgatgtgcaaagacacacataggctcaaaataaagggttggaggaatattaaccaagcaaatggaaaaaacaaaaaaaaaaggggtgttgtaatcctagtctctgataaaacagactttaaaccaacaaagttcaaaaaaggacaaagaagggcattacataatggttaagggatcgatgcaacaagaagagctattttaaatgtatatgcttccaatacaggagcacccagattcataaagcaagttcttagagacctacaaagagacttagattcccacacaataatagtgggagactttaacaccacactgtcaatattagacagatcactgagacagaaaattaacaaaaatattcaggacgtgaactcagctctggaccaagcagacctaatagtaacctacagaactctctaccacagatcaacagaatatacgttcttctcagcacatcacacttattcactcaaaaccccacaactacatggaaactgaacaacctgctcctgaatgactgctggtaaataacgaaattaaggcagaaataaagaagttctttgaaaccaatgagaacaaagagacaacgtaccagaaatctctgggacacagataaagcagtgtttagaggggaatttatatcactaaatgcccccatcagaaagcaggaaagatctaaaatgaacaccctgatatcacaattaaaagaactagagaaaaagagcaaacaaattcaaaagccagcagaagacaagaaataactaagttcagagcagaactgaaggagatagagacatgaaaacctctccaaaaatcaatgaatcaaggagctggttttttgaaaagattaacaaaatagaccatgagccagactaataaagaagaaaagagagaagaattaaatagacacaataaagaatgataaaggggatatcaccactgatcccacagaaatacagactaccatcagataatattataaacacctctacgcaaataaactagaaaatctagaagaaatggataaattcctggaaacatataccctcccaaggctaaaccaggaagaagttgactccctgaatagaccaataacaagttctgaaattgaggcagtaattaatagcctaccaaccaaaaaaagcccaggagcagatggattcacagccgaatgataccagaggtacaaagaggagctggtaccattccctctgaaactattccaagcaatagaaaaagaaggattccttcctaactcattttatgaggcaagcatcatcctgataccaaaacctgtcagagacacaaccaaaaaaggaaatttcaggccaatatccctgatgaccatcgatgtgaaaatcctcaataaaatactggcaaacagaatccagcagcacatcaaaaagcttatccaccattatcaagtctgcttcatctctgtgatgcaaggctggttcaacatacgcaaatcaataaaagtaatcaatcacataaacggaaccagtgacaagaaccacatgattatctcaatggatgccgaaaaggccttcgataaaattcaacaccccttcatgctagaaactctcaataaattacgtattgatggaacatatttcaaaataataagagctatttatgacaacccatagccagtatcatactgaatgggcaaaagttggaagcattccttttgaaaaccagcacaagacaaggatgccctctctcaccactcctattcaacatagtgttggaagttctggctaggcaagagaaagaaataaaggttattcaaatagcaagacaggaaatcaaattttctctgtttgcagatgacatgattgtatatttagaaaaccccatcatctcaacccaaaaactccttgagctgataagcaacttcagcaaagtctcaggatacaaaatcagtgtgcaaaaatcataagcattcctatgtaccaataatagacaaacagccaaattatgaaggaactccctttcacaattactacaaagagaataaaatacctaggaatgcaacttacaaggggtgtgaagggcctcttcaaggagaactacaaaccactgcttgaggaaataaggacgcaaacaaatggaaaaacattccatgctcatggatgggaagaatcaatatcgtgaaaatggccatactgcccaaagtaatttacagagtcaatgctattcctatcaagctaccattgactttcttcacagaactaggaaaaactacgtagagccaaaacaatcctaagcaaaaagaacaaagctggaggcatcctgctacctgacctcaaactatactacaaggctccagtaaccaaaacagcatggtactggtaccaaaacagatatatagaacaatggaacagaaccgaggcctcagaaataacaccacacatctacaaccatctgatcttcaacaaatctgacaaagacaagcaatggggaaaggattccctgttttataaatggtgctgggaaaactggctagccatatgcagaaaacagaaactggaccccttctttagagcttatacaaaaattaactcaagatcgattaaagacttaaatgtaaaacctaaaaccataaaaaccctagaagaaaacctaggcaataccgttcaggacataggcatgggcaaagacttccatgactaaaacaccaaaagcaatggcaacaaaagccaaaattgacaaatgagatctaattaaagagcttccacacagcaaaaaaactatcattggagtgaacaggcagcctacagaatgtgagaaaatttttgcaatctatgcatctgacaaagggctaatatccagaatctacaaggaacttaaattacaagaagaaaacaactccatcaaaaagtgggtaaaggatatgaacagacatttctcaaaagaagacatttatgtggccaacaaatgtgaaaaaaagctcatcatcactggtcattagagaaatgcaaattaaaaccacaatgagataccatctcacgccagttagaatggcgattattaaaaaggcaggaaacaacagatgctggagaggatgtggagaaataggaacacttttacacttttggtggaagggtaaattagttcaaccattgtggaagacagtgtggctattcctcaaggatctagaaaccagaaatacaatttgacccagcaatcccattactgggtatatacccaaaggattataaatcattctactataaagacacatgtacctgtatgtttattgcagcactatttacaatagcaaagacttggaaccaactcaaatgcccatcaatgacagactggataaggaaaatggggcacatatacaccatgaaatactatgcagccataaaaaagattgagttcgtgtcttttgcaggtacatggatgaagctgtaagccatcattgtcagcagagtaacacagtaacagaaaaccaaacactgcacgttctcactcataagtgggagtcgaacagtgagaacacatgggcacagggaggggaacgttacacattggggcctgtcaggggttggggggcaaggggagggagtgcattaggacaaatataatgcatgtggggcttaaaacctagatgatgggttgataggtgcagcaaaccaccatggcacatctatacctgtgtaacaaacctgcatgttctgcacatgtatttcagatcgtaaagtaaaaaaaaaaagatatggaagttactatgcgcgttaataaaatatgtttatacctcctcccttaggtgtctattatgtagaacaagtttattacattctaatgataaagtaaacactctgttttcaaaggtggtgttatacgtttgtgtatcttttgccccgggcatgatgatttcatcgtttgtgtaataaatttaatactaccatagtctccccttattcacacgggataagttccaagaccccaatggatgcctgaaactgtggatagtactgaatcctatatacacttatgtttttttcctgtacactcatatttatgataaagtttaacttataaattgtgcacagtgagagactgacaataactataataaaatagaacaattataacaatatactgtaataaaatttatgtgaatttggtttcaaaatatcttattgtactgtactcacccttatgatgatgatgttagatgataaaatgcttatgtgatgtgatgaaggtaggtgaattatgttaggcattgtaatgcagcatgaagctactattgaccttctggtgttacatcagaaggaggatcatctgcttgggtggtcctgaatcatcacgtcctgatgatgtctgttgctggttgtcaggagcagacagtgtccatgactaatgggcaggcagcgtatatagcatgtatacactggacaaagggatgtctcatgtccacggctggacagagcaggagagtgcaagattttgtcacactactcagaatcgtgcagtttaaaacttaccaattgtttatttctggaattttccgtttaatatttttggactgcagttgaccacaggtaactgaattcatggaaagcaaaacaaccatggacaaagtgggattactgtattatttcagattttaattagcatttttcaaaactctgtctagctagtgcttgcattgtagaatttgtctgatttcatttttattgattagggaaataagctttatttttatctggagtgatttgtttctttgtgcttcctcaaaattgagtagtggctactgagtatatatcgaaaaggaaataaattattatgtcaaaaagatacctacatttgtatgttgattgtagcactgttcacaagattaaagatatggaatcaacctaagtgatgaagaaaattggtgtgtgtgtgtgtttgtgtgtatacatacacactgtggaataatactattcagccacaaaaaagaaaaaaaaatcatgtcttttgcagcaacatggatgggactggaggccattatcctaactgaaataactcagaaagtcaaatactacatgttctcacttacaggtgggaacttaaatggttacacatagaatagagtagaataatagacattggagactccaaaaggtgagagggtggcaggggggtgagggttgaaaaattacctattgagtactttgttcagtatttgggtgatgggtacactaaaatcccactttaccaccatgcaatatatgcatgtacgaaatctgcacttgtaccccctaaatatatacaaataaaagttttttaaaacacttagtaaatagcctgtcatagggaataattgaaaccatttcgtatctcactttaaaacctttaggctgggtgctgttgcttatgcctataatcctagcactctgggaggccgaggtgggtggatcacctgaggtcaggagttcgagaccagcctggccaacatggcgaaatcccatctctactaaaaatataaaaattagccagtcatggtggcacacgcctgtaatgccagctccttgggaggctgaggcgggaaaatcacttgaacccaggaggcggaggttacagtgagccgagatcacaccactgcactccagtctgggcaacagagcgagactccatctccaaaaaaaaaaataaaaataaaaataaaaaacctttttagttctgtttcaatgttatcttctttttatttaattatttttggaataagaaataatatttatatggtttgaacaccaaaaggtataaaagatatttttaaaggtataaagtataaaagttagaaatttcccccacttccctgttctctgttcccacagctgccagcagcttaccaccccccagcccaatcactgctactgatgcctaacctatctttccagagttctttgtgtgttcagtagcagttaaccacagatctttaatcattcccctttataccataaaaggtggcatgttatgtacacttgcctcccctttgctttttccacttaatgtgtcttgagaagctttccatatatcagtacatggaaaactttcttatattgttttattttaaatttatatacaataaatgcatggatcagaaaaataattgaatagtgggccccaaattaaatgattactctaatgatttgtagatgggtttagttaaagcactgggatatttagctacaggtataggaatgcatgattattttctgtcaggaaacctagattttgttcttctccccttctttatcaaaggtgaaatcagactcttatttaaaccaggattaagtattctttgcataataatatatatttgctttcccaagttattcttcaggaaagtcttgactctctagcaaactttgtttcttaaaatggaggttagcaggtgttggaaataaggtgagagttttaacacttaaaggaaactatataaagattagatatagtcagaaatttagaaaacattaggaaattcacagagagatggatcccccttttctaccctagattacccctgggctgcttaatggcttgtctttactattagattgtgagctccttgaggtcaggttttatctgttttttatttcaataccaagtgccaagaatatattcagcatttggtgtaaatattataaaatgagtaaatgaatgtgctcttgaatagaagttaactctgattttgggttaagtcccccgccccctttttttgagacagtctcactctatagctcaggctggagtgcagtagcgcagtctcagctcactgcaacccccttctccggggttcaagcaattcttatgcctcagcctcccaagtagctgggattacaggtgtgtgccaccacacccggctgatttttgtatttttagtagagatggggtttcaccatgttggccaggctggtcctgatctcctgaccttaggtgatctgcctgccttggcctctcaaagtgctgggattacaagtatgatctactgcgtctggctgattttgtgttaaaatcctttatgtcagttccagaagaggttaaatggaagttttcgaggcaagagatacttgtgaatttgacatgagtggcctttgttttgaaattttaatgctacacagatgctgtaaaaggattttttcaggccgggcgcggtggctcacgcctgtaatcccagcactttgggaggccgaagcgggtggatcacgaggttaggagatcgagaccatcctggccaacatggtgaaacctcatctctactaaaaatacaaaaattagccgggcgtggtggtgtgcgcctgtagtctcagctactcaggaggctgaggcaggagaattgcttgaacccgggaggtggaggttgcagtagagccgagatcgcgccactgcaactccagcctgggccacagagcaagactccatctcaaaaaaagggtttttcaaaaaatcatgtacaattagaaaattgtgtctcttaaatctatttgcttatgttattaatcccagattatgactgttctttcccctaaggcattagcctgttgaaagaaacagacctataggacttttgttgatgttaaagccagaccagaaatttagaaaatcaggatatttgccattttgataagaaaaccatttaatagttgaatataggaatttgcattttgagagtgtgtactaatttagattctccaggaatagaaccatcatctgaaaataaataagtttaaccagacggacaaggagtgatatgtagttttaggtggtaagactgtgatattgttaggttacatgtatctagggcaagatgctcaaatacaataagtatatacagactaggaactctagttgtctttttttaattaatgaaaagagggttttatgcttcatttctaaacattctcaaaggaatttatgttttgttgatgatctttttttatttatataaatttacgggggtacttgtgcactttttttttaaacatggatagattacagagccgtcaagtcaagcctttagagtttccatcacccaaataacacacattgtattcattaagtaatttctcatgatctcccacctcctgctctctcacctttccaagtctgttatctatcattccatgctctacgtccatgtgtacacatttttcagcatccacatgtgaatgagaacatgtgttattcccaccaacagtgtatgagtgttcccttttctctgcaacctcaccaacttgtgttattttttgtctttttagtaatagtcattctaactggggctggatgatacctcattgtgggtatttttaaaataaaaaaaaatttgtgtgtacataggtatatttatttatggggtacatgagataatattgatacagacatacaatgttcaataactacatcagggttgtatccatcaccaagcatttatcctttcttggtgttagaaacaatctagtttctaatctctaatagtttctaatctctagtagttatattaaaatgcataatgaattattattgactgtagtcaccccattgtgctatcaaatgctaggtcttattcattctatctaactatatttttatacatattagccatccccactgtgccaccatccccattagtgccctggcccccactacccgtcctagcctctggtaaccatcattctactctctatctctatgagttcaattgttttgatttttagataccacaaataagtgagaacatgtgaagtttgtttttctatgtctagattatttcacttaatataatgacctacagttccatccatgttgttgcaatgacaggatctcatacttttttaagggctgaataggactccattgtgtatgtgtaacacattttctttattcgtccgtctgttgatggacactcaggttacttccaaatcttggttattgtgaatagtgctgcagtaatcatgggagtgcagataactctttgatatactgatttcctttctttggggtacatatttagcagtggaattgctggattatatggtagctctctagtttttttttttttttttttttttcatttttgagacagggtctcactctgttgcccaggctggaatgcagtggcggaggttcacttcagcctcaacctcgcaggcttaggggatccacccacttcagtcttccaagtagctgggactataggcgcataccaccatgcccagctaggtttttgttgttgttgttgttgttgttgaggcagagtctcactctgtcacccaggctggagtgcagtggtgcgatctcggctcactgcaacctctgcctcctcggttcaagccattctcctgccttagcctcccaagcagctgggattacaggcgcccaccaccatgcctggctaacccagctagtttttaattgttcgtagagatggggtttcaccatgttgtctagactggtctcgaactcctcgactcaagtgatcctcctgcgttggtgtctcaaagtgctgggattgcaggcacaaggcaccgtgcctggtcagaatttttttttaagggtttctcctttgtaaatttcttattcatatcttgaattgattttctgagtttcttgtattggttttcagacttttcttgcatctcagtgacccttaaaatcaatattttgaatattttatctgggattttgtggatttcattttggttaagatctgttgctgcagaatcgtgttcctttgacagtgtcatattaccttggtttctgatgtttcctttgtcttttcattgatttctgtgcatgtgctgtaacagtcacttcttatctttgaatttactttcatggtgaggggagatttcttcctgaagatgtgactataatgttggttgggccttgcttctgggtgcgtgcagtagtgaagtctctgtatgatttattttgagacagctctgttgcccaggctggagtgcagtggcacattcatagcttgcttcagcctcaaagtcctgggcataagtgatccttctgcctcagcctcctgagtacctaggactacaggcgtgtgccaccatgcctggctaattttcaattttcttttagagatgggggtctcattatattgcccaggctggtcttgaactcctggtctcaagcaatcctctctccttggcctcccaaaatgttaggattacaggcatgaaccaccgtgcccagcctctgtatgatttctttggctataaatagcattaatggtgtctgtggtttccttgatgtcttagcttgagtttatttgtggaggctgaagttgcgctggggattggaatgcctaataggcctgtctttaggtttcaatggtagtgatggtgggctaagcatgtctatccatgtgccctggggcagtgtgtgctggtaactgtgttggcagttccaggcaggctgattcttgggcttctgagtgactttctcagatgcctgttgtaatggtgtaccaggtgggtgagctggctcttgagctcctgggcaactggcatggcatagtttatggtggtagtagttttgttgagatactcttgtgggtcccaagcactttgcatttgtgttagcagtggttacaatgagatccaggccagtaaggtggtacttgcaggcatgaggcagctgaggcggtactggtagggtgttatccctgacctctgtcccctgggagaagtactctggtgtttcagagtgtttcaggtagtgggtttggttgtggaatcccctggtaacctggatcctgcactgtttctcagccaggtcaaagcctggtagagctggactgggaaagcttgcactcaggcccccacagtggtgtaatgtcatgataggcggggtggaatgatcttcaggctgctggcaaaatgcttgggtgagggatgagtgccactgctgagatcctgccatggggaagttgggcctggtcccaggagtgagttgtgttcctttcatgccccagtccaggcggagttccttcctcttgtccctgctgttcagtcagaactctgcagttcttgcctagtccctaaatcatcccagggtcgggtcatataagccccatccagctcaagacttaagcctccagggcaattaatcgtgctcaaatcctgggggtggtgtttgcttctagcactggtggtggctgcatcccacaccaggcagagccaccccatccccgcccctactcacactctgcctctccaaacagcagcccaagtttccctaatggctaggactggccctgttgcttccccgtactgctcacagttatgagctgagatcctgcatcgtgtcttgttacagctgcttaggtttcaaaaatggcatgggacacagaatgtgttccctccctgaaacagttctttctcacagtcttccagtcattccctaaattaattagattcagggcttaagagggtcagggtgctctactgaggactggattgtatggtagtggaccacagaaaaatactcaccctctcccatattggggaatcacttctggttccctgtgggtcccagccacacaggctctctgttttccttttgcttcctagattttggtttttgctgtcgcttttctgttgaactcctgtgttccctctgggataatatatccaaagtgtcattgtctacacaattttagctcttgtacctggatgaggcacgcttgaaattcttgcagtcatccatcttttcctgatcttgtttcttctgccccattccccaggttcctccagggtctcacagttcccctgtatgtgggaaaggcagttttctttctgcccaatcctgcttctcctttgtccacccagatgaggtttccgctagaattgctacttaaagtggttctgtggaacattttgtagcagagaaaatcagggctgagggagcaccataaaggttagaaaagattagaacattaggttagaaaatctgaactactctacctgtcttgattaggaggattagagttgatgttggatgggtttgttggtttattttccacttatctatcagaatgaagaacttactgccttttcttcttagttggtctaatatttatcactttaattatttttaagtgtacaattcagtggcattaaatatatttataatgtatcatgatcattactacctatgcccaaaactttttcatcatccccaacaaaactctatatccaaaaaaaaataaaaccctctatatgtacatggaacaattaagttgggcccctatcttgcaccatataaaacagttaaatgcatcaaagatcttaacgttaacagctaaaattataaaactcttagcagaaaacatttgggctgattttcatgacctgggatttggcaatgatttcataaacataatgtagaaagcacaggcagcaaaagaataagtaagttggacttcattaaaaatttaaaaatttttttacatcagaggtcactatcggctggatgtggtggctcacacctgtaatcccagcactttgagaggctgaggcgggtggatcacttgaggtcaggagttcgagaccagcctgaccaacatggtgaaaccctgtctctactaaaaatacaaaaattagctgggcatggtggcgcgcacctgtagtcccagctacttgagaggctgtggcaggagaatcacttgagcatgggaggtggaggttgtagtgagctgagatcgtgccactgcactagaacctgggcgagagcgcaagactccatctcaaaacaaacaaacaaacaaaatgaagcaatcccccccccaaaaaaaaggtcactatcaagagaataaaaagaaagacaactcagaatgggagaaaatatttgcaaatcatatgactgatgagggtttaatatccagaatgtgtaaagaacttttactgagcagcgaaaagaaaacccaatgaagaaatgaacaaaggccttcaagaaatgaacaaaggccttcaatagccatgactttacttttttaaatttaaatttaaattttttgagacaaagtcttactctcttgcttgggctggagtgcagtggtgtgactgtggctcactgcagccttgatctcccagactcaagtgattctcctacctcagtctctggagtagctaggatgacagactcacactaccacatgtgactttgtgtgtgtgtgtgtgtgtgtgtgtgtagagacagggtctcactatgttgctcaggctggtcttgacctcctgggctcaagtgagcctctcacttttatttttatttgtagtagagatgagatcttgctaatgttccccaagctggtctcgaactcctgagctcaagcaatcctaccttcctcggcctcccaaagggctgggattataggcgtgattcactgtgcctggcctagtttctttgttttaatttttttcctccccatttgtcttttgagtttccctgagaatctgtcttgctgctgtctcagttgtcattcactgttattacactggaaccctattgatgtagtggtaaggaattagggaggggaagtgttttgtaatctcatgattaaatgtcatttcttttttttttaattggtcctgagtccctgaattgtgactctcagaagtgtttcttagcccttgccctcccacttagatgagacaggaaggctataagcctcgggggttttctaattgtctttcctcttggtagataatggtgtgagcatatttgaatatagtttctttcctctcctcctgctcaaggcacaaggaaattttcctcaaatatttgcagtgaaaacatactaaaacccttgtaggattcctggaggtaaaacctaggaaagtgtaggggcccctctaagactgggatgtcaggatttttaaactctcaaactaatccatatttggcctccagaagttgtcagtttctacttgagtgtttctgttctaggaaagctgtgatattctgtatctgtctttctagttttttttggtggtggtttgccttgtgacctcagtttttggattgatctaagataaattactgattttcagttttctcagcgttttttcttgtcaggatagaagtgaggacctccaaaatccttacatattatagctgcctggtgagttttgtttgtttctttttttaaaaattttttttttttttttttttttttgggatggagttttgcgcttcttccccaggctggagtgcagtggcgcaatctcggctcactaaaacctctgcctcccaggttcaagcaattctcctgcctcagcctcccaagtagctgaaattacaggtgcccgccactatatctggctaattttttttatatttttgatagagatggggtttcgtcatgttggccaggctggtcttgaaatcctgacctcaggtgatctacccacctcggcctcccaaagtgctgggattacaagtatgagccaccttgcctggcccgttttttcttacttttagtaaaaataacctcacgtaaactgtcataggtgtctgtgggcttatttttgatgttctcctttgttggaaattcttgtgaaataccttccaggtcttagtctttgtgaggatcaggttctgctttcaattggatgttttaagaattagttttaaaataatttgtttttcttattattagcaccctatgtttagttgctgtacttatttggatagtgtggtaagcacagtggcttaggcatgagaaatataactagagatctcataattttatgtgtttataaagtgttttatttaaaaattaaataattgcaaatgagtggataaagaaactgatatatatatatctgattatatatatatatatctgattatgtatatatatctgattatatatatatgatggaatactacccggctataagaatgaatgaattaatggcatttgcagtaacctggatgggattggagactattattctaagtgaagtaactcaggaatggaaaaccaaacatcgttatgttctcgctcataagtaggagctaagctataaggatgcaaaggcataagaatgacacagtggcttttggggactcagagggaaagggtaggaaggagatgagggataaaagactacaaattgggttcatgtgtactgcttgggagatgggtgcaacaaaatctcagaaattaccactaaagaatttactcgtgtaaccaaataccacgtattccccagaagcctgtggaaataaaaaattaaaaaaattgcaaatgtaaataagacagtaacaaagatggcaaagaacaaagatgaaaaagtatgctgtattacctgaaagtgcttttatggatatcttagcttatccttcgtccatttaaatattgttagttttagccgggaacatgcctgtaatcccagcaccttgggaagctgaggcgggcagaccacttgagaccaggagtttgagaccagccaggccaacatggtgaaacccgtctctactgaaaatataaaaattagccgggcgttggggcgcatacctgtaatcccagctatttaggaggctgaggcaggacaatcacttgaacctgggaggcggaggttgcagtgagacgagattgtgccactgaactccagcatgggtgacagagtaagaccctgtctccaaaaaaaaaaaaaaaaaaaaaagacacaaaagagaaacaaaaaaaacatattgttagttttgatgattatctactagggtaagtacttttctactcattaaattccattagtgactgtgccttgatttccctgaaaggatgcagtatagagtaggcttttgattggagatagacttcctgattttccacttagtatttaggagtgaaaattattattattattatttattgttttttttttttttggagacagggtgtcactgtatcgcctaggctggagtgcagtggcttgatcctgactcactgtagccttgacttcctagggtcaagcaatcttcccacctcagcctcctgagtagctgggactacaggcacgtgccaccacagccggctaatttaaaaaaattctgtagagatgggatctcactatgttgttcaggcttgtctcaaactcttgggctcaaatcatcttcccacctcagcctccctaagtgctgggattataggtgtgagccactgcacccagccggaagtgcaaattatttaactcctttattttattcagcaaataaatgtctttctgagcctcagtttcctgtaataaggttcttataagttttaaatgaggtcagtgtgcattaaatgtacatgttagaatttggtaaggttagtaagaaaaccaaagacatgtggaccctttacaaaaaattccagcatttaccctaagagatgctttttaagtggttgaaatttggtggcatggaggaaatgtatatgggctcgtatcacatttgggagtaaaattaaggcatgaaatttaaacaaaaaataaaattgtgggtacatagtaggtgtatatatttatgggatttatgagattctgagacaggcatgaaatgtgtactaatcacatcatgtaaaatgggctgtccatcccctcaagcatgtatcctttgagttgaaaaacaatccaattttattctttcaggtattaaaaaatgtacaattaatttaatacagtaaataatacattaatttgatctcaaactcctgacctcaaatgattaattagattaattaatgtattatctattatttattatatacaccctgttgtgccatcaaatactaggccccccccccccttttttttttttggagacagagtcttgccctgtcgcctaagctggagtgcaatggtgcgatcttggctcactgtaacctccgcctcctgggttcaaatgattctgctgcctcagcctcccgagtagctgggattacaggcgcccaccaccaagcccagctaatttttgtatttttagtagagacggggtttcaccatgttggccaggctgctatcgaactcctgaccgcgtggttcgcccgccgcggcctcctaaagtgctgggagtacaggtgtgagccactgcgcctggccaaatactaggtcttattcatgctttccaactgtttttttttttgtacccattaaacgtcaccacatcttgccccccctcgcacttctcttttctttctactctgtgtctccatgagtttgttttgatttttagattccacaaataagtgagaatatgcaatgttggtctttctgtgcctggcttatttcacttagcataataacctctagttccatccatgttgttgcaaatgacgggatctcattcttttttatggctgaatagtagtccattttgtgtaactaccacattttctttatccattcatctcttttgatggatacttaggttgcatccaaacctggctattgggaacagtgctgtaataaacatgggaatgcaggtatccctttgatatgctgatttgctttatttctggtgtatacccaagcagctggattgctggatcatatggtagctcaatttttagttttataaggaacctccaaactgttcttcgtagtggttgtcctatttcacgttgttgccaactgtgtatgaggattttcttttctttacatcattgccaacatttgttattgcctgtcttttggatataagccatttcaactcaggcaagatggtatctcatggtagctttgatttgcatttctctgatgatcagtgatgtagaatgctttttcatatgcctatttgcaatttgtatgtcttcttttgagaaatgtgtatccacattttttgcccatttttgattggattattagatttttattctgtagagttgtttgagctacttacatattctggttattaatcgcttgttagatggatagtttgcaaatactttctcccattctttgggttgtttgttcactttgttgattgtttcttttgttatgcaaaagctttttaacttgatgtgatcccatttgtcaagttttgtttggttacctgtgcttgtggggtattgttcaagaaaattttgcccagactaatggcctagagagtttccccaatgttttcttgtagaggattcataaattgaagttttagataaaattctttaatccattttgattttatttatgtatagagcaagagataggagtctagtttctttttctttttttttttttgaggtggagtttcggctcttgttgcccatactggagtgcaatggcacggtctcagctcactgcaacctccgtctcccaggttcaagcgattctcctgcctcagcctcccgagtagctgggattacaagagcccaccaccatgcccgtctgatttttgtatttatttatttttatttatttatttatttatttatttagttttttgagacggagtcttgctctgtcacccaggctggagtgcagtggcacgatctcggctcactgcaagctccgcctcccgggttcacgccattctccagcctcagcctcccgagtagctgggattacaagagcccaccaccatgcccgtctgatttttgtatttatttttatttatttatttatttatttatttatttatttatttagttttttgagacggagtcttgctctgtcacccaggctggagtgcagtggcacgatctcggctcactgcaagctccgcctcccgggttcacgccattctccagcctcagcctcccgagtagctgggactacaggcgtccgtcactgtgccggctaattttttgtatttttattagagacggggtttcaccgtagccagaatggtctcgatctcctgacctcgtgatccgcctgccttggcctcccaaagtgctgggattacaggcgtgagtcattgcgccaggctaatttttgtatttttaatagagaccggatttcaccatgttggccaggctggccttgaactcctgacctcaggtggtctggccgtctcggcctcccaaactgctgagattacaggtatgagccactgcacccggcctggagtctagtttcattcttctgtatatggatatccagttttcccggcaccatttatttatttatttttatttattttatttttttttgagacagagtctcattccatcacccaggctggagtgcagtggtgtgatgtgggctcactgcaacctctgcctcccggattcaagcagttctcctgcctcagcctcccgagtagctgggattacaagctaatttttatattttgagtagagatggggtttcaccatgttggccaggctgatctcgaactcttgacctcaaatgatccacctgcctcggccccccaaattactgggattacaggcgtgagccaccgtgccgggccagcaccatttatttttattttattttacttatttttttgagagtgagtctccctatgttgcccaggctggagtgcagtggtgctatctcatctcactgcatgcagcctctgcctcctgcgttcaagcgattctcctgcctcagcctcccaagtagctgggattacaggcacccaccatgatgcccagctaatttttgtatttttagtagagacggggtttcaccatgttggccaggctggtctcaaactcctgacctcaggtgatccttccgccttggcctcccaaagtgctgggattacaggcatgagccaccatgcccagcctggagtctagtttcattcttccgtatatggatatccagttttcccggcaccgtttacttatttatatttatttattttattttttttgagacagagtctcatttcatcacccaggctggcgtgcagtggtgtgatctaggctcactgcaacctcttcctcctgggttcaagcaattctcctgcctcagcctcctgagtagctgggatgacaggtgtgtactaccaccatgcccaactaatttttgtatgtatgtatgtatgtatgtatgtatgtatgtatgtatgtatgtatgtatttgagacagaatcttgctcttttgtcgaggctggagtgcactggcacgatctcggctcactgcaacctccgcctcccaggttcaagcgattctcctgcctcagcctcctgaggagctgggattacaggtgcatgccaccacgcctggctaatttttttttcgtatttttagtagagatggagtttcaccatgttgcccaggctggtctcgaactcctgaccttgtgatctgctcacctcagcttcccaaagtgttgggattacaggtgtgagccagcgtgcctggccccagcaccttttattttatttattttatttatttttctgagagtgagtctcactgtgttgcccaggctggagtgcagtggtgctatctcccctcactgcaacctctgcctcctgggttcaagtgattcttctgcctcagccttccaagtagctgggattacaggtgcctgccaccatggctggctaattttttttttttttttttttttttttttagcatagatggggtttcaccctgttggccaggctggtctcaaactcctgacctcaagtgatccgtctgctttagccttccaaagttctgggattacagatgtgagccactgtgcctggccccagcatcatgtattgagcctttttcttttccccagcatatgttctcggcacctttctagaaatagaaaatgagttcaccgtagatgtgtggatttgtttctgagttctgtattctgtccattggtttatgtgtctgcttttatgccagaatcatgctgttttggttactataactctgtggtataatttgaagtctgataatgtgattcttccagttttgttctttctgcttagtatagttttgggaattctggaacttttgtagttccgtgtaagttttaggattgttttttctatttctgtgaagagtgtcattggtattttgatagggattgcattgaatctatagattgctttggatagtatggacagtttaacaatattgattcttccagtccatgaacatgaaatatctttacattttttggtgtcctcttcaatttcattcagtttgcttttcagattggtcactgtcgatgtttagaaatgctgctgatttttgtatattgattttttatactgacagtttactgaatttgtttatccgttctaatagtttttttgtagagtctgtaggtttttctaaatataagatcatatcatctgcaaataagggtaatttgacttcttcctttcccttatttctttctcttgtctggttgctgtagctaggacttccagtagtaccatgttgagtaactgctggaagtgggcattcttgtcgtgatctggatcttagaggaaaggcgttcagtttttcccctcagtttgataccagttgtgggtgtgttgtatatggcttttattatgttgaggtatgttcctcctaaacccatttttttgagggtttttatcatgaaggaatgttgaatattatcaaatagtttttaagcatcaattgatataatatggtttttgttcttcattctgttgatatgatgtatcacattgatttgcatatattgatcccctcttgcatccaagggataaactccacctggttacgatgaatgatctttttaatgtgtctgatttgctagtattttgttgaggatgtttgcagcaatatttatcagagatattggcctgtcattttctttttttgatgtgtttttgtcaggttttggtaacagggtaatactggcctcacagaatgtgtttggaagtattgcttccttttattttttggaatagtttgagtaggaatagtattgatgcaggaattttctcggcccctttgttggacttgtgacaggggcgaatgtttactcagcctgccgtgctcaaccccttgttggagggtgcatgtgagtgagtgagtgcgggacctggccagctggtgggggcactgacacagcagcaagccctgtgcagggaccacggccagaccaggcacaagcgagtgagtgtgggacccagctgttctgagcaccagcaggagcaggcctgtgcacagcacccaggttgatggggaggggggtggtgtctgtgaccccgaggcccctgagggggtgttaacagtgctcctttagttctgctgtctgctgatggctgtgtgttaacaagttggcctcttgccttgtcatgtggggtggctgccctccactggtgagggcaaagggctggtgtgacagtcttttttgggtacctgcactcagtgggtcctgagctcttgtctggcatccaagaagaatgaggttgagtggacacttgaaggatggtgaaggtgaagaattttattgagcagtgggaatggctcagtggagaggggagctggagaggggatgggaagggctgatctccctgaagtccggccgtttcttccctaagtcatgctgtctcctttcccaaagtttggccatcttctctccgaaattaagctgtttctctcctctctaccaactgaatctggggtctttataagcataggatcctctttataagcacaggatgggggcggggcaggctgtagaagttttggaaaaggcaacattctattggtaaagagacattattcaaacagaaccaatcgggagagagcggacaaacaggaatagaagttttcactttgggctgtgggtttcaggctttttggcttgaacgtggggtttcaccagggactgcccttgtcttcctagaatttctctgcctcctgcctctatcagtattagatcttctttaaatgtttggtagaattcagcagtgaagccatcaggtcccaggcttttatttactgggagaatttttattatggtgtcaatctcgttatttgttatagctgtgttcaggttgcagatttgttcatggttcaatcttggtagattgtgtctaggaatttgtccatttcttctaggttttccagttcattagcatatagtttttcatagtagccatgaatgaacctttttatttctgcagtattggttatcattgtaatgtctccattctcatctctggtttatatatttggatcttcttttttttttctttttttttttttactctggccaaaggtttttaaattttcttttaacttttacaaaaaccaacattttgttttattgatattttgtattattttctttatttcagtttcgtttgcttcactctgatctttattatttcttctaattttggggttggtttactcttgcttttcttattctttaagatgtgttgttaggttgtttatttgaagtatttcttcttttttcatgtaggcactcacagctataaacttcccttttagtaatgcttttgctgtatcccataggttttggtatgttgtgtttcagtatcatttgtttcaatgaattttccaattttcttcttaatttttgcattgacttactgatcattcaagaacatattgtttaatttacatgtatttgtatacttttcaaaatttctcattattgatttctagttttattccgttatcagaggagatgcttgatattatttcaatatttttaatgtcttaagacttgttttgttacttaacatatgttctatccttgagaataatccatgggctgaggagaagaatgtgtattctgcagcccttggatgaatttttctgtaaatatctattaggtccatttggcctctaatgcacattaagtctgatgcttcattgttggttttctttggaaggtctgtccaatgctgaaagtgggatattgaagtctccaagttttatcatattggggcctgtctctcccttttgctctaataatacttgctttatatatgtgagtgctccagtgttgggtgcatttatgtttaaaatggttacatcctcttgctgaattgactgctttatcattatatagtgaccctctttggcttttcctatagtttttgtcttgaaatctattttgtcttatattagtatagccacttctgcacttttttggtttccattggctttggaaaagatttctcgtaattctgtttgataaggacacatgttaggaggttttcaacacttcagtgagtagtaaacttgtaagtaaagcaggtatgaacagaatctcttgaattagtgaaaagtcaaaatcgttaattactgtttaatttaaaactgaaattataggtattaacaaataactatatgccttatactgtactttatttatttatttttccgagacggtcttgctctgttgcccaggctggagtgcggtgacgtgatcttggctcactgcagcctctgcctcccgggttcaagcaattttcatgcctcagcctaccgagtagctgggactacaggcatgcactggcacacccagctaagttttttgtatttttagtagagatgggatttcaccatgttgcccaggctggtctccaattcctgacctcaagtgatccacccaccttggcctcccaaagtgctgggattacaggcatgagccatcatgcccggccatataatgtactttaaacatgatgattttgaaactggaaacacacgcacatgtgagtaatttcttaaatggaattgaattaccttgaagaatcttagaaaaatgatgtttttaattttaaattagttttgcgtcatacatgtctttatttctcaaattttaaagaaaagtctatgaattaaagaaaataaaacttttcctgcatgaaagcaatgagtgtattatgtaccaaaaaggtagaagaaaaatatcttctgtaatattagctagatattacttactaaagatatttttggggtatatttattagcaatattttaatgcaattttaaacataattgtcatcatacttcatagacagtttatagcctgctatttttggttagcattgtagtatgagctattttccatattatttgaacttttaaaatttaatggttggtatgatattgtatgacttgtatgcatccttgtttacctagtctttattatacactttaattgattacagttttttttttttttttttgcttttgtgagcatctggcagataactttcttgagtaaagttattatgtagaaatattttctttgggccaggtgcggtggctcatgcctataatcccagcactttgggaggctgaggcaggtggaacatgaagtcaggagttcaagaccagcctggccaatatggtgaaaccccgtctatactaaaaatacaaaaatcagctgggcatggtggtgcatgcctgtagtcccaggtactcaggaggttgaggcaggagaattgcttgaacccgggaggtggagaggttgcagtgagccgagatcgaaccactgcactccagcctgggcgacagagcaagactccaactcaaaaaaaaaaaaagaaaagaaaagaaaagaaatactttcttactttctttgtatagataaagggagatagaattactagatcaaagtctcttgatggtttttgccaatttgttttgtaaatgtatgtatcaccacaggctatctatgagagtgtctatttcatggaaacttagcctacaatgaatagtcattttacccctaaatatttgataagttaaaaaatgctatcacatttaacatttcataggctttaagaagttgcagttttatattcatttcttcatgcattttgtgtactatttcaaaagtttctataggggaatgagagcaaagtaatgtgtttttcattatttattttgctaaccaaacatatttaattactaaccaaaaggatgatcctaattaagccaacacttggaattattttcatgtaaaatgtctgtgatagagataattgaatttaataatgaaaaaagtattacagaaatttgctcattaaactgagcttgttttcagctaatccttctgcgaagtgataatgactttttttttttttttttaaataaagatgggggctcgctatgttgaccaggctggtcttgaactcctggcctcaagtgatcctcccatctccgcctctcaaattgctaggaatacaggcatgagccaccacacttggtttaatagtggaatttttattacacttttttatggattcgaggagaggtggcattgtacataacacattctaccgctaattttccatctttcacttttctcattgtgctttccttcccattccgttcctggtgttgaaccaatgcatcatttgtaaatttgtagacagtctgagtttttctgccataatctgttgtttcttcagacttcttctctggtttataagaaaactgttgttttaaaactctcagttttgtattttttatttcttattatactttaagttctgggatatgtgagcagaacgtgcaagttttttacataagtatacatgtgccatggtggtttgctgcacccatcaacctatcatctccattgggtatttcttctaatgctatccctccccttgcccccaaccccccaacaggccccagtgtgatgttcccctccttgtgcccatatgttctcattgttcaactcccacttatgagtgagaacatgcagtgtttggttttctgttcctgtgttagtttgctgagagtgatggtttccagcttcatccatgtccctgcaaaatatatgaactgatcctttttttatggctgcatagtattccgtggtgtataggtgccacattttctttatccagtgtaccattgataggtatttgggttggttccaagtctttgctactgtgaatagtgctgcagtaaacatatgtgtgcatgtgtctttacagtagaatgatttataatcctttgggtatatacccagtaatgggattgctgggtcaaatggtatttctaattctagatcattgtggaatcgtcacactgtcttccacaatggttgaacgaatttatcctcccaccaacagtgtaaaagtgttcctatttctccacatcctctccagcatctgttgtttcctgacttcttaatgatcggcattctaattggcatgagatggtatctcattgtggttttgatttgcatttctctaatgaccagtgatgctgagctgtttttcatgtttgttggccatgtaaatgtcttctttggagaagtgtctattcatatcctatgcccactttttgatagggttatttgtttttttcttataaatttaagttctttgtagattctggatattagccctttgtcagatggataaaaaaacactatttttttaaaaaattttccaattcctcatcggtaaaaaagcagtaaaacattcatggtaatgatcatggcctatagttttttttttttttaagtgacattaggatttaaaactggtatgaaacctaatcatttattttagttagctaatatcaggatttagatttatttttttgacccaattgcagataggcagatcagatctcatagactgccatctgcctcaagctccttttgtagttatgtgaatgtgagcctgaaggctgaacccacttttctctaatggagatttttttttattacactttaagttctagggtacatgtgcacaacgtgcaggtttgttacatatgcatacatgtgccatgttggtgtgctgcacccattaactcgtcatttacattaggtatatctactaatgctatccctcccccctccccccaccccatgacaggccccggtgtgtgatgttccccttcctgtgtccaagtgttttcattgttgaattcccacctatgagtgagaacatgcggtgtttggttttttgtccttgcgatagtttgctgagaatgatggtttccagcttcatccatgtccctatataggacatgaactcatccttttttatggctgcatagtattccatggtgtgtatgtgccacattttcttaatccagtctgtcattgatggacatttgggttggttccaggtctttgctattgtgaatagtgctgcaataaacatacatgtgtgtgagtctttatagcagcatgattgataatcctttgggtatatacccagtaatggggtggctgggtcaaatggtatttctagttctagatccttgaggagtcaccacactgtcttccacaatggttgaactagtttacagtcccaccaacaatgtaaaagtgttcctatttctccacatcctctccagcatgtgttgtttcctgactttttaatgatcgccattctaactggcatgagatggtatctcattgtggttttgatttgcatttgtctgatgaccagtgatgatgagcatttttacatgtgtctttggctgcataaatgtcttcttttgagaagtgtctgttcatatcctttgcctactttttgatggggttgtttgatttttttcttgtaaatttgtttaagttctttgtagattctggatattagccctttgtcagatgagtagattgcaaaaattttctcccattctgtagtttgcctgttcactctgatggtagtttcttttgctgtgcagaagctcttgagtttaattagatcccatttgtcaattttggcttttgttgccattgcttttggtgttttagacatgaagtccttgcccatgcctatgtcctgaatggtattgcctaggttttcttctagggtttttatggttttaggtctgacgcttaagtctttaatccatcttgaattaatttttgtgtaaggtgtaaggaagggatccagtttcagctttctccatatggctagccagttttcccagcaccatttgttaaatagggaattctttccccattttttgtttttgtcaggtttgtcaaagatcaggtggttgtagatgtgtggtattatttctgagggctctgttttgttccattgttctatatctctgttttggtaccagtaccatgctgttttggttactgtagccttgtagtatagtttgaagtcaggtagcgtgatgcctccagctttgttctttttgcttaggattgttgtggcaatgcggtttaaccactctgaaaagatgtatttaaggacttttatctagactctatggtgaggtataacatagtgctggttgagtcagcttcaagtttttgtagagggaggaagagagtaacaaccatgtctggatttaataaaaagtttagcataagtaaatgtgtgctcttttgccttaagaaaatatttttcaatatataaaaaggattaatgagtgctgcctttcagatacttggtttggtgtgtttgaaacatcatttccaaagataggacatacacatttccagggatcatctctatgatatgactctagaaatgatgtagatttttaaaatcaatgtcagaacttatagacacaaatgtatgctttccttctaagtagtcactttgggagcccatatacataacagtggtgtcattcctgatgatatgttgggaactctcattttgtaaccagtttagaagtcatgcaagtaaataaatcttcaggattacttcagatttgggcaaaaaattagttttacccaacttgatcattttgcatttttcaccatatttgactctaagtgaaaactggctatttccaaaaatcatacccatcctgaggatgtgaagatatttttgggctgggcacggtagctcactcctgtaatcccagcagtttgggaggctgaggcagtagggttgtttgaggccagaatttgaagaccagcttggtcaacatagtgagactccctctctccaaaggaaaaaaaaaagtgaagttttttttttctttttcaaatgagtaggcagcattgtttagttatctgtttttttttcttttttttccactgttggacttctgtccattctctttatttgtttatttatttatttgagatggagttttgctctgttgtctaggccggagtgcagtggcgcgatcttggctcactgcagtctctccctcccggctcaagtgattctcctgcctcagcctcccaagtagctgggattacaggcatgcaccaccaggcccggctaattttgtgtttctaggggagacggggtttcaccatgttggccaggctggtctggaactcctgacctcaagtgatctgcctgtctagctcccaaagtgccggggttacaggtgtgagctaccgtgcctggcctgctgatcatactctcttgattttatttttgtactgtggtactgcggttgatggactgcactgatgttatccatatttttaaccttggtcacccacagtgtgaactcattaaatagctgactttgcaatttgattgctatgatttgggaatgagtgtggcagtcataattgtgcaggtttgctatcgtttcatttctagagaacttttctatggtgatctattgatgagataagatatagtatgacattatttattcctctttttgacttttggttctcaggaattttgggtgctgtgagttgacatgtagcatcatttcctcaggtctcattttctatctgagcacgattaaggacacagtgacctgatgataaatttttttgtacatctgactcttatctgaaagaatggttattggccaaatatggaaaccatacccacttggtacctttattctagaggcaaagtttgtttcaaaattttgtaaaacaaccctctccaccaaaagaaaacaaatacccacacaagatctctagttacggtgtctgttatatctcatttcttttccttccctaaatatactgagctattcttaactaaatacaggaaaattgtgcagaggaacacttactaagtgttcagtaaatgttttcatttttcttatgtgtatatctagaagtagaattgttgggtcattgagtaactgtttctgcgtaaatatctatacacgtgccatggtggtttgctgcacccatcaacccgtcatctacattacgtatttctcctaatgctatccctcccccaacccctaacaggccccagtgtgtgatgttcccctccctgtgtccatgtgttctcattgttcaactcccacttatgagtgagaacatgcagtatttggttttctgttcttgtgttagtttgctgagaatgatggtttccagctccatccatgtccctgcaaaggacataaacgcatccttttttatggctgcatagtattccatggggtatatgtgccacattttctttatccagtctatcactgatgggcatttgggttagttccaagtctttgctattgtgaatagtgctgcagtaaacatgtgtgcatgtgtctttatagtagaatgatttataatcctttgggtatatacccagtaatgggatggctgggtcaaatggtatttctagttctagatccttgaggaatcgccacactgtctgccacgatggttgaactaatttaccctcccatcaacagtgtaaaattgttcctatttctccacatcctctccagcatgtgttgttccctgactttttaatgttcgccattctaaccggcgtgaggtggtatctcattgtggtttttatttgcatttctctaatgaccagtgatgatgagttttttttcatatgtttgttggccacataaatgtcttcttttgagaaatgtctgttcatatcctttgcccactttttgttagggttgtttgcttttttcttgtaaatttgtttaagttctttgtagattctggatattagccctttgtcagatggatagatcacaaaaaagttctcccattctgtaggttgcctgttcactctgatgagatatatatatatattttttttttgctgtgcagaaggtctttagtttagttagatcccatttgtcaattttggcttttgttgtcattgcttttggtgttttagtcatgaagtctttgcccatgcctatgtcctgaatggtggtttgcctaggttttcttctagggtttttatggttttaggtcttatgtttaagtctttaatccatcttgagttaatttttatataatgtgtaaggaaggagtccagcttcagttttctgcatatggctagccagttttccaaacaccatttattaaatagggagtcctttctccattgcttgtttttgtcaggtttgtcaaagatcagatggttgtagatatgtggtgttatttctgaggcctcggttctgttccattgttctatatctctgttttggtaccagtaccatgctgttttggttactgtagccttgtagtatagtttgaagtcaggtagcatgatgcctccagctttgttctgtttgcttaggattgtcgtggccctgtggggtattttttggttccatatgaaatttaaagtagcttttttttccaattctgtgaagaaagtcagtggtagcttgatggggatagcattgaatgtatacattactttgggcagtatggccattttcatgatattgattcttcctatccatgagcatggaatgtttttccatttatttgagtcctctcttatttccttgagcagtggtttgtagttctccttgaagaggtccttcacatcccttgtaagttgtattcctaggtattttattgtctttgtagcagttgttaataggaattcactcatgatttggctctctatctgttattgttgtataagaatgcttgtgatttttgcacattgattttgtatcctgagacttcgctgaagttgcttgtcagcttaaggagattttgggctgagatggtggggttttctaaatatgcaatcatttcatctgcagacagagaatttgacttcctcttttccggattgaataccctttatttctttctgttgcctaaatgccctggccagaacttacaatactgtgttgaataggagtggtgagagtgggcatccttgtcttgtaccgggtttcaaagggaatgcttccagtttttgcccattcagtatgatgttggctgtggttttgtcataaatagctcttattattttgagatacgtttcatcggtacccagtttattgagagtttttagcgtgaaggagtgttgaattttattgaagtccttttctgcatctattgagataatcatgtggtttttgtcattggttctgtttatgtgatggattatgtttattgatttgcgtatgttgaaccagctgtgtatcacagggatgaagccgacttgatcgtggtggataagctttttgatgtgctgctggattcggcttgccagtattttattgaggatttttgcatcgatgttcatcagggatattggcctgaaattttctttatttgttgtgtctctgccaggttttggtatcaggatgatgctggcctcataaaatgagttagggaggattccctcgttttctattttttggaatagtttcagaaggaatggtaccagctcctctttgtacctctggtagaattcagctttgaatctgtctggtcctggacttattttgatcggtaggctattagttactgcctcaacttcagaactttttattggtttattcagggattcgacttcttccttgtttagtcttcggagggtgtatgtgtccaggcatttatccatttcctctagattttctagtttgtttgcatagaggtgcttatagtattctctgatggtagtttgtatttttgtgggatcagtggtgatatcccctttatcattttttattgcatctatttgattcttctctcttttgttctttattagtccggatagtggtctgttttgttgatcttctcaaaaaaacacctcctgaattcactgatagtttgaagggtttttcctgtctctatctctttgagttcttctctgatcttagttatttcttgtcttctcctagcttttgaagttgtttgctcttccttctctagttgttttaattatgatgttagggtgttgactttagatatttcctgctttctcttgtgggcatttagtgctataaatttccctgtacacactgctttaaatttgtcccagaaattctggtatgttgtctctttgttctcattggtttcaaagaacttctttatttctgccttaatttctttgtttacctagtagtcattcaggggcaggttgttcagtttccatgtagttgtgcggttttgaatgagtttcttaatcctgagttctaatttgattgcattatagtctgagagactgttatgatttccgttctttttcatttgcttaggagtgttttacttctaattatatggtcagttttagaataagcacgatgaggtgctgagaagaatgtatattctgttgctttggggtcaagagttctgtagatgtctgttaggtctgcttggtccagagctgagttcaagtgttgtatatccttgttaattttccgtcttgtcggtctgtctaatattgacagtgggttattaaaatctcccactattattgtgtgagagtctaagtctctttgtaggtctctaagaacttgctttatgttctgggtgctcccgtattgggtacatatatatttaggatagttagctcttctcgttgctttgatccctttaccattatgtaacacccttctttgtctgttttgatctttgttggtttaaagtctgttttatcagagactaggattgcagcccctggttttttttgctttccatttgcttggtaaatgtttctccatccctttattttgaacctatgtatgtctttaatttgtttttaaaattattatatccatcctacttagtataaattggtttcttgttgtggttttgatttgcatttccctgatatgactaatgatcttgagcattttttcatgtgcttattggccattggtatatattcttttgagaagtgtatatctaagtcttttccccatttaaaaaatagggttgtctttttgttgtttaattgtaagaagtctttatgtattctggttaccagaccctcatgagatacaggatttgaaaatcgttttctctcattgtgtttgctgtgttttcactttcttgatggtgccctttgacatgcaaaagttttgacttttattaaaaatggggctgggcatggtggctcacacttgtcatcccagtgctttgggaggctgaggtggaggatttcttgaggccaggagtttcagaccatcctgggcaacataactggaccccatctctacaaaaaattaaagaaaaaatttagctaagagtatagttgtgtgctgcacttcctcaactaagaacataggtgtgtgccacaggtactcaagatgctgaggcgggaggattgctttagcccaagagttttgagacctcagtgagtcaaggtcacgccactgtgctcaagcctgtgtgacagagcaagaggctaactctaaggaaaaaaaatggggtaaacttatactttccttatttaaagttttaactccttaaaaccctgttgaattacagatacatctattatataacttaagagttgatgctataggctgggcacagtggctcacgcctgtaatcccagcactttgggaggccgagatgggtggatcacgaggtcaggagatagagaccatcctggctaacacggtgaaacctcgtctctgctaaaaatacaaaaaaattagccgggcgtggtggcgggcgcctgtagtcccagctacttgggaggctgaggccggagaatggtgtgaacccgggaggcagagcttgcagtgagccaagatcacgccactgcactccagcctgggtgacagagcaagactccgtcttttaaaaaaaaaaaaaaaaaaaaagagttgatgctataaaacttagttaatgaaatatttccctgggcgatggagctcttgcaagtcctgttgtattttttgttcatctttatgccagtcagttagacagttcttctatgtcaagcagaggatggaataataaaccaaaacactgcttagggctttcagagagtaagtgttcagtaaatatattcgataaattactgaattatttttttaaatgatggaaaggaaaatcttgccctctctttttctgggtgttggctagtataaatctttcttgaagtgataatctacatctatgttttgatttctaaggatttcccaaatataagctatatataagtgagaggaaataataacttaggtgcctaatgataatatgacaagataagtacaagggtcagctatttgttgtgaaatagcaatggatataatttaaatatgaatacctttttgctgtttaatcccccaaattttcttttgatttcttttaaaattcttttgtggtaggtaggtttattgtttcttaagaattaacttaagggtagtattttctgatacatttttaagtaacatgaagtttaacttctgtttaaacacatcatatagagtacattgaaagacctcagtattttcgaaatgtttagtaagtaatatcagcagtttccttaaatgatattttaatcctaggtaagtgtacaggtaggttgtgttactcatatttttatattcttagtgaaatagaattcttttttttttttttttttgagacagggtctgactgttgccttggctagagtgcagtggcatgatcttggctcactgcaacctctgcctcacaaggctcaagccatcctcccacctcagcctcctgagtagctgagaccacaggcatgagccacccatgctctattatgagccaccacacctggcctaaaattcgttttctttaatattttttctttctacacccacaactgtaacatttcccttagtttttactttgaatgtgcatactcttacacgacttacagtatggctatattttcagtttgctagagctttacaattaatttaaaacatgaaaggctaattaagggaattctttaaattttgttttaatagtgaaagcaagttgaatacattggtgcagaagcttcatgacttccttgcacactcatcagaagaatctgaagaaacaagttctcctccacgacttgcaatgaatcaaaacacaggtaaattgaaaaagaatgtgctataccttctagtcttttttctattttttttttacacttatggaggtaaccatttattttattcagagagcagcttttaaaagagatttcagtttgtggaaaatgacagattagcaagctttatagaagcccctattatgtatcttagctatatctgatacaggagattttaattttggtaagtatgactatagaaagcttagaaaaggaagcatttatggttttatatgtaatggaaatgtgttatagaatggctagtgaatgttgactgtgaaaaaatagtattagaagaggcaggagtagtataggaatgttttgtcctagcaatcattcatgtattaggagttaaatttttatttttatttttgtgatggagtctcgctctgtcacccagtctggagttcaatggcatgatcttggctcactgcaacttccgcctcttgggctcaagctattctgctgcctcagcctcctgagtagctgggatcacaggcgtctgccaccatgtttggctaattttggtatttttagtagagactgggtttcaccctgttggccaagctggtctggaactcaagtgatctgccctcgttggcctcccgaagtgctaggataacaggcatgagccatcacacccaacataagagttaaatttttatgttgtttgataatatccctgagtagatttggtgtatttattttttaaaataaaaccacttaacacctcctctctacctccctgtctctctcttttaaaaagatatatatatatatatatatatatatttttttttttttttttttttttaaagagacgaggtcttgctttgtcacccagactggagtgtagtggtgtaatcatagctcactgcagcctcagacttcttgggcttaagcaatcttctcacctcaccctcccggtagctgggattacaggtgtgtgccaccatgcctggttaatttcaaaaaaaaaaaaaaaaaaaaaaaaaaaaaaaaaaatttttagagacatggtcttgctatgttgtccagactggtcttggacttcctggcctcaaatgattctcctgcctcagcctcctgagtagctgaaattataagcatgagccattgtacctggttcccttttttaaaaaacattttgtatcatgtgacagttagcattttcaggttttcaagggtaactacaatacacatgcacacagacacacacaatatgtacaaaaaaagtataagagagttatagtgaaaagttcaaccatatgtgtaattagagttctagaaggaataaagagacttggttaaaagtcctatttggagagatacgggctgagcattttttaaaaagtgatgaaaaacatcagactagagattcaagaagttttgtgaaccctgaacaggataaatataaagaaaactacagctaggcatgtcataaccaaactcctaaagaacataaaccgagagaaaaatatcttaagtagccagaggaaaaaaatacattattttcaaaggaataacagtaacactggcagctcacttaacaacagaaatgatagaaggcagatgacaatgaaattatttctttaaaatgtcaaagaaaagtgcagtcatgcatcacttaactatgggataggtttttttgagaaagcattgttgggtgattttgtcattgtgcaaacattatggagtgtccttacataggctactacacacctaggctatatgttatagcctgttgctcataggctacaaacctgtgcagcgtgttcttgtactgaatacggtaggtaatcggaacacaatggtaaatatttgtgtgtctaaacacatggaaacatagaaaaggtacagtaaaaatacagtattataatcttatgggaccaccgatgtatatgtggtcagtcattgagtgaaatgtctttatgcagcatgtgattgtaattgccagcatagaactgtatattcagtgaaaacatccttcataaatgaagggtggaataaggccatatctgggcaaacaaaaagtgagaacttgatgtcaacagacctacactggagtgaataactacactagaggaaattacaagttttctgaaatgagaaagaaaataatttgaaatggcaacaccaaaatacaggaagtaatgaataagaatgggaaagctaaataggtaggtaaactaaataacataaagttatttaagccacagtccctattcttatttcatcaattaccccagtagtgttcacagataagtttttcccccttaaattcaggatccagttcaagatttagtagtcctgtttctttggttttttaaaaatctgaagcagtttgtctgccttttgggactatgactttttttgaaatgtacaggtgtgttactttgtgaaatggccctcaggattatctgtttagttatggttagattcaggttatacatttttggcaggaatactacataaagtggtgttctgttctccatgcatcctgttacatggcacatgatgtgatttgcccctttactggtgatgttaacttaggttgtttggttatggttgtgtttgctaggtaaacccagtctaaagttatgatttattccattgtaactaataactaatttaatggggggcactttgagattactaaggtattctttttattatcaaaacttaatatgttttcttttgcaaatgaccacaaagtttgcagcttaaaacaacccaaatttgttattttacagttctgtaggttcggagtccggtgggccttgctggacccttctcgggctatcacaaggtcaaagtcaagatgttagtaggactaggttcctttctggagactgtagaaaaatccattcctaagctcattcaggttgttggcagaattcagttctttatgataatcggttagaggtccttctttctcactcactattggccaagaccccctcctagttcttttcaggtgtcttcatttcttctcacgtgatgccctccatcttcaaatccagcaacagcacatcaagtctctctcaagctttgaagctctctgacctagctttttgcttgctaattctgctgccacctgctaccagctggagacatttttctgtttttaaggattcatgtgattagattaggtccctctccctctcatctcctcctgattatctcttgagtttaagatcaactgtgccatattacataacacagttatgggagtgatatgtcatcacattgataatttctggggatttgcggtgtagaatcttgtgggccattcctagaaggtctgtttatcacagcatacatttgtgattcttagctgaataatttattcctatgatgggttcaaaatggtgatgttctaacttgtctttccttctatgtttattagttgatattttattgtaagggaggggttcatgttctaacctattcaattatttgtatcagtatatacttacaattttttccatgaatattctctgtcattatttattttgatcctgaaattgtatcagttttggctagtaggagcctcacctggatggctcctgctgacctttttacaaatccgcatcatttcttgaacactttctttctgtcccttcaaagtattcaaggcttgctttccattctctgttccccagccctacaatcagttattttttgcaagagttctgattccttttagtgggatatagtgtttagaaatcaagatcagggtgtgtgatgtgctcattgccaccaagatgtctttgtttccaagctctttcacagagaaagccaataatatgttttatattttcatgagttgatactgatacttttaattcaattccagtcttctttctagacttccccttttcatgtttttaacttctttctccaacagaaagaaacctggttcctattatccccaatttatttatttttatttatttattctttttgagatggagtctcactctgttgccaggctggagttcagtggcgtgatctcagatcactgcaacctttgcctcccaggttcaagcgattctcctgcctcagcctaccaagtagctgagactacagtcatgcgccaccatacccagctaatttttgtatttttagtagagacagggtttcaccatgttggccaggatggtcttgatctcttgacttcatgatccgcctgcctcgacctcccaaagtgctgggattacaagtgtgagccactgtgcccagcctatccccagtttatttatttatttttatttttatttttttgagatggagtctcgctgtgtcacacaggctggagtgcagtggcgccatctcagctcactgcaacctccgcctcctgggttcaagcgattctcctgtctcagcctcttaagtagctggaactacaggtgcacaccaccgtgcccagctaatttttgtatttttagtggagacggcgttttgccatctctggatggcaggctggtctggaactcctgaccttaggtgatccacctgcctcagcctcccaaagtgctctgattacaggcgtgagccaccaagcccggcctttccccagtttatttgtattcatttttctagtcctcattgtacccacagtttcagagttgttaaccatatcatcgcattaaagaaacgtaactatagttcagtatttctttaaagttctttttgtctttagaatgatgttacgttgtcggagtcctgtgttcactagttgaggaactccttcagtagtggtatctccagttggacaaacagatgtcactcacaaataccaattgtaaattctgggcagcatactgaaggctagatatcaacaaagtagataaactggaggggagtcaacacatggaagaagaagtggcaatggctgaattccccattgttaatcctttttgcttcagccaaggatcctcttagctccatctgtggcctttaagacttggataaaaatctacagtcttattggatgtgaaatcaaggaaaaaatttagggagaccacagcagctgtaacatgagtagagagatcccatctagaaaagagccacagaatgggaaaaccagattgcacgaaaactctcccaatagctctggtcctgttgcctaagtgcactccagattccaaccagcctggttaggactaaaagaacagaacaaaagctttgagttgtttggtactacagggtggaaagggtttggagtttcatttcaagtaagttaactatctgtttgtttggttggttggttttttttgagacaggttctttttctgttgcctaggctggtgtgcagtgatgccatctcagctcacagcaacttccacctcccgggttcaagtgattcttgtgcctcagctttctgaatagctgggattacaggcacctgccaccacgcccagctaatttttgtatttttagtagaggcagtgtttcaccatgttggccaggctggtcttgaactcatgacttcaggttatctgcctgcctcggcttcccaaagtgctgggattacaggcgtgagccaccacacccagcccagttgactttttatgttggccttgtatcctgtgaacttgcttaacgtacttattagttctaaatagtatttttccccctcttgtagattctttgggattttctacttagacagttatatcacctgcaaatagggatagttttattttttcctttccatctgtataccttttaatttcttttcttgcttcattatattagctaggattttctgtattttccagtattacattgaagaatgatgatgatagcagacatcctcttagtgttaccaattttagtgggaaaacattcagtctttcacagtgaaggatgtttgctttataggtttcttgtaaatgccctttatcaagttgaggaagttcccctctattcctagtttgctgagaatttttttaagcttaaatttctatttgatttctatttgtaattataaattcacatgcagttgtaataactaatatagagagagctcttatgcactttggcagtttccctcaatggtaacatataaaactagaatacaatatcacaaccaggaaattgacattgataaaatctattaatcaagattttgtcagttttactttgtgtgtgtgtgtgtgtgtgtgtgtgtgtgttaaagttctatacattttttttttacctgggttgattcatgcatctaccaccacagttgagatacagaatagttcatcaacacaggattcctcatcttggcattttataatcacacccacttccctccgcctacctctgcctatgcttaacacctggcaaccactaatctgtcttccattttgaaaattttgtcatttcaaatatgttaaataaatggagtttatagtaaataatcttttggggttggagtgttttcacttggcataattctgtggagattcattgaggttgttgtatgtatcaacaatcctttccttttaattgcagggtaatattccatggtatggatgtacagattgagtatccttaaccccagaatcagaaatctgaaatgttccaagatcggaaacttttgagtgctgacatgacactcaaaggaaatgctcattggaacatttgggattttcagattagggatgctgaatccctaatgtgaataaaccagaatagtgcaaatatgctagaatctgaaaaaatccaaaatttgaaacacttctggtcccatgcattttggataaggaatacgcaacctgtaccacagttgtatttgtattgttttttttttttttttattgaaatggagtcttgttttgtcacccaggctagagggcagtggcatgatcttgactcactgcaacctccgcctcccaggttcaagtgattctcctgcttcagcctccggagtagctgggattacaggcaagcgccaccacacccggctaatttttgtatttatagtagagacgaggtttcaccatgttggccaggctggtctcgaactcctgacctcaggtgatccacccacctcggcctcccaaagtgctgggattacaggtgtgagccaccgcgcctggcctgtaccacagtttgtttaaccatttatttgttaaagcaaatctgggccgattcctgatttcagttgttacaattaaagctggtggtgaatatttatatatacgtttttatatgaatttatgttttcatttctttgcaataaatgccaggagtgcattttgcagttcatatgatggttacacatttatttttattaaattaattaaactacatttacattttattttattttgggtagagacagagcctcactgtgttggccaggcttgttatgaactcctgacctcaggtaatcctcctgccttgtcctctggaggcccttggattacagacatgaatcactgcacctggtttgcattttttttttttttttactccattggactctatcagtgcttttatttatttattggtatttatttatttatttattttaacttttaggttcagtggtacctgtgaaggtttgtcacataggtaaggtagcatcactggggtttattgtttagattatttcatcacttaggtattaagcccagtacctaatagttatcttgtctactcttacatgttcatttttttaaaagaaactcctgaactgttatccagagtggttgtactgttttatattcccacagcaatgtatgagtgatccagtttctccacatccttgccaacactgggtgttaatactatttttaaattttagccatttgatatttatggtatctcattgtggttttaatttgcatttacttaatgagtaataaattctttttaaatagaaacaggatattgctctgttgcccaggctggagtgcagtggtgcaattatagctcactgcagcctcaaactcctaggctcaagtgatcctcctgcctcagcctctcgagtagctgagactgcctcagcctgtcgagtagccaagactacaggcacatgccaccatacccagctaattttttaatgttctgtagagacggggtctggctctgttgcccatgctggtctcagactcctggcctcaagcgatcttcccaccatggcctcccaaagtatttagattacaggcatcagccactgcatctggctggtaataaaacattaaacatctttattgaaatataatttacatgccatacaattaacccatttaaagtataaaattcagtggtttttagtatattgaatatttacacatatgtacaaccatcaccaccatcaattttaaaatatttttatcacctcaaaaagaaactccataccctttagctatcaccccctagctctaagaaatcactaatctagtttcttgttttgagttttttatttttatttttatttttattttttttttgagacagagtctcgttctgttgcccaggctggagtgcagtggctattttggcttactgcaacctctgcctcccaggttcaaatgatttttgtgccttggcctcccaagtagctgggattataggcgtgcgccaccacacctggctaatttttgtattttttagtagagacagggttttgccatgttggccgggctggtctcaaactcctggcctcaagtcatctgcccacctcaggttcccaaagtcctgggattgcaggcgtgagccactgcgcctggcctatttccctattttggactttcatatgaatggcatcatataatacgtgtttttgtggctgatttctttcatttagcgtaatgtattcaagatatctgttgtaacatgtcttagtactccattcctttttatggccacataatattccattatatgtgtataccatatttgtttatccatttatccattgatggacatttgtcttgttcccatgttttggctgttaggaataatgcggctgtaaatattggtgtacagttttttgtgtgtagccatatatttttgtttatcttgtgtatatacctaggaatctaattgctggatttatatggtaactatgttaaattgtttgaggaaatgtcaaactgttttccaaagtagagatactattttacttttccaccaggagtatataaagattgtgagttcttcacgtccatgccaaccattgttaataacagactttttgattctagccattctagtgcatgtgaagtagtatctcattgtgattttagttttcaactgcctgaagggtaatgatgttgaacatcatttcatgtgcttatttgtagtttgtatatattccttggagaaacttctattcaaaccctctgtccagtctttttctttttgacagggtcctgctctgtttcccaggctggagtgcagtggcatgatctcagctcacagcaccctcaacctccctggctcaaatgatcttcccacctcagcctcccgagtagctaagactatgggtgtgtgccacagtgcccagctaatttttgtttattttttatagagatggggtcttaatttgttgaccaagctggtcttgaactcttgtgcttaagcaattcacccgcctcggcctcccaaagtgctgggattacaggcgtgagccaccgtgcccagcccctttgcccatttttaaaatgggtatttatgctttcattgttgatttgtaagaattctttatatattctaaattttttattgtaaaatatgcataacataaaaattgccattttaactaattttaaatgtacagtcctgtaacgttaagtaaaattgttgtgcattcaccaccaccatccatgtctagtactttttcatcttccccaagtgaaactctgtacccatcacatactaactccccaatcttccctctccttagccttgcaaacaccattctacattctcttcctaggaatttgactactctaggaacttcatatacgtataatcctacaatatttgtccttctgacatattttacttagcacaatgtgttgaaggttatccatgttgtagtatatctcaaaatttcatttcttttgaagtctgaataccattccattgtatgtatataccacattttgtttatctattcatatttcaatggacacttggataagatatataatttggaaatattttcccctattctttgagttgtctttatttatttttagagacagggttttgctctgttgctcaggctggggtgcagtggcaagatcatagttcactgcagccttgaactcctgggtacaagcaatccttccatctcagcctcccaagtagatgagactatagttgtgtgccaccatgtctggctagtatttttttttttttattttttagagatgaggtcttaccatgtagcccaggctgagcttgaactcctggcctcaggcgatccaccttggcctcacaagtagctgggattacaggcgtgagacactgcacccagttgggttgtctttaattgaagcacaagttactaattttgatgaacttttatttatctgtttttccttttgttgctcattcttttggtgtctttaagaatccattaccaaattgaaggtaatgaagatttacccccatgttttcttctaaaagttttatagatttagttcttaaatttaggtctttgatctactttgagttaatgttttgtatatgttgcgaagtaggggtccagcttcattttttgtaggtttctaaccagttgtctcagcaccatttattgaaagacaattctttcttcattgaatggtcttgccacccttgtcagaaatcagtgggactgttgggcatggtggctcatgtctgtaatcccagcactttgggaggccgaggtgggaggggtactcgggcccaggagttccagaccagcctggacaacacagtgagactccatctctattaaaaaaaaaaaaagccaggcgtagtggtgtgtgcctgtagtcccagctacttaggaggctgaggcagaaggatcacttgagcccaggagactgaggctgcagtgagccatgattgtaccactgcaccctagcctgggtgacagagtgagatcctgtctccaaaaaaaaaattaaaaaaaaaatcagctggtcatagatatatgggtttatttctggactcttaattctgtttgtccttttaccagtactccacggtcttgattgcattgttttacagttttgtgcaaagttgcaccaaagttgttgtgtagttttgcaaaactggcaatcaagtctgtgcagtactggcaaaattaggaagtgtgagtcttcatacttttcatttttcaaaattatctgcctattctgaatgttttcaattccctatgaattttaactctttgttttttcttggtagagatgaggtttcactatgtttctgaggctgttcttaaacttctgtcctcaagtgatccttccaccttggcctcccaaagtgctgggattataggtctgagccaccatgcctggtccatatgaattttggaatgagcttgtcaatttttacaaagaagtcagctgggattctgacagagattgcagcgtgtctgtagattagtttgtggagtattggtgatggcagcggtgggccgtctggagtggctgctgccatcacactggctgcagcagggagacgtggccagggctgcacggtctatagagttggtgggagccaggggcaagcaggagccctgccccttccaagttggagctccctgggtcctgctgcagctgcctaagcatggctgtagacctgggcatccctgtgctcttgagtcttgggagcaggctggagccccaccctcccaggtgcaactgcagctggccaaaccgtggctgcagtcccaggcctctcattccatggagcaggcaggagacccaccctcccgggtgcagctgcagtctcccaaactgcggctacagaaccttgccttctgctccacgagcaggcaggagccctgggtgcagcaggagccccgggtgcagccgcagccacccaaaccatggctgcagatctggtcctcctgctttatggagcaggctggagtcccaccctcctgggcacagctatagctgcccaaattgtgggtatagacctgggcctcctgctttatggggcaggcaggagccctgccccactgggtgcagctgcagccacccaaatcatgggggggctgcagacccaggtgtctctgcactcttggggcctgggaaggccccccttgctctcataggcttgggagtgcctgctcctgctgcctggcttcaccctgctattggcacctgctctgatcttgtggcaaagttggggccgagcctgggtgctgtcgtagcctggccaggtatccacatgcttggggaactgctgacatgccagccttctgctgccttgaccccctctggactttgggtactgacaaacatagggaagctgaggcagggctgagggcagttcagcactggcctgcaggtgcccccttgcatctacagcctgggcaccatgaatggcagcaggaggtagacaggttcctcagtggaaggtggcaggtccctggtgaggacccaccttcaggccagggaaagcctgaaggctggaggttgggctgccagttgcatggatcagagtgggaacttgtggtgccttttctgggcctgcctgtggaccaattggcatgcacatcctcccctctgaggcccataaaaaccccaggctcagccagagctgaacagatgtcaggatgaccagctgcagagaggagcaacccactctagggcctcctctctgctgtgagctgcagaggtgacaagatgaccttcctgcaaagaggtgccacacattctagggcctcctctttgctgagagctgcagagacgatgggtcgactttcctgcagagaggtactactcatactagggcctcctctctactgagagctgcagagacgaaggagagatgatggggagatgatgggatgacctgcctgcaaagagaagccacccactctcaggcctcctctctcctgagagctgtgcagatgacgggataatcagctgctgagaggagctaccctctctgctgatagctgaacacttgtagtaacgacttgcctagcagagaagaaccaccctctctgctaggagctgaacacttgtagtaatgacttgcctagcagagaagaaccaccctctctgctaggagctgaacacttgttgggataccttgactgtggaaaggagctgccccctttgggtttcctctgagctgttctattgctcaataaagcccctctttatcttgcttactctccacttttctatgcacctcattcttcttgggtgcaggacaagaacttgggacctgccagatgaggctaaaatagctgtaacacaaacagggctgagacatgccccttgctcaccttgttgcaggtgaagagaaggaaagaagagctgcagccctctggggagcccagacctgggagctccccaagccagggctgtgactccctctttggggccctgcctgcggttcctggtgtctccaaacttctgggtgccaccgtgttccctggtgccagctgtggatgctgcttgtggtgttcatggtccagctgcagcctcacagagaaagagctgatgcccatgctggcacctggagctgcgtgccctgctgcagctgccaggatgtctgattgcgcagtgaccggaccccacacttgctcacataccccttgctgcttcatccagtcttccttggctatcataggacacaggccagtagcatgagccgagtgtagccggccaggccaaataggcgggacaagcccagcaggcctgagcaaaactctggcacaggtgccaccagccgcagatgtttctggccagaaaagtgacaccccaaagattctgtaacactggcatcataagaatgataaatcttatggcttggcctggtggctgaaggaattgtgtactttaaatgggtaaattatatggtgtgtaaattgtatctcaaggatgtttaatgttttatcactggcgaggtgcggtgacttatgcctgtaattccagcactttgggaggctgaggtgggaggattacttgaggacaggaatttgagaccagcctgggaaacatagccagaacccatctctacaaaacatttaaaaatcagccaggcatggtggcatgtgcctgtagtgccagctaatcaggatactgaggcaggaggatcacttgagcccaggaatttgaggcggcagtgagctataattgcaccactgcactccagcctgggcaatagggtgagactctgtccctagtaaaaaaaaaatgttatcttctaattcatgaacatgaagtgtttttccattgatttaggtctttaatttctttcaatagcgttttataattttcagagtatgttttgtacttctttttttttcaaattatttccttctaattctgttataaatggaattcttttcttaatttcattttgagattattcattgcaagtgtatagacataacattgatttttgtttattgtccttgtacccatcaatcttcctgaactaattttattcccatagttcttttattattattattattattttttgagatagtcttgctctgttccccaggctggggtgcagtggtgcgatcttggctcactgcaacctctgcctcccaggttcaagcaattctcttgcctcggcttaccgagtagctgggattacaggcacctgccaccacgcccagctaatttttgtatttttagtagagacagggttttgccatgttggccaggctggtcttgaactcctgacctctggtgatccgcctgcctcggcctcccaaagttttgggattacaggcgtgagccactgcgcccagcctattccaataattctttagtggattccttaggatcttctatgtatgagataatgtcacattctaataaggatagttttattttttatttttttttgagacagagtctcgctttgttgaccagggtggagtgcagtggcatgacctcagctcactgcaacctctaccccctgggttcaagtgactttcctacctcagcatccctaggagctgggattacagggatgcgccaccacacccggcaaatttctgtacttttagtagagatggggttttgccatgttggctaggctggtcttgaactccggacctcgggtgatccacccgcctcagcctcccaaagtgctgggattacaggcatcagccaccgcgcctggccctctaataggaatagtttcataccttcattttaaatactgatgactttcaatttttttttttaacatgcatgctctgagtagaatccgtagtgcaaagttgaatagaaatggtgagagcagatttccttgccttgttcctgatcttaagggtttcggaaagcattcagtctgtcgccattaagtatgatattacctacctgtgggtttttgtagattttaaaatttcctttcttccttaatttattagaaaaaagatttttttttttttttgagacggagttttgctcttgttgcccaggctggagtgcaatggcacaatctcggctcactgcagcctccacctcctggattcaagtgattttcctgtctcagcctcccgagtagctaggattgcaggtgcatgccaccacgcccagctaatttttgtatttttagtagcaacagggtttcatcatattggtcaagctggtctcgaactcctgacctcaggtgatctgcccacctcagcctcccaaagtgctaggattacaggtgtgagccaccacacctggccagaaaaaaaagatatttttaaagagctgttttaggttcatagcaaaattgagcaaaaagtacagtgagttcccatatgtccctgcttccacacatgcacagcatctcccactatcagcattccgtaagagagttgtacatttgttatataacgttgatgaacctacattgacatgtcattattaccccaaatgcatagtttatgttaaggttcactcttggtgttatacattttaaagatttttgacaaatatataatgacctgcattcaccattgtggtatcatacagaatagtttcactgccctaaaaagattcctgtgctgtgcctgtttcttcatccctttctcccctgtgagcactggcagccactgatctttttactttctccatagttttgcctttttcagattgtcatagttgtaatcatatgtatgtaacctttccagactggcttctttcacatagtaatctgcatttgtttcctccatgtctctttgtagcttgatagctaatttatttctagtgctgaataatattccattgtctggatgtactacagtttgtttatccattcatcttctaaaggacatcttggttgcttctaagttttggcagttatgaataaagctgcttataaagatatttatataagtaaatgaagatgtttacataaaataaagacatttataaatatctccatgcaggttattttgtggatgtatgttttcagcttctttggataaataccaaggagtgtgattgctgctttatatatggtatgcttagttttgtaagaaattgctgaactgttttcctgagtggctgtatcattttgcattcccaccagcaataaatgatagtttcttttgctccatatgcttctcagcagttttgatgtagtcagtgttctggattttggctattctaataggcatgcaggggtatattgttttaatttgcaattccctaatgacatgttgagcattttttcatgtgcttatttgcgtctgtatatcttttttggtgaggtgtctgttcacatatttctttttttttccttgctttaaaatcatgttgtttgttttattgttgagttttaagcattctttgtatagtttggataattgtcttttatcagatgtgtactttgtgaagattttctcccagtctctagcctgtcttctgatttgaagttttctaatatttttgtggacttttgcatctatattcataagtgatacttgcctgtagttttctctatttgtgatatattttttatatcagggcaatactgttttcataaaatgagttgggaaatgttgcctccttttctgttttttagaagagtttgtgaaggattggtattagtccttttttaaatgtttgttataattaagtggtgagaacatttgggccttttctttatgggtagctttttttattgctaatttaatctcatcaattgttacaggtctgttcacacctgtttcttcttgagtcagttttagtagtttgtgttttggaatttgttcatttcatgtaagttatttagttttttggcacacagttgttcatagtattcctttataatccgtttatttcagtaagattagtagtaatgtcctctttttcatttctgattctagtaacttgagtcttgtttcttttttttcttggtcagtctaccctaaagtttgttcatcttttcttcccccacaggtaagttgttacacaatccctagcagattccaactttcatggccaaggtcctctttgatcatctttttaaaaaattagtttttggccaggtgcctgtggctcacgcctgcaatctcagcactttgggaggccaaggtgggcagaccacttgaacccaggagttagagaccaggctgggcaacatgacaaaaccccatctccacaaaaaattagccaggtgtggtggtgcgcgcctgtagtcccagctacctgggaggcttagaggggaggatcacctgaacccgggaggttgaggctaaagtgaaccatgatagcacctctgcactccagtatggacaatggagtgagaccctatctctaaaaaaaaaggaggaaaaggaaaagaactactctttggttttattgattttttttttctattgcttttctatttcctatttcattagtttcatgaatttctgccataatctttattatttccttctccttgattttggtttagtttgctcttattttcccagtattttatggtaaaatgaaatatactttattggtagtatgttttttatttttagtgtaatagtttaaattttcttctgctgggaaatgtcttgcaatatttataaactacaacaggaaatgtttttataccaaagtaatctttacagagatttcatgctttataaggaggggttagtatgcaaaaggagagtgattctagtgaaagaacacttctaggaatattttaatgtgagtagtatgttaacaatactgccagacttcatagtgtgagaatgggtttgtggagttataggtattgatgttctgtttgataatgcatcgaagagataaataatgttctttatttcttcttttttagataaaatcagtggttctggaagtaactctgatatgatggaaaacagcaaggaagaggtaaggataattatttagagatatttgttagttacgattaaccaagtagagcatatgtctttagattgcttctggacacatgtatgtgtcgaaggctactgatacccagttgtcattatacttcagtttcgttgttttccagtttgagaacaggtgttcattgtttctgttattgttgtggttcacttcagtggtttacctaaagtcagacaactgaagacttccaacagatagatattaaactgtctttatattgccccaaaggtgtttgaggtggatgttaagggcatgaactccatggttgtgaaatctctcaaaacttggtatctagagtctgctaagcattattatagcaactcataacaaggtcctttgcctgatacacaggtccacaactgtggttttgggaattttttgacctactgtaaaaaaaaactgaatccagtaaaatatattgattatactggcaaaatgagggtaagtttagtatctcaaagcaagttgtagaagttacttcatgccatatgttagcttagagaagaatgaaacatatttagatccttgaaactccctacttctcttgagatctgattacttctgcatctttgttttgtctttgttgactggggccatgatcattttgcagcagtgtattccccgcagcatgccacagcaaccatgtaaaaaacgagaaatttaatcttcagccaaggaaacctggcagtaaatgagaattagttttaatttttatttttttgcatctgtgttccttatgtggtagagaattagtttttgaagttccttttagaaaaatattctaggcacataaatagcatctcattatatcactgtattgaagttgctatagggaaatagctaattgtagggatgccgtttcgagaattttattcacttttatatttatgtctcacatctagggaactagctcttcagaaaaatccaagtcttcaggatcgtcacgatcaaagaggttggttgatgttgaagggacaaaaagttattttctttttcaggttattttctgtttctaaaaccatgtttttttctgaactcatgtcaaccactattctgagttaactattctatacaaatatacatatttgaaaatgattagcataatataatgaatccctttgtatctatcacctgatttcaacaattattattcattctaactttgaattctaaagggtttttaaggatttattatatattagtggcccttgcaatatgtagtttatttcattagacaatatatgtccttgaaaaaggacaaaataattgttgaatgcctatgaggcagtgggttttttgggttatatgaaattgtctaggatgggaagttagtcatcatagttgtaagttataaggagaaaaaagagtggtaaaaaacacttttttctgctaaattgtcaactcaagtcatacataaaaactgaaacttttctaacataatgtagtacccaatatactatgcagtataattgttattagaagtttgccgcttagtctattggactttcattgtttctaaccagtgggaatgtctcttaaaaaccaagcttgtttgatattaatttattctctgaagtagtgattcttaaagaagagtgtcctccagggtctccctggtagctttttcagaatgcgtatgccttggtcctgctccagacctactgaatcataatcttcagtgatatggtatagacatacatgcttccctaggtgattctgatgtgcttccttgttgagacccactgctcaatctcaacatgttatttatgttctttgggtattgttccagttgtcagaaacattcataattctatgaacttaattctttcataggaaaccttcaattgtaacaaagtatgtagaatcagatgatgaaaaacctttggatgatgaaactgtaaatgaagatgcgtctaatgaaaattcagaaaatgatattactatgcagagcttgccaaaaggtaatgtgtgttaatttttcatgaagttaaagttgaaatgaatttttaaacatcatttttataaaattggaacttgattactgttaactatgtacaaacgaccaaacatggcattttcctagtggttgtctagaaatatatttgtatgccaatgataatatgtgttattgaagttaaaaatttggaatattcagttggttttgtaaagaatgaaatctatttttttctttcctttgagttttagacaaggggctttagtttccaaattatacttcagtgtgtaagcaggtttaaaaatttaatatattaggttttggttcagtcaatgttaatgtgcttgctttatacaaaaatgtaatgactgttcctgaaaacttaaaaatcatgtacagtctagtttagtcttattgcattcttaaattccctaaggctaaaagctgaagttaactatcatagatagatttagttgtatttcttgctgttatcttttttaaaaaactttgtcacatacctctcaactgttgaagttctaaccataaaaccttgttaataagaatagggaacaatagccaaatgaatatcttggactcttcatagctcaagtctgagagcaatataattggatgatgagaatgacagggaacttggttcaaagagtcaaattttagattttttttctttgttaaataatatgttgtagtctcttggcacatttttcaaattcattctcatagatcttttacagcagtgcttattaaaccttgttccctgtctatgtttttatgacatattttcaaattatggaagtttaaaaaatacagtaggtaggagggatgggactttccttgactaggataaattagaagttacaaaaggtgataaatgaaatgaggaaaggaaattaatgaaagaagagagataggggcctaccgcttacttagttttgcaaatcatttatgacaattttatgtaatggttttggtggccaagggcagaaacaactaacatgggagtctaagtcccataggtggtgacttactttggatttttacattctcagtggttgtcactgggagtgtttatgatgtaagaaataggaattcaaacttttgttttaattgtactgtggaagaaagtcagcatatgatgttactaacctgaactatgcctaattctgtcagaccaaaacaaaaacagacccgtttcataaggttaaatttgggtgtttatattattgttgtaatatttattgagtatgtataagtaccaggctcttacagaattaactcctttaatcctcaaaacaacactgtaaggtagttattattttgcttgtagagataaaggaacaaattcagaacccaaggaactttttcagctttaaattgagaagctaagatttcaacccaggtctgcttgaatccaaagcctagtgagtgctcttttcactctgctgctttgcttccaattctccctagaagaaatctagggagaattcagtttttttttttttttgtcgttgttgttaatttaaaatctttagttcttttcaaatgctggggcttctctgagtgtctacatgcaatgattgctgtgaataacttttttttggtggggattatttaattttactacaatctgtaaaatctcaatcatctgtgtcctccccccccccaccctttcagagactcagaaactcatttaacaactagatgctataacttgtcaaaatttgcttgttgaataacatagagccatatttcagagaaagcccctggtgactacctgcttttttttccttaattgttgccaatgatagccagttactaagcccagcaatgtaggtaaacattgaaacctaaaccctttttactatgcctgtcttatttgctcttgagagaactaatgaaaacttaaattgacagcctctctcttcaattcacatgttttatagttaaggaaggacattctttctaaaatattaacatagggatcaacaaatgatctcattctacaatttattgttagggtacttcagctaaagtatcttaatctgttaaaactctttaaggactttacagagtagtgaaactttgacataccagttgggaaatgctgcagtatagatacaggagtaatagaatgaacttcatttcccccaccaatacccctcccttgcaatataaaactacccttaaaaatctttctgagtttatgatttggattatgaaaataggatgtctttaaaaattttttccctctgaaccacacatattttatgaattctttatggaacttagcatagatgttcatattcataacagcttttgtgataggcactataaaaattcagaactgggttgaggctttctgtttgattcacacatttgttttgtaatcactccataatacctccctttcctgtttttatgaactatatttcaacaaataaactgttgacacctggcccttttactatttccctgttttatttacttttgtgaggtccttacaccaatatctaaagcttgaaagaaacaaactatgtaccagcaatgttggctttatctgaactgaagtcttgtacttcacttgcacatttaatatgtgtaatggttttttaaatgaaatcattctaggtacagtgattgtacagccagagccagtgctgaatgaagacaaagatgattttaaagggcctgaatttagaagcagaagtaaaatgaaaactgaaaatctcaaaaaacgcggaggtaaatacaagtgaaaatgaaacatgaatttaaattgctgtttatgaccatattggaaaatcggatgtgcttactaaaaatacctccacttttctgccttttgtttattaaaagcactacttaaatataacttctgtttctctctgagctctgaagcagaaaaggttaagcaccatttatcgaaacacctttgccttcagtggctattaagttatctcaagaagcgtagcatttccttcttccacatgttctataatacatatatgccataatactatgttttccccccaaccctaaaataattttagattcatgcaaaatcttgtctgtggcctacaggtaactttatatatatttagagttggatagagtgacgtacatctgcattagtattagttggggtattataaatgcaagtcccttgactccactcctcacaaattagaatttctgttgatgaggtcaagaatgtactccagtttgttcttgtgtacactgaagtttcaaatccactaatctaagaatggcaacatggacataagtaggaaggagtagggagctagagctgataaccctccctctgtcttccagaggcacctctccctttgtctgtctatcttcccttaaacacacaaacggtggggagtggtggctcacacctgtaataccagcactttaggaagccaaggcaggagaattacttgagtcctggagttcgagaccagcttgggcaatatggtgagaccccatatctacaaaaaataaaaatatcagctggacatagcggcgcatgcctgtagtcctagctattctggaggctgaggtgggaggatcacttgagcccaggtgatcgaggctgcagtgagccgtgattgcaccactgcactgcagcctggatgacagagtgagaccctgtctcaaaaaaattaaaacacacacacacacacacacacacacacacacacacacacacacactctaatattggctaaccatctataaaaagtttgcatcagaaggattcatttagaaataatagtggactatgtgtcccacttgtttgtgtgtgattcttaaatggtgcctatatatattttggggcagcttaataaagccagaattcataactataaaaggaatgaatctccaaatgatagaacatgacactaaatttctaagtagaagtgtagtgaaagcatatccatttaatattgatcagattatataattgtgaaattatagtgaagttcttatattggtgaaattttgtgtggatttttattttaatgctatgattatcttgctggaaccagtaaaatatatctatttttataacatattttatatattcattttccgattaaataatttgtaaggttgttggcaaaaataaaggaaatattatatagtcttttgtccacaaaggggtagtcaactccttttgagcataaggaatctttctgagaatctagttcatggtagggaaactgccattgcagcaacagagctcattaaagctaaggtagtagtcttaaaatttaagagaatcctcaattataaagtgatggtaaagatcagtagtaagagtttctttcctctgatcataggttctctagagaagacaaataactaagtgttctgcattgtgtacacttagtgtacagagtgtctaaatggtgttatttttgggaagggaccctgtagcagtcagtgtctgaaatgtggataagggctgaaagaataaaagaaccactgttgttgacgagggtattcctagtgccactttggtatgctgctgacatttggtctcagctgataagtttcaggaacattttattgaatgatctgtgtaggaatgttttggtatcacgcttaagggaatacatgcatttatagccatcagtagcacttaaatctttcacatctattttcatcttaatgatttgttacatttttaagctgtcagaaatcacacaggaaatttaacactaggtttactttatatacacatatatagataaattggtgatctgaaatactgaattggtgtagttaatatttaaactttttaagaaagctggttccaaattgaagcctaacttaggaaactgtcaagaatgtaaactttcttgtattacaagaaatgtaagacattacaagaatgtaagacaatatataaagtcttatattgatttggaataatattataacacaaagatacggttaaagttaacatttcaggagctgattttttaaaaaattttcagtatcataccctattttgacattctcttcccagtttaattgttagaaagtatattttacacctaacttttttacatgacacaataattttgttctatttaaaaccattaaaatctattgagctcagaaatgaaaatgcctcttttccatttataccctgtgttacaattttaaatatatttcataattaaaaataaaaaatttaaacatgtatacagcaacaagtacataaagtaacatttcaacattttaccatatttgcttcagatctcacttaagtaaaatattggttcagtcctactctcatccatttccccttcttcccaccccacaggtaatgattatattgaagttttatgcatgtgcatgtgtgtgcatgtttttctatgttttttatatatgtattcataaaacatttttcatttaaaagtataacaaaataatatgctgtatatatcatttgggaacgtttttcatttaacattgtttttgaattgtattcatgtcagtaaatgtacatctagtttgtttatttttcactgctctatagaattatgttatatcaataagccactattcatttcccacataggaagttattcccaatttttcattttctaattttctaattagtgctgtggtgaatatccttatatttgattccttgtgcacatgtgggagaaaatctccaaagaattacctagttttgtttaattcttgagcgatgtatgcaccaaagcacatagaagatacttagtaagtattacttaacactggatgaacattcagattctacattttatttatcttgttagtttatctgaatgaaatcattgtttgaaatgaaaaagtatggtgtggtgtatttgtttctgttaaaacaaatacagaatatatgaatacccaagatcaaactggtgtttgtaaataatgtgattataatacattaggcttgtaatgcctgctattaggtaggttgagataggaggattgcttgaactcaggcgtttgaggctacagtgatttataattgtgccattgtactccagtctgggtgatggattgagaccccatctttaaaattaaaaaaataaataaataaaaatattagcaacataaatagtaaaccttcaagtttacttttctaaaaaagtatgatggtgttcttatacattaacgtttttagcttctggctaggtgtggtggctcacacctgtaatcccagcattttgggaggctgatgccagaagattgcttgagcccaggagttggagaccagcctgggcaacacagtgagacccagtctttaaaaagaattagctgggtgtagtggtgtatgcctatagtcccagctactcaggaggctgaggtaggaggattgcttgagcctgggaggtagaggctgcagtgagctgaatttgcaccattgcattccagcctaggtgacagagtgagactctagctcttaaaaatttttttaaagtttctacaaataaaaatattcatgataatatttgggtccatggcgctttggaccttaaacctaacagaaacccaaaagagaaaattaaaagggtgaaaaatatatgtgatgttttgttttttatttaaggatggagccaatttgttttttagttgtctcctttttatttgtgaatgtaagcattttgagtgacttctgaattataatctaccatcttattttgatcaaggtcttggttgcacatcaggatcatctttgaaactttaagaaaatgcctgagagattttaattcagtggtttaggggtgggaatggctgtttttaaaaagattcttcagatgactctaatgtttagctcagggtgtgaaacactgccttagcagaactagggacaagagggaggctggagaggtttctgtaggttttcttcagtctgtttatcaggagacagtacagaatgggactctgcctttttcccccagtcgttctgatgttttgctgccaaaatagatatacctgcaatgtcttgtttgtctttatttggaaatagtagacagtattgatatggagtggatagtggagtacacatagaaaaaaggcagtttaatgacaatttatgtatagtgttgaagtaaatattagcaaggaaattggtaatatcataaaattaccaagtttttacataccatattgataggatctgtgcagacaattccaatgagaataaaaacctttatggcatacttaagtgtaggattgcaaaagaatctgttccgtatatgttacttacttccccattctttaaggactgatactgaatttatttgcaaagcaataacaaaataagagctcttggcccctagttttagaactttttatgggttctcttaatgttatttcaagttgtaaaaaatggcatttgcatctgtaaaaggaaacaattaggatttgtaacttggaatttgccaaggttgtcatgtgcttagtaagtcgataaaatattaaccttttttacttgtgtccaatatgccatttttctaaggattatgaggtatttcatgtctaatacaaaagttacaaaatgctgactaaagtaagtatctttttctgtgtataaatgtgtgaataatagccactcctttctcctagaagatgggcttcatgggattgtgagctgcactgcttgtggacaacaggtcaatcattttcaaaaagattccatttatagacacccttcattgcaagttcttatttgtaaggtatgtaatgatctgttgatatttcataccgtaaatatttgaatgcttaccatataccaggcctttgagggcacagtcttgaagaaagatgaaaatggtatctgcccttggaagacttctactatagtggggaaaatagacgtacaaagcctaagtgtcatgataggggagatactgtgattatgggagcacaccggaagcctgtgtaaataggatttggatggctttctagtggaaagctgtatgtgaaatatgaataagaatcagcctggtaagtgagattggttcatcatgttctgggaagaggcaacatagtattcagatactggtagttgagggagagcttggtgtgtttgaaaatctcaagagtggatgtgtgtaatgtttgtgttttataatctttccccttatatatcctacttccccaaatgtaaactatctatgtggagcagggttttgacataacttggagatgatagaattaaaaatgttttttatgtgttgattataattttaacagtctgtgccacttttttgttagtaataccttggagttaattttaaatatctataaatgtgggcctggcatggtggctcatgcttgtaatcctagcactttgggatgctgaggcaggtggatctcctgaggtcaggagttcgagaccagcctggctaacatggtgaaaccccgtgtctactaaaaatacaaaaaattagccgggcatggtggcgggtccctgtaatcccagctacttgggagactgaggcaggagaatcgcttgaacccgggaggtggaggttgcagcgagtcgagatcgcgccattgtactccagcctggacaacaagagggaaatttcgtctcagtaactacctacctacctataaatgtcaaggttatggttttcttaactcatattcctgctaagattaatcctatgttagtttgtttcccaataaaaagctgcctttgaaatgcagtggcaggccatgttttccttggaattctagctctagatcttttcttgcatgaatttttgatagattcagacatgcttaaatgaactgtactttgttctttagcaatttgtatccctcctttccttgaattcagttcagccaggggcctatctagggtatgtattagagagtttcattttaaattgtgacagtagaatctaatattgctggatttgtgacatgtatttgcctttctgttttcttatctatgtgattgtcttttttcaagaaccagtctgttgagcctaggccatttcactaatcggtagtttgtatcagtgagcaccttttccctttctgcagtcccactggaaagactttgaagtcagtcaaacttggatttgaataacagctttgcctcttactagttgtatgactttagatttatttacatattaatgaaagttagccttttctctcataatatgtcctaccttgcatggtaggtatttggtatttaaagataatatagattaattgtttagctgtatacatagtagctgtttgtatatggtggctattaaaattgttaagtacccaaatctaatacatttttatgtagagctttagtagctagatgtatgagaccagaaattagctttactaaaatcttttgtaaacttttttttttttttttttttttttttgagacggagtcttgctctgtcgcccaggctggagtacagtggcgcgatcttggctcacgacaacgtccacctcctgggtcaagtgattctcctgcctcagcctctcgagtagctgggattacaggtgtccactaccacacctggctaatttttgtatttttagtagagacggggttttaccctgttggccaggctggtcttgaactcctgacctcaagtgatccacccatctcagcctcccaaagtgctgggattacaggcatgagccaccaaacacccagccaaaaatcttttatacacttttaaataaggaatagtggtacttgagtgtatggaaatctgtttcaaggcattaattcttgagatagttagatgtctggaaaatacagacattgggtagtgggtagcagtgtttattttatttatttatttatttttgaggcggagtgtcactctgttgcccaggctggagtgcaatggcgtgatcttggctcactgcaacctccgcctcagggttcaagtgagtctcctgcctcaacctttagaatagctgggattacaggcgcttgccaccacgcccggctaatttttgtatttttagtagagactgggtttcgccatgttggccaggctggtcttgaactcctgacctcaggtgatccaccctcctcgtcctcccagagtgctgggattataggcatgagccactgtacccggctgcagtagtgcagtgtttttgctttgagtctctgaaacatgcacacatactcccttttttaaaaaaaaattgtttgtatttttaaaatttttgtgggttcatggtaggtgtatatatttatggcatacatgagatgttttaatactggcgtgcaatgtaaaataagcacattgtggaaaatggggtatccatcccctcaagcatttatcctttgagttacaagcaatctaattacattctttaagttatttaaaaatgtacaattaagttgctattgactgtagtcaccctattgtgctattaaatagtaggtcttattctttgtatttttttgtactcattaaccatccccacctcctccctatcccctcactacctttcccagcttcttgtaactgtccttcatgacatccttcattagttcatccatgagttcaattgttttgatttttagatcccacttataagtgacaacatgcagtgtttgtctttctgtgcctggcttatttcacttaacataatgatctccagttccttccatgttgttgcaaatgacaggatctcattcttttttatggctgaatagtactccattgtgtatatgtaccgcattttatttatttacttatctgttgatgggcacttaggttgcttccaaatctttgctattgtaaacagtggcccaacaatcataggagtgccagtatctctttgatatactcatttcctttcttttgtgtatatactcagcaggtggattgctggatcatacggtatctcaatttttagtttttttgaggaatctcccaactgttttctatagtgattgtactcatttacattcctaccaacagtatacaagggttcccttttctccacatccttgccagcatttgttattgcctgtcttttggatataagccattttaactggggtgagatgatatcttattatagttttgattaacatttctctgataatcaatgatggtgagcagcttttcatatgcctgtttgtcatttgtatgtcttctttggagaaatgtccagtctaatcttttgcccattttttgattggattatttgattttttcctatagaattgttggagctctttatatattgtggttattaatccattgtcagatgggcactttgcaaaatgttctcccattctgtgggttgtcttttcattttgttgattgtatcctttgctgtgcagaagctttttaacttgatgtgatctcatttgccaatttttgctttggttgcctgagcttgtgtaatatgctcaataaatctttgcccacaccagtgtcctggagattttccccagtgtttttaattacttaaaaaaataaagtttttgtcctttatgaatgttatcaatttcgaattaaatttccccttcctcttttcttttaatagaattgctttaagtattacatgagtgatgatattagccgtgactcagatggaatggatgaacaatgtaggtaggtaatatagatgagctaacattcagtgtttcctacttttgggaggaattgttacataatcatttatgaggtttgtctttcatagtatcgtcattgatgtctttaatgaaaggttgttcttttccataaaaccctggatttatgtctagtttaagtttctaataaagagtaagcagatgacctaaattaccactaaaattactggcagtaaaatttaaattgcattataacaaagagattaaaatgagttttgttgggaataatgtttatttttatttttttacatatcttttcagtttcctgaaagaagggaataatgttttaatctttaaaacatttcaggtggtgtgcggaaggtggaaacttgatttgttgtgacttttgccataatgctttctgcaagaaatgcattctacgcaaccttggtcgaaaggagttgtccacaataatggatgaaaacaaccaatggtattgctacatttgtcacccagagcctttgttggacttggtcactgcatgtaacagcgtatttgagaatttagaacagttgttgcagcaaaataagaagaagataaaagttgacagtgaaaagagtaataaagtatatgaacatacatccagattttctccaaagaagactagttcaaattgtaatggagaagaaaagaaattagatgattcctgttctggctctgtaacctactcttattccgcactaattgtgcccaaagagatgattaagaaggcaaaaaaactgattgagaccacagccaacatgaactccagttatgttaaatttttaaagcaggcaacagataattcagaaatcagttctgctacaaaattacgtcagcttaaggcttttaagtctgtgttggctgatattaagaaggctcatcttgcattggaagaagacttaaattccgagtttcgagcgatggatgctgtaaacaaagagaaaaataccaaagagcataaagtcatagatgctaagtttgaaacaaaagcacgaaaaggagaaaaaccttgtgctttggaaaagaaggatatttcaaagtcagaagctaaactttcaagaaaacaggtagatagtgagcacatgcatcagaatgttccaacagaggaacaaagaacaaataaaagtaccggtggtgaacataagaaatctgatagaaaagaagaacctcaatatgaacctgccaacacttctgaagatttagacatggatattgtgtctgttccttcctcagttccagaagacatttttgagaatcttgagactgctatggaagttcagagttcagttgatcatcaaggggatggcagcagtggaactgaacaagaagtggagagttcatctgtaaaattaaatatttcttcaaaagacaacagaggaggtattaaatcaaaaactacagctaaagtaacaaaagaattatatgttaaactcactcctgtttccctttctaattccccaattaaaggtgctgattgtcaggaagttccacaagataaagatggctataaaagttgtggtctgaaccccaagttagagaaatgtggacttggacaggaaaacagtgataatgagcatttggttgaaaatgaagtttcattacttttagaggaatctgatcttcgaagatccccacgtgtaaagactacacccttgaggcgaccgacagaaactaaccctgtaacatctaattcagatgaagaatgtaatgaaacagttaaggagaaacaaaaactatcagttccagtgagaaaaaaggataagcgtaattcttctgacagtgctatagataatcctaagcctaataaattgccaaaatctaagcaatcagagactgtggatcaaaattcagattctgatgaaatgctagcaatcctcaaagaggtgagcaggatgagtcacagttcttcttcagatactgatattaatgaaattcatacaaaccataagactttgtatgatttaaagactcaggcggggaaagatgataaaggaaaaaggaaacgaaaaagttctacatctggctcagattttgatactaaaaagggcaaatcagctaagagctctataatttctaaaaagaaacgacaaacccagtctgagtcttctaattatgactcagaattagaaaaagagataaagagcatgagtaaaattggtgctgccagaaccaccaaaaaaagaattccaaatacaaaagattttgactcttctgaagatgagaaacacagcaaaaaaggaatggataatcaagggcacaaaaatttgaagacctcacaagaaggatcatctgatgatgctgaaagaaaacaagagagagagactttctcttcagcagaaggcacagttgataaagacacgaccatcatggaattaagagatcgacttcctaagaagcagcaagcaagtgcttccactgatggtgtcgataagctttctgggaaagaggagagttttacttctttggaagttagaaaagttgctgaaactaaagaaaagagcaagcatctcaaaaccaaaacatgtaaaaaagtacaggatggcttatctgatattgcagagaaattcctaaagaaagaccagagcgatgaaacttctgaagatgataaaaagcagagcaaaaagggaactgaagaaaaaaagaaaccttcagactttaagaaaaaagtaattaaaatggaacaacagtatgaatcttcatctgatggcactgaaaagttacctgagcgagaagaaatttgtcattttcctaagggcataaaacaaattaagaatggaacaactgatggagaaaagaaaagtaaaaaaataagagataaaacttctaaaaagaaggatgaattatctgattatgctgagaagtcaacagggaaaggagatagttgtgactcttcagaggataaaaagagtaagaatggagcatatggtagagagaagaaaaggtgcaagttgcttggaaagagttcaaggaagagacaagattgttcatcatctgatactgagaaatattccatgaaagaagatggttgtaactcttctgataagagactgaaaagaatagaattgagggaaagaagaaatttaagttcaaagagaaatactaaggaaatacaaagtggctcatcatcatctgatgctgaggaaagttctgaagataataaaaagaagaagcaaagaacttcatctaaaaagaaggcagtcattgtcaaggagaaaaagagaaactccctaagaacaagcactaaaaggaagcaagctgacattacatcctcatcttcttctgatatagaagatgatgatcagaattctataggtgagggaagcagcgatgaacagaaaattaagcctgtgactgaaaatttagtgctgtcttcacatactggattttgccaatcttcaggtatgcaaaaataaataaaaaattcataatttgtacttccccctcttgagttactacattgtttaatttcctctgaagctaatcaaatttagggttactacttaggagaataccacttaaaaattatttaggagtttattaaaaaaagtttccctatttatttttatgctgccattggaagatattttgaacattgctagtattcagtatcagggatctcaaatttgttgagtaaatgacaaaatttctttatcaatgtttagtgcttttctctggagtaatgagcagaaggaaaagcggactggtgccagtggttcagtagctatttagttatataatggaagtgagtgcttggtactggtatgacatggtgtgtcaaaattttaactgccatgcatatggctttttaagtttgaacagataactttgtgtctcatgaaatcccctttaattatttttaatttacctcattaaaaccctttgttgatgcttattaactagtttctaatgacatgaacagatgtttttcttttaaaaacactgtcaaaatgaaggaagaaaatccaaacattagctggattagcctaccctgatgaggtagagtactaggaacattaaagtttgggtcagctggtgaatgaaaatatttttatgaattaattaaaatctttaaaatttatgaaaaataattttaaaaataagtttttattattgaagttattttaaaaatcagttgtataataaatgtgtattggtcatttgtctttttttttagtcagtaagacctgtcagttctatggatactcagaatttatttaaaaatgtttataaagtgggttttacataaaattgtatttccaacataggtagaatttaaaaatttttccttccagttcttatgttacagttttcaatttatcccaattggattttaatggaattaatttgaatcttggctattttttaaattttaatttttaattttgtagagatgaggtcttgctatgttacccaggctgatcttgaactcctggcatcaagcaatccttccacctcggccttccaaagtgttggaattacaggcatgagctactgtgcccagcaaaatcttgttttttaataaaactttacatttcttttatggagtacttatgacttgacttgaaaaccacatgtgatatgcagtgtgtgtgtttcaattgaatgctctgctatatcagatgactagatggagctctgtttgtgtggctattgtaacttcaagttcacagtttcttacctgaaattcttggggtctgttgtgtttcagaatttgcaactttttggtttttagaaaaataatagagagaagttactatatattttataaaagctccagtggggcctgatgcagcaccagataatcaaacacatagtatttctgcagcaaaacatttgaagattcacatttaaaggaataagcagtttagaccaggttttgctgccagattgtctttggtaccctcttacagaaactttccattttgagagtgttttagatttcaaaattatatataagggattgtggacttatattaaaaatacagaatctaatatttactttgatgtcaaatcaatgttttagttgttaggttagctgtgaaaatccttattaaggattagagtttaagaataataaattgtgtttaaaaattagttaaaatccattaaaaattatatgtcactgagctaattttatttctggttttatttatttggatcttctctctttttttcttagtctggctatttttaaactttggaaaattggtttctgtgattaaacagtttcactggtgaaatcagtatgtttgatttcaagtattttactacttttcttaagatctcacttgatttattgatacctatgaaagtttctgttatgcacctctcatgttgagaattattaatatttagtgtaataattaatatgaattcattaggccttaagaagggatggtgatatatggcaaatactcaattgatgcatctcttgataattacttatctcagcactgatctagatcactgtgttccattttgatttatttaactttgatctgaaggacaaataggctgatggggagtaaactttttctcaggtgtgtatcaagagaaactttgagaattcgtcacttcagcaaattccaatccttcaactgcttggtgaaataagccttgttgagattttctttaccctggatatttttgggggctaagctgattatttgggatgaaataagaaagaagataaatttgttagggaatttaacctgtgaaaaattgggccttgtcaatagaaacaagtagaatagaatatgagtgccttgaaaataagcgctgtaaaaagttctgtttttaaagataagtttgcgtgtgagccagtgttatgatattccttcagaatttacttacatgcttatgtaagcatgctgaatttatgtactcctctgtctaacttaattttaggtcacagttttagaaggttaaaagaaaaaccctgccccctattgagtttagaggattccagtttattcgcagtatttgggtatcatattacagctacagtattttcctagaaattggggcttggtaatggcatgaataaccaagatgaagaacatggtcctaggagattgcagtttaatgcaagacagacatagagaaatcattaaaaaaagtaacagaagaaagatataaaactagaatggggcctgtaatcccagcactttgggaggccaaggtgggtggattatctgaggtcagtagttcaaaaccagcctggccaacatggtgaaaccccatctctactaaaaatacaaaaaaattagccaggtgtagtggcgcacacctgtaatcccagctacttgggaggctgaggcaggagaatcgcttgaacccaggagatggagattgcagtgagccacgatcgcgccactgcacttgagcctgggcgacagagcgagactccgtctcaaaacagaaacagcaacaaacacaacaaactataatggggctacacaataaatggcaagtgaactacttaaatatttggggaaatatttagaagaatagttggcatttgaacttcaaaggataggtcaaattttgaaaggtgtagtaaagagggagtgacagtactgttactaattatatttcatttgaagattggtctgtttgaatgagatatttattgtgagtttgctgggatattatgaaatctcttctctctctctgtctgtctcttttttttttttttgagttgaagtctcactctgccacccaggctggagtgcagtggtgcaatctcggctcactgcaatccctgctcactgcaacctctgccttccgggttcaagcgattctcatgcctcaggctcctgggtagctgagattacaggtgcatgccaccacattggctaatttttgtattttcagtagagacagggtttctccatgttggccaggctggcctcgagctcctgacctcaagtgatccgcctgcctcagcctctcaaaatgctggcattacaagcttgagccaccacgcctggccttatttagtgtatttctatcctgagcctgtaggtgtctgtttcctttatagattttttcctccatttcccttcaacattttattgtgaaaaacatttaagtatacaccaaagcatctaccattaatattatactgtattttcttgataacatatctatatatccttctgtctatccatcagtatatcttttttttgcctttttagctttttattttgcataattataaatccacagaaatttgtaaaaaaaaaaaaaaatacagggaggtctcagataacctttacttagtttccctcaagggtaatatcttgtaactctagtacagtgtcaaaaccagaaaactgaagatttattcagatttcaccagtttcacatgcactcatttgtgtgtgtataagtatagttcagtgcagttgtaccacgtgtgtatctttgtataatcaccaccacaaccgatatatcaaaccagttccattatcacaaggctcccttgtgatactgctgtccttacctccattcctgacatctggcaactagtaatctgttctttatcactgtaattttgctattttgaaatggaatcatgaagtatataaccttttgagattggcttttttcacttagtataatacccttaaaatctttgatgcatttcagattaaacggtagacatcagcatacttctcctgaaacacttaagcatgcatagtattaacctacagtttaatatttcagtttttcttttgaagtaaaatttatatagaatgaaatgcccaaatcttaacctctttagattttttttttttttttgagagagttgttacccaggctggagtgccgtggtgcgatcttggcttactgaaacctccgcctcccaggttcaagtgattctcctgcctcagcctccctagtagctgggattacaggcacacaccaccatggctggttaatttttgtgtttttagtagagacgggattttgccatgttggccaggctggtctggaactcctgacctcaggtgatccgcttgccttggcttcccaaagtgctgggattacaggcgtgcgccacctcacccggccctctttagatttttaatcaaaatatagaaatgcagctttttataagaaaataagttttactgtactgaactgtatctctgggtaactcaggtcacaaataccatacacattcaactgcattttaaaattacttgctactaccaaaatattaatactgtttttgctattcctcgaagatacagcaccagttaacgtcaaaattaaaatggaccagtacgaaggttattgtggcaagaaacttatgctaatatgatggctgttgatacagaattgttactgagaagggtggactttaaaagccttgtgccctgggaaggaactctgaaatatataaggtccagctatttatcattttactgctggcacttcacaaataacctgttatgttttctataagaatgctttttactcatattttggagtccagagtttagaccccacttagtttgctttaaagtttttggctttcagttttattttacatggttttaattatatagcttatttaaagctaattttaagtacacttttttccctcaaggagatgaagccttatctaaatcagtgcctgtcacagtggatgatgatgatgacgacaatgatcctgagaataggtatgattccatctgtaaggactttaaaaagattataacacaccctaggcatgggcacaaacagcagcaacggaacagcaagcaggttgtaaaaaccaggagtgcctgccttagaaagactcgctcacagtcttcctgcaagtttgaaagaaaggccagaaaatgggctaaaactcagaaaccttaagagaaagtaatatcattatttacacacctagcatagggtgtgttataaatacagaactgtcaattttatgttgctatgtaaactgcagtaatttttttggaataatttattttgacagattattgatgaaagtaaatcatatctcagtaaattggtaacaacagacatctcctctatatttgactattgttaattgccatccaatatggtggtcctatttattaaggcctgttgagaagaaacaaaaagagagattactcagatatttaagattaagaaattgctttcaaaataagtgtcagtttacaaggtatctagactgagttagagtttaaccagttttcaaataaaatagaaatacacggtatgagagcatttactttaataagacttaataggtttaaatgtcaacagtgtagcctatacagatatacttaagtaaggggtggctgggtgaagaaaaaaaaagacactatcagtgtagtgaagaataaggaaaacaacagtattaaagactatagctataatgtttcaacataacttttaaacacttcctggacaatagcataccccatgctcataatcttcaacaagaagacagcatggtatagtgcatggaattttggaataatgggcataagggtatctgatttctaacatttttaacaactgtctgtgtcatcatgggcaagtgactttactttttgtcaaaaatttactatatttaagaagaaaaagttgggcgaaattttctgtaattctagtaccaaaaaatccatgatagatttgagatgatttcattaaagagcactacattaaccattcatttattcctaatagtaagttctaacattaagaaaacataaaaatatacatgtaattttctgtcataattttgtaagaaattaactgacttagtaaatgccctgggttcagctgttagtttcgctcttttgtatcttgctgatgctgttaggtttctctgtttcaaaggtcagcattctgctaattaacagaagaatgtttttattaaggtgaatgaacagttttattttacagttttgaatagagcttaattgtggacacaaatattcagattctgcttgcctacttttttaaattaaaaaatgtatatccatttattttatgggataggtggtaggttccagaatggagtgataagggcatacaatttattcatcagggattttacattatatcatcacagccagatactgaaagcatttaaaattttactcttttttaagatgctttaatttttcttcatttatatttgctatttgattttctatacatcatgaggcctcagatgttactcaaaggctaataatgttttaaacattctatatcttaatttaactgtgaatgatttactttaatttcatatttaaccaccaaataagagtgttgttaaggtataatttttttgtgtgtgttagagcttgtcaaaatataaatatcattttcaacttttaagttacctgatcgtatctctctgtaactggcaagtattttattggaaagtatctttaattccaccttgaatttgtgattaaaaaatacaaccctgttgagtacttttgagaagaattgaattttatcttgagcatgtctttctatactcagtttaatttgtttttataaaatatacaatttattaacttgtttaatattcactataccaaagaggtatctaatacccatgggttatgtagtcatgatggggatacaaatactttcttgcactattttagtatagattatatatttgagcatatttgaatatgcactaagcaacttaaaaaattcatttgcagatcacgattaagtcttagaattatttttctaacttcctaatttttgagtaggttgtattttggtagacagcatattgtaattgtatgtaaatttgtacacaattgtgtgtaaattgtgtataaatcttatatgctttgtctttttagcagtattgtaatacattttcagtgttggtgtttatgaagcgatagtgtattattgcaaatggttaactatttggatgcaataaatttttgtaaaccttttttcttgttcaagcatttaattttaataataatgttacttttttatatcatgagagttgacataatttgttattaaaatatagaggctagtttgtagccaaagaagttttgaaattttgaaatttaggacgtaaatacttttaattcccctaacatatatacttatatatatttgtgtgaaagttttacaacagatttaactactatttactttttctgttttaaagctatgatggcttttgggggcatttaaaaaacttagtcatatcctgaatattttagtaaatgtgaatacatttctgttttagcatgctattatgtagcgtcactcatatttgaaagtaaatgtataatattatgagacagtggtctaacctataaattaatttctatttaattggatttacttaatgaacaaggacagaatattatagattgatcaacacttgtatgtttctggtttagctttttataaaaaaaagtagactaatcatatattttgaattttatataactgaaaatttagagcttaggctttatgtagtttctcaatggcagaataataataccaaataggttgtcaggttttcacatttatacacgtaattttaaagtaatatacttgaaagtgccattagggtagggtttcattggcctttcaaatacctgttagttggattttaaattggttctttctctgaaaagacatctattcatataatttatttcaattcaataattagcctggcattgaaaatacaccataattcctttatatgttcaatataactggggatattttgaccaaacattttctaataatatcatatattttaatttaatatctgtactgggaatgagcctcaagtaatacgatagtagtgtgttcaagttttaacagtattagttttgaggatcattaaactaggcttgtctttagagattgcatactgaacaatcactgaagagaccatttatcccaaaaaagaattatcttttgaaatttctttattcgcttattttgcaggatgtgagaaatatttacaattgagcttttgagagcaaaagaccaaagtgctaggtttttctaaataagcattctttctccctgacaactttgactaagagctgagatttctacatggatgtctgctcccctaacaaacacatttactttattgttgaaatgtgcttaattgggtctagtaatactccacattttttctcataatttctctgtgggtgcgactaaatgctttttttttcatagaagcgaaatttgatgtggagattgctaaaaaaaattgtcccattgttatatttaattatattgggactagaccatagcattttaaatttccaactgttgttgtatcatttgatgataattttgtgtttcaaactagaaaatatgctaatgatttttttttttcctactggcttggtgtgggtatgctgttgatgacggctctgtattgttaatccagcatattttcggaggaaactaatgatttctggatgttatttatgcctaagaagatatttaatgattgtttacctgatttcagcacaattaatggcatggatgtatcacaagtcccttaatcgtttgatgttcactttgctttcattttaaacactttttcaaatgtctgtctcctacacatgttgtctattctctatgcaaatttgctaaatttggaataatttttttctgtgattttttttttgtggtagttctgtttcgttagcaaaactgctttgattctcctttattgtacttgaaaaacaaaggtggcgttttaaattaagtattttacttgtttttccatttgagtaagggttttaaatatctagcaattttacggtaatttttttttcaatttcctttgtctgtatagcacaggtaagtattgcaagtcatttaagtataacacaggtgtccagccagtagataggatctacttgtagatatctgaactggctgtagttgttactggctttcttttttctactagaattcccagtcaggaaagacatatgatgtgtagtggtgacctttgtccttctatggtcaagatttaaacattataaccagtgtttctttcttgttctctgttctttggtgatattgggactttcagaaaataagaaataggtcttcctcaaaaaagaaaaaaaagaaaaagagaaaaaggaagagtttggatttctagtgttaggaaaagtgattcatttttctgacttaatatcctttgtctttaactttgaaatttcaaaataaaattttgaaatttgagatgagtaaattctgtgttttcatttttcaagtataaaaatattgaactagttatttaatatgatcaaatttcccatattaatttgaatatattttttcttgttaaaatgcctctaaaactggtttagatttttgtataaaattagggaatacacatgtaataattcaggcctattgaaacataagtctgtatgaattattaataactgtgggttcttaatttcatagtttttattgttctacctccaagatttttttaaaaagtcatttgatattaattttcctggtaccctcaccaaaaaggatacagagctacttttcattaactacccacattgtaggatttgcgactaaaaaaaaatatttcaaaccattgtttagctttttgattatttggtgacttcattattatctcgtgaattccaccattttggggtacagatcattatgccttagttttatatatatatatatatatatatatatatttttttttttttttttttttgagacagagtctcactctgtcacccaggctggagtgcagaggcatgatctcggctcactgcagcctccacttccctgtttcaagcaattctcctgcctcagcctcctgagtagctgagattacaggcacccgccagcacacctggctaatttttgaatttttagtagagatgagatttcaccatgttggccaggctgctctcgaactcctgacctcaagtgatccacccgcctcagcctcccaaagtgctgggattacaggcatgagccaccgtgcctggccagtcatattttttaatagaaaacttaagatactaattttgaacctgagttgaaatatatactaatatgaattttgaagaattccatattccataactttttttttttttttgagacagagtctcgcgttgtcacccaggctggagtgcagtggcatgatctccgctcactgcaacctccgcctcctgggtacaggtgattcacttgcctcagcctcccaagtagctgggactacaggtgcctgccaccatgcccggctaatttttgtatttttagtagagatggggttttgcaatgttggccaggctggtctcaaactcctgacctcaggttatttgcctgccttggcctcccaaattgctgggattacaggcgtgagccatcgtgcccggccacatgttttgttttttaattcctatcctttaaatatatgacatttattaaaacaaagcctcacaccctactaaaatatttaacattccttggctatactcctttgaattattttatatatcaaactttaaaatatggtgtgatgctttagtactacatatacttaggtacctctaaagagcatgcatttaaacccattatcttatttataattctgtaaattaagtactctattatgatattgtacacaaaaaccaatttttaagcaaattttatcaccttgtttatggatgcccagtattttggccttctaaaaatatatttttttccagcaattttcttcaaacctgttctcagaacctcttaaaagataaaatggtcattgtagaatgtatctcagatgacctatcgtgcattttagagtgcatactggattaaatatgtttaaaactccttttatcatctttaaaaactcaagctggttgcagtggctcacacttgcaatcccaatgctttgggaggctgaggtgggaggatcacttgaggccaggagtttaagaccagcctgggcaacgtagtgataccttgtctctactaaaaagaaaaaattagccgggcatggtggtacatgcctgtagttccagctactcaggataccgaggcagaatgattgctttagcccgggagttcaaggttacaaggatatgtgtttgtgccactacattctagcctgggcaacagagcaagactgtctctaaaataaaattaaaaaaaaaattaaagcttgagttcttgcatttctaaatacataaatttaaaatatgcgaaatacacttatttttaaaaatgggggtcagcgcggtggctcatgcctgtaatcccagcactttgggaggctgaggtggatggatcacctgaggtcaggagtttgagaccatcctggtcaacatggtgaaagcctgtttctaataaaactacaacaattagctgggtgtggtggcacacacctgtagtcctacgtactcgggaggctgaggcaggagaattgcttgaacctgggaagcagaggttgcagtgagcctccctcactccaggttgagattgtgctactgcacttcagcctgggtgacagaacaagactttgtctggaaaaaaaaaaaaaaggcatcatctgtatttgcccaggcactcattagcatacaagtattaacaagtagagggtatagtgctggcacagtaaaattaatagcagattgggatttaggatcttaggttctactcctgactttgccactagttagctttgtttctttggctgagtcatttcctatatctaagcctgtttcctcatctgtagaatgacaaagctgtactctgaggtttgtccttctggctctaacattttgtattgcttttgttaatggctcgaaagctccctggtgcaggaggtccttctcttgattgcattttaagaaactcaacatttcgaattattgatttacctatcagcaagaggtggtttactttcctttcctgtttgagcgtttaaacaagcgacattactcatttcctttctagataggattggagttaataaaggctttcttggctttctcctatgtttttttttttttttccccgattgcttgtttgtcattgtgttgttgggctcacttcttattattttatttgtgctttcttttagtaatggtgttatcttggtgttcattatgtactttggaagacttagtatatgtgggttttggggtcctatttattttctcatgcgccagttccgatcattgtttgtttgtgggtttttacccttcctcccatattgttttgctttctccccctctcccttccctccctttcaggaaaatggaggagtggctccattacttctggctctgcccaggttttctgccacaagagtggcacggcctgtgcctctaatgcttctgatagagtcgtgactgctttggatgctacacctgccccaagatgtaatattgagcattgagattccaggggcagtacatcgtcctggaaagcctcaagaaaggaaacttcagagcaaacagaatcaactagggatcatgactatacatccagcatgatccagcatgggtccagccgaggcctccaaaatgatgctttgccagcctcagctggttctcaagtgatgatatccttgaagtctctgtggcccgtgactccagagttaaggtagtggagtttccctttaaagcatctcacagcaggctttgtagatgggacacatctcacttcaacatgcttgctggctactcaggttgaaggtcagcctcagcccttaggtccgttaaattaagttctaattttgaaatgtaggttattatgttataggctaggtttatggtagactgggtctttgacatattggacttcagtaataacttatgcaaaatgattcaacttattctttttagggcttaatttacatagctataaattaggttttcctttggacaaaaggtgttagagggcaaaaataaaacctttagccaggtagtctccatcactctgtatataatttgtgatttggagaaaaatgacctgaagtttgtaattttttggcttctgaatgtactatgattgttctatatgttatgatcttactgaaagttgtcgctaagttgtacttctacagtatgtggatctgatttcactttatatgatttattaataggtatacaattgtattttatctcatgtacatcatatttcttagtctaatgacaatccagaacttgagaatgcattaagtaggtttatgtattgtgactttccgttttttagtagacatattctttggagactgggatttgaaagaagaaaaattgtgtgatttcctacaattaacaaccaaatctttatagttaataggaattttttaaagactttttttgaacttgtaaacacaaactgaaatcaggttgttgaactaggctttcaagtaactagattaggaattgtatttttgttggctgtttagtgttcaacccaaatgatggtatgagatcttgtacttgcaagtaaactgtgtttttccatttctaatccagtattcaatgcttcacatattttatacacacacacacacacacacacacacacacacacacacacacacacatatttattcgtcccaaaattcattattcagattagtttgaggaagtttttctggtccatgagaaatgacagtgtagtattactaaagatggttttaatatataccaacagaaaaaaaaagtgctgtgccagacatagaaatttgctgctaacattttattttagtatcttctagtcttttttagggacatacaaattttagaagttttttttttttaaatagaactatattgtggtttataaattactttttcactgaatattaataaatattttctatcttaatcttatttagaatatcattttaatttctatctcttatggataatcatgtgaaaatactatttaatcagtttctgatattgaatgtttaaacgttttctcaccctttgctattgcagacaacattataataaacatacatgaattttttttttcttttgagacagagttttgttgctcaggttggagtgcaatggcatgatctcagctcactgcaacctccgcctcccgggttcaagcaattctcctgcctcagcctcctgagtagctgggattacaggcatgcgccaccacacccagctaattttcgtacttttagtagagacagggtttcgccatgttggccaggctagtctcgtacacctgacctcaggtgatctgcctgcctctgctttccaaagtgcagggattacaggcatgagccaccacacctggctgaaattttttttaaaaagatgattttagagaatttttccagaaagatgtatatcttcaatttaaagggtttccctttattctgaaactgtttcctaatttggggagggtatgttgtaaatagtctttattttataaatgatgaaagtaaatggaatttgggtttaaatttctttttttggcaaaatgaaaagttggcaaccctgtatttgtcccattttaagaaagcttacagtgtgcaaaccattgatctagaaatgtaagagcaaaactttatagctcaactttagtaagatttaaattggtgtgatctaatcttcactttattgaaatacaaatcagggcagaaatcctcagaaaagcaaacccatctgtggcttcctttagcaattgatgattctgtgtgttgtctaaatattcctgatccatctgtttgagggagaaagcaccaaaaggcatataataaacatttatggaagtgattgcctattttgcttcagtctatttagatgcctttgctatgcatctttgaatatgaatagtaatgaacaatctgtcaaataaaatttaggaggcagctaacatgcattaatatctcctgccattgaatgaattcttcattgaaatgtgggtgcgtgctaagaagtgtaaagaggggtttcaaatccagaaataacaaatgttccatcatctcagctacaagtttttgacttagagagtcagtcttgattgcagagaacatgtttatcccatacagattagctcatggcagactgtcaggatcatgccatcttctttttgaacttttctataagctattttcttgttaccgtgatttgtgaatttatattgaaaggatacccagacttatcaaaacatcttgtcttgcacaaaagctgtatgattgctttaatcttacattttcagttatttttcttgagtataaacatggagatttcctaggaatatattttattttaacatatgatggtaggagtaaaagtagtgttttcttatgcttttagtaattgatttttccattagcaaattggtctttgaggagcatcttgagaaattttgttgtgagtgaagcaactgcactattttttttaaagtaacccatttatggtaattcgtgttctttttaccatgtatgtaattaatagcactcatgtcccttctttcccctgtcttgaatattattagagattatttattgctgtaatacttaacatttgtgtatgctttcatctggttcacagcatttatgtagtacattgaaattaaggtccaaaactatcatcctctagtttgaagcaaggtgtcattatatagtggtttattacacattggttttccaagaatatattttgctgttgaataaaacctctcgtggagttttatcttggaatgccatttatctgaacaagttcatttactgttgttgacctgtctgactttgtagttgtaggatggtgtcagcaaagcaaatagaggattggaaggttatgcagcatcaaattgcaattggtaaaaatagtcaatagaatatgtccttcagagttttcaatatattgcagaattgtatagaattgagaaataataagtgtaaagaacatttttaaaagtttttgtttatagcttaggttaaaacatggttttgctagttgtttatttacaatataaaatctattggcacatttatttctattttgattcaaagaagtctgtttttatttttaatttggtgtatttcacccccagatatatagttctttttttattgttttttactctcaagaattgccaagaagatgcttttagaagaaattaaagccaatctttcctctgatgaggatggatcttcagatgatgagccagaagaagggaaaaaaagaactggaaaacaaaatgaagaaaacccaggagatgagggtgagctccccagagagaagtttataatgtcataatttgattccttgactaattcagtctttgaagaatatctgaccaagaaatatcttaatatggcccggcgtggtggctcacgcctataatctcaggactttgggaggccgaagcaggtggatcacttgaggttaagagtttgagaccagcctgaccaacatggtgaaaccctgtctctactaaaagtagctgggcgtgatagtgcgtgcctgtagtcccagctactcaggaggctgaggcaggagaatcacttgaacctgggaggcagaggttgcagtgagccgagatcacgctgctgcactccagcctgggtgacaaagcgagactccatctcaaaaagaagaagaagaagaagaagaaaaaaaatctcttaatacttgtatttagagttcatggaaatgtttaaaactttattaccatgacttctcttgaatatcttgtaataattatggaagttactctaattttgtcagttactgccaataaacagatgattttttttttttttttgagacagagttttgctcttgttgcccaggcaggggtgcaatagcgcaattttggctcactgcaacctctgcctcccgggttcaagcgattctcctgcctcagcctcccgagtagctggaattataggcatgcgccaccacaccctgctaattttgtatttttagtagagacggggtttctccatgttgatcaggctggtcttgaactcccgaactcaggtgatctgcccacctcggcctcccaaagagctgggattacaggtgtgagccactgcacccggccctaaacagatgattttcaaagcaaaatattttataccttacaaagggttctataaatatataggtgatatttagtcaatatttaataatagtaatatgtcaagtctgatgtgtgagattacctgataacaccaatgataccaaagtatgtgtctaactctgatttttttcataagttgcagtagttgtcaacaggcaaaatagatatacgaggcattttaaaggctgaagaaggttttattgatttatttccttcatttagaagcaaaaaatcaagtcaattctgaatcagattcagattctgaagaatctaagaagccaagatacagacataggcttttgcggcacaaattgactgtgagtgacggagaatctggagaagaaaaaaagacaaagcctaaagagcataaagaagtcaaaggcagaaacagaagaaagggtaagatgttttaattctgaatgtaaagaacatattggaccagacagtggcttatgcctgtaatcctagcactttgggaagctgaggtgggcagattgcttgagcccaggagtttaagaccagcctgggcaacatagggaaacctcatctttatgaaaaatagaagaaatagctgggtgtggtggtgtgcacctgtagtcccagctacttgggaggctgaggtgggaggatcacctgagccccggaggtcaaggctgtagtgagcagcgattgcaccactgcattgcagcctgggcgacagagtgagaccctgtctcaaaaacaaaagcaaaaacaaaaaaaatactggttttgtaaactaattatagtaatgaaatttaagtgtatggccaggcacggtggctcatacctgtaatcccagcactttgggaggccaagtcgggtggatcacaaggtcaggagattgagaccatcctggctaacacggtgaaaccccgtctctactaaaaatataagaaattagctgggtttggtggcacgcacctgtagtcccagctactctggaggctgaggcaggagaatcgcttgaacccaggaggcggaggttgcagcagtgagctgagattgcgccattgcagtccaacttgagcggcagagcgagactctttctccaagaaaaataaaaaaaaaaaaatttaagcatatctgctcaaacagttgaccacttatattaagcaaatgtcagtacactggcaacaagtatactatcacatgagattaaaattaataatttagagtgggaagataacccagaaactttagatgacacaaagaatatttttaacctttagattataaagagaaataaatatgatttaataaataaaacattatgtagaaagtataagattgcatacaactgcagaattagtgctttcctgtagaagggtagaaaatgaaattaatttgggtaaatttatgcaagcttatatgcagaacttgactggcatatagtcagagtagatttccatttcattaaaagcctgagtccttttgcattgagggcttacatgtttccagcagtatggtgggcattgaggatacaaaaatgaataaaaatgtatctcagtgattctgataggtaactaggtttggcagtcactggtttagtaagaattattgacctttgtattataaaaaaattatagcaccatgagggacattttgtgtaacgtaattatataatgtggcacaaagaagggcttctttagcttcttgaggggtaggagttaccccagagaaggcttcacaaagaaggcttttacccaacagattaaattcaaaatgtgggagcacgtagattgttgtgaagatttacaacacaagcagggaaaaaaattttaaaacctgtgtaaaatgttggcacatgatggatgggatacaattaatatagtataagctgctctatagataggagtagggaaaggaacaacaggggatgaagctgggcctgtaaaacagagaccagatactggagatctttgtaagcctgtgtttttcacactggagtactgggtggtataccaaggtgtacatctctttggtgtctctatttataatttgaggtttggggaaggtcattttatgttaaataatatatattgggtaattaaatgtgatatttgcctgcgaattttgggtaacaaaaagttcaaagaatttttttgttgttgctgtggtgggctttttgatgactaggggtaaattttgaagactgttgttagtacccaacccatggatggcagatgaactcttctttgccaactgggaataggaacgcatttttgcaagtgtttgggaaatataataggctctaaaggatgcagagccattgaaaagtttttttttttttttcaattactgtatttatttttgaactctggacctctggttatccacctacctcggcctcccaaagtgctgggattataggcgtgagccaccgtaccggccttatttttaaattttttgtataacagctatattgagatataactcacaaaccacacagttcaccatttacagtatacaatttagcagtttttagtataatcatagaggattaccaccactttaaaaaatgttttatttgaaatgtatgtacaaagaagtgcacattatcaataagtagacatcttgatgaaaacgtagggcacccagatcaaggaacaagatgttgattactaacacccaagaatcacaatctcagcatgaccacttttttccctattgaaagattttaatcaaagatatcatatgatcagattagttccttactattcagtgagaatgaaggcactgaatgtttggaaggtattgctgtagttgatgacaaatggggttgttggagaagaggaagattgacttgagtcttataggaggttgaattgttaggtcttcttaattggtatgaaagggaaaagtctacaatgagtgtcaggtttttagagttgtcatggtgtatgtacaatatcacagaaatagttgaggttattcagtggagttgtaatgttttacaaatggaaagctaaggacatagtcttggaatcctaaacatttatagggcttttgggcaagagttattcactaaagatgagggggagaagttcttgccacacacatatacaattaatatgtcatggacattttaatgttaataaataatagtacatcattttgtgactacttgtcttataaatttcttttttattattattatttttttatttttattatttatttatttatttattttgagtcggagtcttgctttgtcgcccaggccggagtgcagtggcgcgatctcggctcacactgcaagctctgcctcccgggttcatgccattctcctgcctcagcttccctagtagctgggactacaggcgcccaccaccatgcccggctaattttttatatttttagtagaaacagggtttcaccgtgttagccaggatggtctcgatctcctgacctcgtgatccacccgcctcggcctcccaaaagtgctgggattacaggcgtgagccactgcgcccagcttgtcttataaatttctttgcaatatggctgcaagctcttacagattctataaaggaactgtgtgatttagcatgttatatatcacaacatggattcctgtgcctcttcaacaaaaggggcaatattgattttgcttctgaagcttagttcaatatatagacccttttaatatatatgattacatttgagatttgctttattaaaacctgagttttctgtgatctgtgtttctacagcctgattctgtgggtaatttattacccaagtggttttgttgttgttgttttttgtttgtgtaggagagagtaaacttctaaaatctcatcatatttgtgtttctaatatggattgtgatcatagtggttgatatatagttgaagttgcatgattttctgagttttgtaaattctaatgttcctatattatttggaaatttgaattgagagatgggaaaaaatcagtagtgaatagtctgcttattaaatctagttgaattaaattgaaatgcattgaagaggtataagaacaaagtgcaacatgtgaactctaattttctcctaaattagaaaaatgttacaaaattattttagtgacaatttgaaattgtaaatattgccttcatattagatgatagtaatttttttttcagatgtgataatggtatttagttatgtagggcagtatccttatgcttaggggtaaagtgtcatccgcgcttaatatcacatggttcagtgtaagaaaagttgtgtctgcctgtgtgtgtgtgtgtgtgtgtgtgtgtgtgtgtgtgtgtgtgtagagagagaaagaaaaaaagcaaatgtggtaaactgctaacaataagtgaatttaggagaagggatacaagtgttcattcaataattctttcaaatttttggtagatttcaaaaattttaaaatgctgggtgaacaattaatactaggcttaaaattatacttaattacaggatttttttgtgtcagtgtgtgtgtttttggtattctcccagctttccagttgcttagctattctttttttttattattgtggtaaaatatatgtaacataaaatttaccattttacccatttttaagtgtatgattcagtgacattaagtacattcacatttttatacaaccataacttctgtctgtccctaaaacgtgtcgtcattccaaatggaatctctttaaccattaaacaataactctttgttcccctctcccccgacatttctttatagcatttatgttctcccatttatagcatttctgttagcatttatgttctctcattttttaaaaagctggaatagatctttgattctgatctcaggttatgatagatttttttaaaaaattattttgaaacaattcttgatttacagaaatgttacacaaatagtgcagagttctgtgtatctttcacctagcttccctgatttaataccctatcatagtaccatgatcaaaaccaggaaattaatattggtacaatactatcaactaagccgggggtttacaaactgcacctgtgggccaaatctgatcctctgcctgtttttataaataagcttttattgaaacacagccatattcattaatttactgttttcacatatgtacaatggcaaagttgagtagagatgagtagttgcaacagagaccatacggtccacaagtcaaaaatatttactatcaaactttttacataaaatgttttatgacctctgaagtaaactatagatcttattcagagattagttttcccactaatgttttctttctgctctatgattcaatccaggatctcacattgcatcgagttataatgtctccttaatctacttcagcctgtgacaattcctcagtctttactttgatgaccttgacacttgtggagtgttgattccttattttctcaactgttccttgatatatatttgtctaatgttttctcatgatcgaattgagattattatgcattttgacagaataccacagaagtgatgttgtgtcttcagtgcatgatatcaagaatagatgatgtcagtatgtctttttttttgagagaagacctcgctctgttgcccaggctggagtacagtggtgcgatcatggctcactgcagactcaacctcctgggctcaagtgatcctctcgtctcagcctcccaagtagctgggaccacaggtgtgtaccatcatgcctggctaatttttaaattttttttgtagagacagaatctccctatgttgcccaggctggtctcaaattcgtgggctcaagtgatcctctcaacttggcctcccaaagggctgggattacaggggtgagccaccatgcccagccgtcaatatgtcttattactctcacggttaacttttgttacttgcttaagttggtgtctgctggtatttttccactgtaaagaagaaaatattatttttctatctatatttagtattttgttgggagatactttgtgaccatgcatatatcctgtttcttatcatacttaagcccactaattttagtatgcatcttgggtgaagcagttagtactgtggtatttgcctagttgtaattttctatttatttcattacttccacatttagtaattgtaagggagatttgttttcccctatttatttattgcattatttatatcaatatgacttatagatttttattttaccagttataatcaaatagtatcatttattttattgctcaaattgttctagctttggttgttgggagctccttcaagttgaatcttgtgtcctttcaacatgtgcctgcccatgtttgaacactgctttgttttctggcactataagatgttgtaagcttatcttgtatttttttctgccctgcttcctctggccagaaagaggttttctcctggaattttatatgcttccattactgtgttaattgtgagaaaaagaaaattgaggattccacatgtagagcctgattttcctggtgttgtggctagaaatagggatttttcttcacagtcttgttgtcagtaccgtctgcatacctttggaatttagcctgccttctggtcaaaaccaggaaacaaagaaagaaaataaccatacgccctcacagctctctcccctccaccaattgtagaggggtcattattcaagttttgatttcagtctccaatctgcctattattgtttccctttccgagttcttcggttgtgtcatcattggtggagacaatctgtaatcttactccatcttggccagcctaccttgcttgttttgaatagccaaacttctttttcattaatttacctttggtaattacatatattttattgacaggtaatttattcttattctgtcaattcatatacaattgaatacttatattttaatgtacaaccacagttttataattacattagaaatacatctgaattttatgtatatcatgtaaagcattaactggtatattctatattatgtattatccattcacatatatacctctgatgttcttacaatgctctgttttaatgtcgagtcagtggtaaattaagtgaattaggtttctattgaaaaataattaataattttatgtattttttaaaattcaagtgagcagtgaagattcagaagattctgattttcaggaatcaggagttagtgaagaagttagtgaatccgaagatgaacagcggcccagaacaaggtattataattggtttttaaaaaattttaggaattaatctgaatgaccatgccttcaaatgatttatatggttactgttaccaataaagttaagttagtgtgatatataatattttgatttgaaactaattgttatacttaatagtttaaaaagaatctaagcatattttatgtgtagttgaattatgtattctaacctgggtagattttcagtctgcaaaaccactcgtgtctgcagtgttttattgttacgggggaaattgtaggataatagtaaagaggctttatagaaaaactgcctcagtctaactttgggcttttctactttctgtttgtataaataatctatgcttcagtttcctcatctgtaaagtgggggattacaatatacttgactgactattgtgggcattaaatgagacaatacgtgtacaaggtttataatagtacctacctggcaaatagtaagtgctcaatatataaattattggtctcagtagtactacagtaataatgatatgcttgttcttgtaacacgaacagtcactgatctagattacctgtaatttaaaatttggcttccttcttagtatggtatgttagataatactactactacaattttcttatttcccccagaataacataatctttctacagtttatcaaatgaacaatctgtgtgtgtttgtgtatgtatgtctacaaaggtgtctatctgcatttgtaagttttagaacattcgaggtttttttaggttaatacttaccaggttgtgcttagaatatagcaatatattatactttaagtcaatataaaatgaaaatgataagatatgatgagaggttttttttttttttaaaccaagatacaattcagcatgttatactgtggaatacagtggtcttcagaatatttgcaaagttgtgcaacaaacaccactctataatttctgaacatttccatcatccaagaaaacaaccctgtacttactagcagtcattttccattccccatgccctcgtactctaataaacactaaaatctactttctgtctctatggatttgcctgttctggatattttgcatgagttgattcatataatgtatatccttttatgaatggatttttttttcacttagcataatgttttcatggttcatccatgttgtagcctgtatcagtacttcattctttctttaatgattatttttaatagtggtaaaatgcacataacatttaccatcttaaccattttttttctttcatggtattactgggaatttttattttcatcttaacgatttttaagtgtatggcttagtagtgttaagtacattcactttttttgaaccaatctccaaaaccttttccccttgcaaaattgaaatgttactcattaaaccactctctttttcctcttccctgaagcccctggcaaccaccattctattttctgtctctatgaattttactactctaggaacctcatataagtggaatcatacagtatttgtcttttttgactggcttatttcacttagcatcatgtgctccagcttcatgtatgttgaggcatgtttcagaattttcttccttttaaagacttaatgttccattgtataccacgttttgtttatcaatttatttgttgatggacatttgatttgtaaccttttggctatcatgaataatgctgctttgaacatgggtgtagaaatatctcttcaagtccttgctttcatttcttttgggtatatacccagaaaaggaattgcatggtaattctatttttaattttttgacgaactgccataatgtttccatagcagctgcaccattttacatttccattaatagtgaacagggtttcactttctccacatccttactgacagtggttattttgtctggattaatgtagctttgtgtaccaatttctaagcccagaaatatttttctcaccaaaagttgttacttttttttttaaatctctgtgacctgttatgaagaaaacagtattcaaatttgtaatctgcttttttttagtgatgatgaatgttttttagtatgtctattggctgtttgtattttatactagaagaatagtcttaatgtccttttatgcatcttcttactcatataacaaacctcccctcaggatactgtaaaatgttgatcattggattaaaatgaagggttaggctgctgctggaatatccattttgaacctattgattttttttctgtttgtttttaggaatgcatacagaggtagaacagttttaaaatagtacataacttattgatggaagtttatcatgaaatattttattttgtgttttaaattttcgtcaggtctgcaaagaaagcagagttggaagaaaatcagcggagctataaacagaaaaagaaaaggcgacgtattaaggttcaagaagattcatccagtgaaaacaaggtaataatgacatttaccacatgcttgaattataaccagtacagtagactatggtaattatgctgttacctctctgttccattcattcattgtattgtactggcttatttacattttacacttgtggaaggattggttattgaatatatatatgtaaaagtattgatttgacattatcatttttttctattccttaatttctaatggaattttatttaagccattctaattcattattttacatttgtagtgatgtgagtgttctattttctgaagacaaaatactatcctgaatgatgactcatatatgaataaatttcttctcatagtgaaatcagccaatttgaatttttgtatttaagcaggcttacataaagtaaaaggtgtctgtaatatgtttgattctgtcaacacaatgctcttcagagggatatttgtcttttgaaaattaacttttaaaatattttaaaatgtacagttcagtggccttaattatattcacaagcagaaactcttcactcattaaacattaacaccatttccttctatcccccatcccctggtaacctctattttcatttatgtctccaagaatttgtgtattttaagtacctcatatatataagttgaatcatgcaatatttgtccttttgtgtctggcttatttcattgacataatattttctaggttcatccatgttttagcatatatcagaatttcattccctttttaaggtgaataatattccattgtaagtgtgtgccacattttgttagcccagtcatctgttgatggacatttgggttgtttctacctttcggctattttgaataatactgctatgaatatgggtgtttacatatctgagtccctgtttttaattattctaggtatatatggaaaaatggaattgctacatcatatagtagttgtatgtttaacttttggaaaactccacactgtttttctctggtatctgtaacatttgacgttcccgttagcaatgtaccaagattccaatttgtctgcatctttgccaacacttcctttgtttctttctttttttctttttttctttttttttttttttttaacaagaaacatcctaatgagtgggaagtggcatttctttgtggttttgttttgtattttcctaatgactggtgatattcaacatcttttcatatgcttatatcttcttttgagaaatgtttattctagttggtagcccatttttaattgagttgtttgttttttttaataggtgttgaagagttgttttttttttttgagacagagtctcgctctgtcgcccaggctggagtctgatggcacgatctcggctccctgcgagctccgcctcctgggttcacaccatcttcctgcctcagcctcctgagtagctgggactacaggcgcacactgccatgcccggctaattttttttttttgtatttttagtagagacggggtttcaccgtgttagccaggatggtctctatctcctgaccttgtgatccacccgcctcggcctcccaaagtgctgggattataggtgtgagccaccgtgcccggccgaagagttgtttttttttttttaatactactctattgctgaatataattctaaaggttttcagcatgttttcttccaccttttcctgctgtgttaattaatggaatatgaaatggataaattaaatgactttgtactgtttacctctaattgtttaaattctgtagagtaattctgaggaagaagaggaggaaaaagaagaggaggaggaagaggaggaggaggaggaagaggaggaggaagatgaaaatgatgattccaagtctcctggaaaaggcagaaagaaaattcggaagattcttaaagatgataaactgagaacagaaacacaaaatgctcttaaggaagaggaagagagacgaaaacgtattgctgagagggagcgtgagcgagaaaaattgagagaggtaactaatttctttcttcttctttttcttttgtagctacagggtcttgctctgttgcccaggctggcctcgaactcttgggctcaagtgatcctcctaccttggcctcctaaacttctgggattacaggcgtgagtcaacacacccagccttaatttatttctattaatgatttattttatttggtatatgacttcaatatatttcagcattttaagagtagaatgttgtaatctaccacagatttcttttttttagacggagtctggctctgttacccaggctggattgcagtggcatgatctcagctcactgcaacctttgcctcctgggttcatgtgattcttgtgcctcagcctcccaagtggccgggactacaggcatgcactaccacacccagctaatttttgtattttttagtagagttggggtttcaccatgttggccaggctggtcttgtgctcctgacctcaagtgatccacctgcctcagcctcccaaagtactgggattacatgtgtgagccaccttgcccagcctcaaccacaggatttctagttgcaattgatttttcctactgtcactatttcatgcaacttaaaatagtcattaagctttattaatttaattaagtgcatggaaagcattgagattcttgaatgatcaccaaaatggttatgttgtattttgggtagagaaatgtttcaaaattacttcttaaatccataaaagatttcagttttttaaatggactttatgttacaaaagttttcaaattcacaggtggagagaataatataataattctccctggatctattaactcagtttcagcagttactaacacaggacgagtcttgtttcatcttttttttttttttttttttttttttttttgagatggagtttcactcttgtcacccaggctggagtgcagtggcccaatctcggctcactgcaacctccacctcctgggttcaagtgattctcctgtctcagcctcctgagtatctgagattacaggtgcacgccaccatgcctggccgtttcatctattctttttccttcagattatttcagagcaaatctcagaaatcatattctgtttataaatagttgggaatgtattgttaaaagataatggtattttaaacattactgcagtgccattattaaactgaattctctcattgcctcacatagtagttttaaaaaatagttggtatgggcctggcgcggtggctcacgcctgtaatcccaacactttgggaggctgaggcgggtggatcacctgaggtcaggtgttggagaccagcctggccaacatggtgaaaccccgtctctactaaaaatacaaaaaaaattagccaggtatggtggtgcacgcctgtgatctcagcctcttgggaggctgagacaggagaattgcttgaacctgggaggcagagcttgcagtgagccagggttgcaccattgcactttagtctgggtgacaagagcaaaactctgtctcaaaaaaaaaaaatagttggtttgaatcagggtcttaacaagggccatctgcatattctgttgtatttggatgttacatctcttacctaattttaacctagtttctctttggttctttctttttctttacccattcttacagttcatttgcttaagaaaccagattatttttgtaaaattttctatattctgagttttgttatttgcatccctgtggtacagtttcactggcttctatatttcgtataaattggtaataagatctagagtcctgatcagatttagattcagttctctttttggtagaaatactcatgggcagtaatatgtacttccttttggatctcattaagaggtactttaaaactgcttgtccctttttttgtggtacagctcctctaactttgttccactttttcagaatctttttggatattctcagttctttgcatttccacatagtattacgttgttggtttttacaaaaatccctgtggaatttctgttggaattttgttgaatctttcttgtaatgtggccagaagacatcttaacagtgttttgtctcctgttacatgaatatagtgtacttctctatttatttaccttctctttaatttctcttaggaatgttttgtagttttctctgtacaggtctagtacatattttaaaaaatttatccccaagtaattcctgatttttgatgttacattgtattagtccattttcacgctgctaataaagacatacccaagactgggcaatttataaaagaaagagttttattggacttatagttccatgtggcttggggaggcctcacaatcatggtggaaggtaaaaggcacatttcacattgtggcagacgagaagaacttgtgcagggaaactcctctttttaaaactatagatcttgtgagacttattcactatcacaagaacagcacaggaaagacctgcccccgtgattcaattacctcccactgggtccgtcccacaacatgtgggaattcaagatgagatttgggtggggacacagccaagccatatcatatagtaaatgtagtttcacgtaatgttggcataatgaccttgtgtcctaagctctaaatttacttactcgttatagtagcttttttgataaattctttgtgactttcatgtatacgtttgtgttgtctgtaaagaaaaactattttgctaattccattccaatctgtcatttatttttttaaaattataaatggtgaatttcttcaaatgcttttcattgcatctgttggagtgacctagaaaatgtcttgtattccttgaataaaccttgcttagtcacgttatattactccttttatatattgtattgcatttgctgatccttccttccttccttcctcccttccttccttccttcctttctttctttctttttctttctttcaagatagggtcttgctctgtctctcaggctagagtgctatagtgtgatcatagctcactgcagcctcaaactcctgggctcaagcaatcctcttgcctcagctttccaagtagctgggacaacaggcatgtaccaccatacctggttaattttttattttagagattgggtctcattatgctacccaggctggtcttgaccccctggcctcaagtggtcctctcccatcagcctcccaaagtgctgtgactatagtagggagcctccacacctggcatattccatttctttaatacatgtagaactatttagatcttttctttttctttaggtctgttttggtaaatttcaaacttaaggaatttttccatttcatttaagtagtcaaattatttatgtaaatttgtttatagtctttcattatactttgtaggttctgtcatttattgtttctgttaggaatttgtgttttatcattttttccttgattaatctgtgcaaaaagttcacaattttactatctcaaaaaaaaaaaaaaacgcagctttggatttcattaattttttttctattgtttgacccttttctatttcattgattttcattcttctttttactgtgtttatccttctttggacttattttctgttctttttctagctacttaaggtggattttggatcttctttaacgtatgcatttttaaaggtataaaatttgccactgtgcatactgtttaaacactgcatcttacagattttggtattttgtgttcatttttactctgctctgaatcttttctaatttctgtgagccagaatatgatctgtcttggtggatgttcaatgtttatattctgctgttgttgggtgacatattctataaattttgatcagattatattgatggctgattatattcacatcttctgtagttttaatggtattctctccaatcagaggagtgttgatgtctccaactataattgttaattcatctctttctccttgtaggtctctcagattttgcttcatgtttgctggaagttgttttgttaggtacatatacatttaggattacatctttctggttaattccccctttaacaacatgtaatgtgactctgtattatctggtaattttctttcacctgaagtctgctgtatttgataataatggtaacgacatcatcatctttcttttccaacatcttaggaaaagtttcatttatacagccaggttgaaagtatttcattgatttcctgtaaacttacttcctagatttttttcattgtcatatttttcattttcatgtttcctttattacattcctatttatgtactaatctttatctatcagtacatctttttatgcatttcatagtaaattgcatacatcatttcatttatctcaaatgctttagcaggtgtatcattagctaaagttcaatatttatgtgttttcctttttatgtaaaaggaaatttacttaaaatgaaaggcaaaaatcttgtgtacatttgtttttgaataatatgtggtgtatattttctcattatttttttctagtaattttgttcccccacaattttatcgtgaaatttgtaaatatatggagagaattgtaaacatgaacacgaatgtacctaccatgtagcttcttcatttcttaacatgttgctgtatttgctttattacatatctgtcttatctatgcatccatcaaccattttattcgtccctgctctaatctgtattatttccttttattctctagctagggtttagtttgtgcttccttttctggttccttaaggtgtaaagttaggttcttgattgtgatctttcttcttttctactgtatgcctttatcgctgtaaatcctcttcttagtactgttttctctacgtcccatatgttttgtattttgtgttttaactttcatttgtctcaaagtgttttctaattttccttgtgatcttttacttgatcctttagttacttatttaatttccacatatttgtgttctttccagttgtcttctgttatggattttttgttgcattcccttgtgactggaaaagatacttcagtctctttatatttattaaggcttttttgtgcctgattatatggtctgtccttgagaatgtgcacttgagagaaaatgtatagtctaccattgttgagtggagtgttctttatatgtctgttaggtctattttttttttttttttaaagacacagtgtcttgctctgttgctcaggctggagtgcagtgacgtgatcatagctcactgtagcctcgaactcctgggctcaagtgatcctcctgcctccgccccttgagtagctgggaccataggtgcatgccaccaccccagctaatttttttaaactgttttacagaggcagggtcttacagtgttgcccaggttggtctccaactcctggcctcaagtgatcctcctgccttggcttcctaaagtggtggaattaaggcatgaaacactgtggccagctccaattggtttatagtgttattcgagtcctatatttccttaattatctttgtctacttgttttacgcttttattgatattgggctatttatgtctccaactgtttctctctttttttgttttagttttcccctactacactgatgtatatttctccttttagttctttcagtgctttcttcatatgtcttggtgctctgttgtttgttgtatttatgtttataattacattttttgagaacctggctttattatcaatacataatatcctatttgtctcttgtaacagtttctgacttaaagtctattttgtctgatgtctatatagtcatctcagctctcttttggttgttatttgcatggaatgtcttttactattctttcactttcagtttatttgtgtctttagatctaaagcgaaccttttttagataaccagtatttggatcattttttaaaaattattatgtccatctatgtctttttgatccaggagtttaatccatttacacttgaggtaagtagtgataaataaggatttacttctgccattttgtgttttcctttttcattttgttcattattttgttcattatttcctccattactgctttcttttgtgtttggttaattttttgcagtgacatattttgattcccatctcactttcatttttgtatattctatattttctttgtggttatcatggagattacatataacatcctaaagttatgagagtcttacttgaattgatgtgaacttaacttcagttgcatacaaaaattctactcttccacagctccattcccctgtatattatgtggtgactctgttacaattattgatatcacaaattacatttttatacatgtcgtgaatggtaacatatattcataattgtattttatgcttttgtcttttaaatcctaaagaaagtaaaaagtgaggttatgaaacaaaattttgtgatactaggttttatatttgcccctgtatgtatctcttctaggagatctttatttctttatatggctttgagttacttctagcatcctttcatttcaacccaaagacttccctgtaggaagcattttttatagggcaggtctagttttaacaaattcatttggcttaggagtgtcttaacttgttcctctattttgaaggataattttgctgggtatagaatcctcagctgatgcctggcacagtagctcacccctgtaatcccagcactttgggagaccgaggcgggaggatcacttgaggccaggagcttaagaccagactgggcaacatagtgagaccttgtctttacaaaaaattaaaaaattatctggatgtggtggcacacacttgtggtctaagctacttgagaggttggaggattgctttagccaggggttcgaggatacagtaagctatgattatgccattgtactatagcctggatgacagagtgagatgctgtgtctattttttaaaaaagaaaaaagaatcctcagctaactttttttttcattcatcactttgaaatatattgtcacactgccttctggcctctaaagtttttgatgagaaattaggtgatgatcttattgaagtttttttgtatgtgttgacttgcttctctcttgctgctttcaatattctctttgtctttggccttcgacagtttgtgtgtaatgtgttttgatctatacgtatttgagtttatcccagtttgagttcattcctgtatttgtagatttaagtctctctccttcaatttgggaagttttccacaattatttcatcaaataattgttgcttctttctttttcttttctccttctgtgactctcgtaatacataagatgttcttcatgatggtttccctcccatccctttttgtttcttcactttagtttttttttttccctttttgatcttcggacttgaggatttcagttaatatcttcatattcactgattcttctgcctgctcaaatctgctattcatcctcttttgattgggccatattttcctatttggctgtatctttgtgattttttttaatactttaagttctagggtacatgtgcacaatgtgcaggtttgttacataggtatacatgtgccatgttggtttgctgcacccatcaactcgtgtgattttttaaaattgcatattgtgtatttgactgttgtaacttggcaactctgcatatgaggttctctcccttttcaagggtttgctgggattttaaaatatatataaattgtagtagacctattgttttaagactcccccacattattttttcaaagagtgttcttgttgtgtgtcatcagtaaagtctctgtccctttcattcatgttcaactaatgttttgaaagatttttttgaacgtctgctgggtgtggtggctcacgcccataatcccagcactttgggaggccaaggcaggcggatcacctggattcaggagttcgagaccagcctagccaacatggtgaaatcctatttctactaaaaatacaaaaaatttagccagacatggtggcacgtgcctgcaatcccagctactcgggaggctgaggcacaagaattgcttgaacccgggaggcagaggttgcagtgagccaagattgcgccattgcattccagcctgggcgacagagcaagactccatctcaaaaaataaaagaaggctttttttttttaatgcctgctctctctgtttgtagattgattgtgctggtgcactcctttaatccataactaggcttccactaaacctaaagataagcctgaggggaaaacttaagattttaataaagatcttttctgagcatgtattttacctggacacacatatggctttctgaattatcctatatacctggttgcttttgagtgtcccaaatttaaaagtagctgcgtgtggtggctcatacctgtagtcccagcaactctggaggctgaggtaggaggatagcttgagcccagttgtgtgaggccagcctgggcaacattgtgagaccctgtttctacaaaaataaagactagttgggcgtggtggtgcacacctatagtcccagctacttgggcggttgaggtggctagatcggttgaggtggctagatcggttgaggtggctggatcaattcaacccaggagttcagtgctgcagtgagctataattacaccacagcactccagccttggtgacaaagcaagaccctgtatcttgaaaaaaaaaattccaaaagtgtcctatctctagctatttgggccttaggtggtgttttgggagtgttcccctgtaatgccttgccccaggcctgtagtcacgttgcagttgttttgtgtgtgtgtgtgtgtgtgtgttttaaagctgttcttgttgtccttctcaccagagctctgagttaggtgaagaaatgatgagagccttatgtcagtccttcaagtatccttcagacaggttagataaaatttacacaataatttgtaaataacatctgctttgctccctctggtttgtgggaggatactgggaaacagggtgctgctgctttgagactaaaaccttcaccttctggtaggtggtggggcaaggacaagtaaaaatgctgtaaaacgttcctattgtattgaaggtgactttttttctttttcgttattttagagacagggtcttgctatgttgcctgggttagcctcaaattcttgggttcaagcgattctcctgtctaggcctagttgtttgtactacaggcggtcaccaccatgcctggctaagatgttgttttcttgattgggtatttgcttggttgctgtaaacctttgactgtgttccagagctctgacaaagttggttcagaaagtttctacttgtttacaaaatagttctgtgtgggaactggagtttggagcttcctaatctattgttttgttgatatctacattttcccttcttttttttttttgttttttttttggagacagtcttactctgtcacccagcttggaatgatgcagtagcatgatcactgtagcctggaattcctgggctcaagcaattctcccacttcagccttctgagtagctagaagtacaggagcaagctaatctcttcatttttgaaagttgttttccctgggtatagaattctaaattgatactttaaaaaaatctctttaaagatgttacttctttgtgacattttgtttgttatctttctcctttttccttcatctttgctcctctgcatgtgccttttatttcttggaaagatagtcttaaaagatttttcagtattttaagattttctgttaatgtctggctttcggaaattgaagatttttattttctttgtttatcctgctctgggttccttgaacttgttggatctgtgagtttatagtttcatcaaatttttgttggtttgttttagagacagggtcttactctgttgcccatgctagagtgcagtggtacgataattggtcactgtaacctcaaactcctgggctcaagagatactcttgcctcagcttctggagtggctaggactagaggcatgccctattgctaatttttaaacttttcgtagaaacaaggtcttgctatgttgcccaagctggcctcaaacttgtgacctcaagtgatcctcacaccttggcctcccaaagatcttggattacaggtgtgagctaccatatccagcttccatcaaatttttggaaagttcacatcattattttttgaaataatttttttctgttctatttttctttgggacttatatattatgctctttaatattgttccataggtttcttattttcccccctctgtttcattttggatagtttttcttgctttgtcttcaattttgttgatcttttcttctgcactattatgatattaatccacttagtgaattacagtgtactataattttcatcactaggaattccatttagttttttgaaatatcttctatttttgttttcattgtgttcatgttttcagtgtttgggcattttttttttttttttttctgagatggaggctcgctctatcacccaggctggagtgcagtggtgcgatctctctgctcactggaacctccgcctcctgggttcaagcgattctcctgcctcagcctcctgagtagctgggactacaggcgtgtgccaccatgcccagctaattttttatatatttttagtagagacgaggtttcaccacgttgcccaggctggtctgaaactcctgagctcaagcgattcacctacctctgcctcccaaagtgctgggattacaggtgtgagccaccacacccggcctatttgggcatttttaatcagctgtctcactttacttgtctgcctatttcattatttctgttacttcttgtcccatttttgttgactcttttttcccctggttattcttcatattttttttcttcttgacaaacctagtaatgttttattaaaaagttcagtttaattttgaagcttttaaaaaagcctggttaatgcgtttcttcaatactctttaatttatgaattgctttgacccactgctaagatttggtctcttcgtggtctctactgaatgccctgggttataaacgaagaggctactgtgcctcctctgaaatcgaatgcctcccagcaccatgtgatcactgggagctgtttagctcacagcttcttggtcatgctctgcctggcctcacaaagtttcactcctcatgtgtgcattttaatgttcagctatgactcaaagtgaatcctgtcttgattttgagttctttttgtgtagctcttttttctttgtagttctgccccacaacttcagtcatctcagcctgacctttgtttcttcaacttgatatatctccagtgctctccttgggaatcccttttccctgatccttcaggcaccaattcaaggggaatataggggtcttgttggttttcctactctgagggatcagggtcccgtggtgtctttatttaatgactgaaaaaaatttttttcatatattttgcctacttttctacttgattacagcaggaaggtaaacctggttcctaataaaccatcatgactggaagcagaagtttggctcaaccttttaatattttggtcatatgattttttttcctttattttcccttcaattcagatatgggagatatttcatgtctgtatttatttttactacaccttaagtgattatttgtcctaagtttttctcctatttcattgctgtgtatttatcattttttaaaatttcagcttttagtttagatacggggtgggggggtacatgtacaggtttgttactaggtatattgtgtgatgctcaggtttgggatgtggatcccatcaccgtggtagtgaacatagtacccaatagttgttcagcctatgccctcttccttccctccccctccagtagttcatagtgtctattgttcccatgttgatgtccatgtgtgctcagtgtttagttcccacttgggagaacatgtggtatttggttttctgttcctatgtgaatttgcttagatttatagcctccagctgcctccaagttgctgtagaggacatgattttcttctttatggctgcatagtattccgtggtgtatatgtaccacattttgtttacctaatccaccattcatggtcacctaggctgattacatgtctttgctattgtgaatagcatggcaatgaacttatgagtacttgtgtcttttttggaagaattatttattttcctttgggtatatacccagtattattagttaaataaagtttccttatattatagcttgagtgcataaacacatctacttagtcactaataggcagatgatttctttttaacttatctcctcctacatttaggatgaagatacactaatcctcaatcctgaagacaacacttaataacaaaagtatcatcaagtcactgatgaacatatggttcagaaatcttaattaaagccttgtatattagttttttttattgtggcattaaaatgtaccacacacttaacctcttaagacaaacttatttgtctcacgggtcaggaagttgggaatagcttagtgagcgtggctctactgggttttctgcttagtttcccaccaagccgaaattaagatgttaactagagttttgctttcatctaagactttgtatccttttccaactcacttgttggtagaatttagttcctttcagttattacacttaggtccttagctactagagttctctctccacaacatggcagattgtttcatctttgagatcaatagaaaagcatttcagtcatttaaagggctcactttaattaggtcaggctcacctagaatatctcccttttgattaaatcagagtcagcttattagtgggccaattatgcgaatgatagcccaatcatatttacaggtctcaaccatactcagaaggtgaggggattatgcagggtgtttatatcagatgacggtaattctggggccattttaggattctgtgtaccacaccttgtaaacaggacaagacatttagggaattttccatttttatataatggctttaccccagtgatatgaagctactacatatccaggctaggacacagtaataatttagtgaatacttagcctatgccagatactttgcatacattgccttattcagtctccagaacaaccttgtggaaactattgataatcattcccagtttgcagattcagacacagaagctaagagggtttaggtagcttgatgaaatggaatttgggtctgaatggcctatgctatttttacttcaccacactgtttctcagcgttaatcttggtttgtatatcacaattttatgtaagtacaatatctattcagataatttactgcaaatctgtgacttatttgtagttttttggatgtgacaatgatcgtatggttttacaaagaggaagtgtccttttaaagagacatttacaaacattttatagatgacattgcatattttcttgtgttcgcttcaaaatgatttgtgggatctggggaactggacaatgggtaaaatgctgtcagtgaaacaaaactggccttaagttgataattttctttttcttttgagacggagtctcactctgtcgcccaggctagagtgcagtggcgcaatcacggctctccgcaacctccacctctcaggttcaagcgattctcctgcctcagcctcctgagtagctgggactataggcgcgcgccactgcgcttggctaattttgttgttgttattgtatttttagtagagatgggatttcaccatattgaccaggttggtctcaaactcctgacctcatgatccacccaccttggcctcccaaagtgctgggattacaggcatgagtgaccgtgcccggccttaagttgataatttttgaagctgagtgatgggtaataggatttattattctcttccatctacttttgtgtatgtttgaaaatttctatattgaacattaacaaattcatttgttaactagttttaattgtaaataagaaaaaagtgcctaaaattttatttcttcaccattgtaatttttgttttttaatttttttttaaagttttttttgtttgtttgtgttttttttttttttttttttgagatggagctttgctctttcacccaggctggaatgaagtggcacgatctcggctcattgcaacctccgctgccaggttcaatccattctcctgtctcggcctccagagtagctgggattacaggcgcccgccaccagcctggctaatttttgtatattttgtagagacagggtttcaccatgttggccaggctggtcttgaactcttgacctcaggcgatccatccccctcagcctaccaaagtgttaggattataggagtgagccaccgtgcccaactgcgtaatgtttttatgattttaaaatcacgagtttctatttttttttcatggaaccataaaactgtttatcacaagcatttattttactaaactagtattttgtaatgtttaagagcatggactcgggggatcaaccctctgggtaaatctcagtgtcatgatactcaatagtcgtatgaccttgtgcaggttactttacttctctgtccctcagttttttcatctgtcaaatggtaatacttgtacctatcttgcgtagttactgaatatactatgtaacggatagagattaggataagacagcaaaaaatatatgcacacacacacttgttacctgtgtgcatatattatatctacttaagttttattctaaataaggagcttgtgataattgtttccgttttgtaattagaaggtattatatgttcctatcatgatttttgagcctgtggttctgaaaccagtgtttctaaatatttttttcttttcacatcatgtatttacagtgtttttcagtggtagtcatgttgacatcctgagtcgcacagttcttgtttgggactgtcttcttcctcctccttccttcttcctccttcttctttcttcttcctcctccttcctcctccttccttcttcttcctcctccttcttcctccttcctcctccttccttcttcttccttcttcttttttcttcctcctccttcctccttcttccttctccttcctccttccttcttccttcttccttcttcttcttctttcttcttcttcctcctcctcctccctcctcctccctccttcctcctccttccacctccttcctccttcctgcttcctcctcctcctccttcttccttctccttcttcttccttctttcttctttttttttttttggcatagcaaccaacaacagggaacactgcttttttcacaactctgtgtaataaatgttgttgaaatatccagggtgagatctgttgagctaaattactgacattatcagagtgatttaaaattttttggagagttttgattttagaagacataaaaccctgggctctgtcctggctttattgaagcaaaatagtagtgtattagttctgagattgggtaatttataaagaaaagagttttcattgactcacggttttgcaggctgtgcaggaaatatagtggcttctgcttccggggaggcctcaggaagcttccaatcatggcagaaagcaaagggggagtgaggcacctcacatggtgggagcaggagcaagagagtgagggagaggtgctgcacagttttaaacaactggatcttgtgagaactcgctcactgtcacaagaatagcaccaaaggggatggtgttaaaccattcatgagaaatccaccttcatgatccagccacctcccaccaggccccacctccaacattggggattacaattaacatgagatttggtggggacacagatccaaatcataccaattggatttgtggtgtgggagtaaatgtgtctatattttggaaaatctcccttggtaagactgaccattgcttgaatgatttctttgagcttaactatcaacaactccttttcttgtaggtgatagaaattgaagatgcttcacccaccaagtgtccaataacaaccaagttggttttagatgaagatgaagaaaccaaagaacctttagtgcaggttcatagaaatatggttatcaaattgaaaccccatcaagtagatggtaagaaactattagatgattcaataatttttagttaaatttttaccaatatttgggtgtgaggcagctgcctcacatcctgctaagtcctggaggtaaattggtgagtggggtggggaatccacaattcccctgcctttatggagctcataaacaaatgaggaagaacaaaattgggtgatttcaaacacaatgagcgttataaaaagagaaagaagtgctacttacaaatgggtagatatagcaagtaggtttcacctaattagcaaagactggcctaagggcagctaggggttgggaagagctgtagctagctaaaagcctttttcagaaaatgctatttcagcatttttaggtatgttttctttattagagttgaatcagtaagtcagttttgagtgtttatgtgaattaatcataagggaggttctgtagttcctaccttttgagttgctagtcccctttcttgctcagtgtttactatcgaataaaggaaaagatgatgaaattatctcatgggtttttttttcctgattgactcaataaactcaaaggtatttttgataggaagccattctctttttggataaagttgctctctttttacaaaaattattattattattttttgagatggagtctcgctctgtcactcaggctggagtacagtggtgctataacagctcactgcaatctctgcctcctggcctcaagtgattctcccaactcagcctcctgagtatctgggactacaggtgcacaccaccaccacgcccagctaattttttgtattttagtagagacggggtttcaccatgttggccaggctggtctcgaactcctgacctcaagtgatctacccgcctcggccttccaaagtgcttggattacaggcgtgagccactgtgcccggccacgtttctcttttagagtattcttatgtttctttgaaccatctcagggaatacagaacatctactgtggatagcttagagaagatgaaggaaagtccccctgttctatgtttgtgttaacttgtttctgctttagtttggtgggaaaaaatcccatttagatgtaagaaattatttagctaagtgtttttttaatgctgtttcttagaagttttggttatgtttttgatgtgtttatgtaaaggaagtttttaacttggacctttaaatttaacttaatgaagctgttatttttaggtgttcagtttatgtgggattgctgctgtgagtctgtgaaaaaaacaaagaaatctccaggttcaggatgcattcttgcccactgtatgggccttggtaagactttacaggtaagagctgaagaatatgaaggtatcctgtttttgtggattcattaatatatattggattctattatgtttcaggcacagtcgtaggggctgaagataaagcagtgaacaagaataacaagatctgtctccaaggagcttatattctagtggaggagagagctgctaatcaaataagaaatatgtactttcagaaaatgaatgttaagggaggatattgagttaggaaaggcatcttttaggaggtaatgtttgagcagaggtcctaatgaagcgaggctgtggggtttcaggtatggccaacaacaactgcaaagattctaaggtagaaattaccttttttttttttttttttttttttacaacttttaacggtttatgatgttaaagtaatgacaaagtaaagtatcttttactattaaaattgctgcatttctaaatggcaggagttgtagcagagatgtaaaattggtgaatgtatttgtacttttaaaccataaagtaattatagatttaatgggtcagaacacattaaagtggaaaaatattatgtaacatgattctcttctaaatgagcgatggtattttttgaaagactatagggacattctgtggagacctaggacttagtattggtatgggatcattttatactattcacattgatcatagaatcatggagctttagagttggaagagcctgatacatcatctagttgaactttggcattttactatctctttccctgtgccttgcctggtttggaaattctggccgtttattgtttaagcaaaacaaagctataatattgtaagattgcttaatttattaaatttttttgtggatatttaaacgaaggtgacaatctgttttcttataggtggtaagttttcttcatacagttcttttgtgtgacaaactggatttcagcacggcgttagtggtttgtcctcttaatactgctttgaattggatgaatgaatttgagaagtggcaagagggattaaaagatgatgagaagcttgaggtaacttattttaaatgttttctattattaaaatagtcacatgaaattcatatagtaaactatttttaattttttttaatttttaatgttttttaaccagtgatgcatatttcagtgggaatatttaatattcacatgtttttagtagctacttaaaaaaatctttatttccccacaaaaggtttctgaattagcaactgtgaaacgtcctcaggagagaagctacatgctgcagaggtggcaagaagatggtggtgttatgatcataggctatgagatgtatagaaatcttgctcaaggaaggaatgtgaagagtcggaaacttaaagaaatatttaacaaagctttggttgatccaggtaaggtattaatagacagtgacataaagaagcaagttgaataaaaaatgtgtttatattttaacaaatagtaattgcacagctactaagtatctggtctttgttgtggttatccttcaggtttttgccttttagaaaattcttagtatttcaatagaataaaatcacccttaatgtcgccagctgttcagaatttatttgctgagtctgaaagtgtttagggttttaggggataccttgtaaacacttaaaaatgcatcaaatgcctgtgttgcaatcaaagattcttccagctatccaaatattaggtgataacaagagctctctccatatcctgaaaacagtttgtgtctttccaaacttcatgtcattagaagaattgctgcttgcttatctccttttaaggggccatcagtatgaaaggttaatattttcaatactgttgatccttatgtgatagtaatctgatgtgagagccagatgttgatatatttgccacttggaaaagcaacacgttgtactgtctgcaaaactaaaattattttttaatctacgattattaatttgtgcaactttttcttcatatgtttatcttgtcatatcatatttaagacactattgaggttttatttttgttgagaaagtctgggtaattgtcattgtcaaagtgatagtaatctttagaatccttggctttgcctcttttttaaagataatgaggtagttaatacatagcaaaataactgccatcacaaatctaaggcctaataataagtttatctctttcccacgattaaataggtgtttataaatcttgtggctggtttattgttgaaaaattataagctagtgtctagtatcattgtagcagattttttccacaagatttccttgaaactgtttaatacaacagtttcaggtgcttagtgtacttatttgttcatgaaaaaaatgaagaaaaaaaaaattaaagcttctaacatgaagggtaacatttgtcattgccatattttatcatttagtgacatttaaaaaaaatttttggccgggcatggtggtgcactcctgtagtcccagctactcaggaggctgaggcagaagaatcgctcaaacctgggagctggaggttccagtgagccaagattgtgccactgcactcccatctgggtgacagagcgagactccatctcaaaaataaaaaacaaaaaaacaaaaaaaaacttttcattttggaataattttctgtttacatgaaagttgaaaaggtagtgcagagagttcccatataccctacatctggttcctcaattgttaacatcttacattgccatggtagatttgtcaaaactaagaaattgacacattattattaataacttcaaactgcatttgtattgcaccagtttttctatccagggttctacattgtatttagctgtcatgtctctaacagtcttctggtctatgacggtttctcaatctttattttttcattatctcatcagtcttaaggaggaccgtccaggtagatatcctgtagagtgttctctgatctgaatttatagtttttcttgtgattagactgagattagactgaggttttgaaagaatataccagaggtgacataccctttttgtcacatcatatctcatatcgggggtacatgataagcacttgctgttactgatgatgttaactttcatcacttggctagggtagagtttgtcaggtttctctcctgtagagctgctacttttacctgtccctcatctgttcattggaatccagtcactcaatctagcccacctgaatgggaggatggtggaaattaagctgtatctcctatagtgggtaatatctacacataaaatttggatttttttaaagaaaaaattatcttttcttacccatttatttagcctttgatttatataattatatactcatctatttttagttcgtgcattggactataaaccattactgcattttttttttttttttgctcaaattgtttcactttgaccattgggagctttttttaaggtgaggtcctctaccctttgatatgtccctatccttttggctttgagcactttattactttctggcattacaggatgctccaggttcatgttatattgtcctggccccagaatcagccatttcttgaagacatcatggttccttttactgaaaattgacatttacaaatgtaaacacacccatataatttgcaaatatatccttccattctgtgagttgtctttttacttttttatatcatcttttcagtactaatctttaaaattttgattacatttaatttacctatttttttcttgtgttgcttttgcatttagtgcatatccaagtattcattgcttaatcgaaggtcatgaattttttcacctgtgttttcttattttatagttctagctcttgtatttatgtttatgatctattttcagtttatttttgtatatggcatgaggtgggagtccaacttcattttttgtattttgatatccagttgttctaacaccatttgttgaaaagactattctttcttcattgaagagtcttgacaccattgttgaaaatcaattgaccatagatgtatgtgtttatttctaggctctcaatattattgtattgatctatatgtctgtccttatgccagtgtgacattgttttaattactgtagctttgtggtaagttttgcaatcaggaagaagtcctacagctttatttttctgtctcaaagttgttttgctatttgaggttccttgaaatttcatttgaatttgatgattggcttttatatttcctcaaagaaactagctgggattctgttagatattgcattgaatctgtagattaatttgaggaatattgccatcttaacaatattaaatcttcccctccatgaacatctaatttctctccgtttatttaggtctttaatttcttttaataatgaaatttgatttaggtcctttaatttctttagtgtaaaagtcttggacttattttcttaaatttattcctaaatattttattctttttgagccttttggaaataaaattgttttaattttattttcagataattctttgttagtgtatagaaatacaacagatttttgtatactgattctgtatcctgcaacttagttgagtccatttataagttctaatagttgtatgtgtgcgctcacgcgtgtgtgtgcgcgcgcacgcacgcgatttagttttctattaagaaaatcatagtctatgagtagaaatagttttactttttcctttccaatatgaatatcttcaacttctttttcttgcctaattgcccttcttagaaatttccatacaatgtcgaacgtaagtggtcagagcagttggttgtcatgtttttgatctcagggaaagctttcagttctccaccattaagtatgacattagctgtggatttctaataggtgtcttttatcaggttgagtaagttctacattgggttatattttttgtttgttttgataattaaaaaaataaatacctagattacccttgttaaaacttaagaggggctggtttctccattaggttttactggatgttcttcaggaaactgaagctctacttttattttcttttccagagtatatataagtattagagatagttcctctgccatagctgggtaaccatctgcaacaagaatattctaatatccatcatgtataacatggaatatattaaaactgttgttaagttttaaggtttagtgatagtatctagatataattttctttgccacctaagtctaaagtgtcaggatctgttcagtacttctaaatttattagaagggatctgttcagtataacacttaattttccagtacatgttttccattttatgcccaatttatcttctctgatttggaacaaattagtgatagtgaagaatcatataaatggcagcagagtatgtgaagactgaagtttgggtgtaatgttaaagaaaagtctaaattgaagttcaagatggaaacaaaatgtcagaaccagacagttttgggtatgagattcttaaggatgagctgaggttgtaaacttataaggtaggctattagatcagaagcctggaaaattgggagtatgtattaggattggaaacagtgtttagagctgaccagagttaagatagtagtgttcatctttcaacttagctgctctggttatctcttcctgcgtaacaattatcccaagccttagtagcttaaagtgacaagaatcagctgggtgcaatggctcatacctgtaataacaatactttgggaggccaaggcaggaggattgcttgaggctgggagtttgaggccagcctgggcaacatagtgagaccccatatctacaaaaaaataaaagaattaaccaggtgtggtggcacacacctgtagtctcagctattcaggaagctgacatgggatgattgcttgagtccaggagttcaaggaagcagtgaactatgatcactgagatcataatcatcacagagtgtgagacccagtttcttaaaaaagaaagtgacaacattttgttaactttcctagttttactgggtcagggatttaatagaggtttacttggacagttctaaacattttatcaacttttctctctaatatctttatggttttttatgtaaaaaaattcaccaataggtggcaatgtaacactgaaaaataatttgcatttgttactattataatagcatgtgacaaaacctttatttgacctttcttccctaacttaccatttgttttgaggcatatttttctacttaatgtacttaaacaatctggtggagttttctaattcacattactgtttttagaagaatgttccacattttgtagcttgagaggacataatttttatgtgtgtgcatgaatgtgcatatgcacaggattaactcaaggtactgtttgctttaagcaataagatatatctatgtaattttataaaataatgacaggtttccatagtgtattgaaccatcttaagttaacagactcttttagtcaggcttgaatttttgaacagaagaaattttcttcaagtctttctctaaattcctgttcttctgctctccagagcctcatggctgccattccccctgtagtttctgtataattatttataagtgtaggtattttgaaaccctcctatctgatatatatatgtcattgtttgggaattaagttttctagaaagtatataaggtaacaaacatttcattttatgtaagtatgtatgtatgtatttagggggcagggagatggggatctcattctgttacccaggctggagtgcagtagcatgattatagctcactgtagcttcaaatcctgggctcaagtgatcctcccagttcagccttctgaggagctaagactacaggagtgtgccgccatgcccaactacatttttttttttttttttggtagagacagggtcttactgtgttgcccaggctggtctcgaactcctgacaacacctagataattatttggagatgaggatctcactatgttacccaagctggtctcgaactcctgacacacaactaattttttggagacgagggtctcgttatgttgcttaggttagtcttggcctcctggcctcaagcaatccttctgcctcagcctcctgagtagtagctggcattacaggtgtgagccaccaagtccagctaaaacttactcctttcgaacattaaaaatacttatttttaattttttatgttagtaaatgttatatacatttctatcttataattcatattctatttaatatgatgaataacatgtttaatatatgaataacaattttaactttttcattgactcagggttattaatgagtgcatttacttttatttttattttatttaatttttttttttgagacggagtctcactctgtcacccaggctggagcgcagtggcgcgatctcggctcactgcgagctccgcctcccgggttcacgccattctcctgcctcagcctcccgagtagctgggactacaggcgcctgccaccacgcctggctaatttttttttcttgtatttttttagtggaaacggggtttcaccgtgttagccaggatggtctctatctcctgacctcgtgatccgcccgtcttggcctgccaaagtgctgggattacaggcgtgagccaccgcgcctggcttacttttattcttaattcttctagttcttcagatatccgtactaaccatagggctaccactctccttccattgccatgccaacaaatagttcttttaagttaaagaaattataaaagtaatacatatccttaagcaaaataaaaacagaagaaaatgttgtatattgaaaagtaaaagttccctacctcctagtctcattattgtttcatttatatccgtataggaattttttgtgcttacagaagcatgtattctccttatttggtattgcaacatttaggtggtcctcaaagccaccctcaggcttggtaactcataagaaggactcacagaactcagaaaatccattagactcatggttatggtttattacagcaaaaatatacaaatgggatcataatatggataactattctgcaacacactcctttttatttagtaatatatttgtcatatctttcaaggtttgcacatagagatatacatcattttttcagattatttatttttctataagttattggggtacaggtggtatttggttacatgagtaagttctttagtggtgatttgtgagatcctggtgcatccatcacccgagcagtatatgctacaccatatatgttgtcttttatcccttgccctcctcctactcttaccccaaagtccccaaagtccgttgtgtcattcttatgcctttgtgtcctcatagcctagcttccacatatcagtgagaacatttgatgtttgcttttctattcctgagttacttcacttagaataatagtcccaagtctcatccaggtaattgcaaatactgttaattcattcctttttatggctgtgtagtattccatcatatatatatatatatatatatatatatatatatatatatatatatatatatatatgccacaatttctttatccactcattcattgatgggcatttgggctggttccacaattttgcaactgtgaattgtgctgctataaatatgcatgtgcaaatatcttttttgaataatgacttcttttcctctgggtagatacacagtagtgggattgctggatcaaattgtggttctacttttagttctttaaggaatctccacactgttttccatagcggctgtactagtttacattcctaccagcagtgtagaagtgttccctgattgctgcattcacaccaacatctactgttttttgattatggccatgcttgcaggagtaaggtggtatcacattgtgtttttgatttgcatttcactgatcattagtgatgttgagcattttttcatatgtttgttggctatttgcatatcttcttttgagaattgtctgttcatgttcttagcccactttgtggtaagattgtttggtttttttcttactgatttgtttgagttcattgtagattctggatattagtcctttgtcagatgtatagatagtgaagattttctcccactccgtgggttgtctgtttactctgctgactgttccttttgccatgcaaaagctctttagtttaattaggtcccggctatttatctttgtttttattgcatttgcttttgggttcttgaccatgaaatccttgactaagccaatgtctagaagggtttttccaatctcatcttctagaatttttatagtttcaggtcttaggtttaagtccttaatccatcatgaggtgatttttgtataagatgagagacgaagatgcagtttaattctcctacatgtgggtagccaattatcccagcaccatttgttgaaaagggtgtcttttccccactttatgtttttgtttgctttgtcgaagattagttggctctaagtatttgggtttatttctgagtcctctattctgttccattggtctgtgtgcttatttttataccagtaccaagcttttttggtgactgtggcctttacagaatagtttgaaatcaggtagtgtgatgcctccagatttgttctttttgcttagtcttgctttggctatgcgggctcttttttggttccatatgaattttagaattgttttttctaactctgaagaatgatggtgttattttgatggggattgcattgaatttgtagattgcttttggcagtatggtcattttcaccatattgattctacccattcatgagcatgggatgtgtttccatttgtttgtgtcgcctatgatttctttcagcagtgttttgtagttttccttgtagaggtcttttgactcctttgttaggtatattcctatctttcttgtttatttatttatttatgtatttatttatgcagctattgtaaaaggggttgagttcttgatttgattctccacttggttgctgttggtgtatagaagagctactgatttgtgtacattaatcttgtatccggaaaccttgctgaattcttttatcagttctaggagctttgtggaggagtccttagggttttcaaggtaaacgataatcgtcagcaaacagggacagtttgacttcctctttactgatttggattccctttatttctttttttctttttctttttctttttttgagatggagtctcgctctgtcgcccaggctggagtgcagtggtgcgatcttggctcactgcaagctccgcctcccgggttcacgccattctcctgcctcagcctcccgagtagctgggactacaggcaccggccaccacgcccagctaattttttttgtatttttagtagagacggggtttcactgtgttagccaggatggtctcgatctcctgacctcgtgatctgcccgctcagcctcccaaagtgctgggattacaggcgtgagccaccgcacccggcccagatcccctttatttctttcgtctgattgctctggctaggacttccagtactatgttgaagaggagtggtgagggtgggcatccttgtcttctttccgttctcagagggaatgctttcagcttttctccattcagtattatgttggctatgggtttgtcatagatggcttttattacattaagatatgtcccttgtatgtcgattttgctgagggttttaatcatatagggatgctggattttgtcgaatgctttttctgaatctattgagatgatcatgtgatttttgtttttaattctgtttatgtggtgtatcacatttatttacttgtatgtgttaaaccatccctgcatccctgatatgaaacccacttgatcatggtggattatctttttggcatgttgttggatttggctagctaatatttttgttaaggattttagcatctatgttcattgaggataatggtctgtagttttcttttttggtcgtgatctttcctggttttgctattacggtgatgaatagggatgaattagggagggttacttctttctctgtcttgtgggatagtgtcaaaaggattggtaccaatgctttgaatgtctggtagaattctgctgtgaattggtctggtcctggacttttttttcttggtaatttttaaattgccatttcagtctcgctgcttgttactggtctgttcggggtatcaaattcttcctgatttaagctaggagggttgtatttttccaggagtttatccacctcttgtaggttttctagtttatgtgcgtaaaggtattcataatagccttgaatgatcttttgtgtttcagtggtgtcagttgtactatctcctgtttcgtttctcagtgactttatttggattttctctcttcttttcttggttaatcttgctaatgttctatcaattttattttatcttttcaaggaactagcttattgtttcatttatcttttgtattttttgttttgttttgtttcaatttcatttagtactgctctgatcttggttatttcctttcttctgctgggtttgggtttgttttgtttttgtttctctagttcctagtgaccttagattgtctgtttgtgctctttcggactttttgatgtaggcgttcagggctatgaactttcctcttagcactgcctcagctgtatcccagaggttttgataggctgtgtcattattgtattcaggtgggtgtattcagctcccacgcaaaccgaaaggctggtcttgtctcactcccatggtgtaccgcaccccctacccctccagcgccgaaacagccccgagtgtgtttgagtctggcttgaaaacttgtccccggctttccacctccaagctgcaaaagaaaagggctttagttcatcccccacctgtgaagtctgcaatctggatttgcgccctccccggagttctggccaggaggcttcttgccccattcaaattgttaaaaagttcagctagagaagtccttctccctgtggagttttaccctctgctctgatggccatcctcctgatggatccctgtgttgccaggcaggaatgggctgcttggggatccagcaagctcccagtgcctttctgctacttcctctacccctgtatttcgctcggcttggctttctaacttgactcaactccagctaaagtcaggaatttctccagcaaacagaccttcagcttctccagtgggggtgtgtctacctcattaattttaactctgtgacttattccattatcccatggtttaagccccatttaccagatcccctctgacaaatttttaggttgttttcaattttcctccgtaacaaaccgtgctgcagagaacattcttttatgtatctttgggtgcctgtggaagagtatctttgggaccaattcctagaaattgaaatatgggtcaaagggtttacacattttgcattttgataattattgtaaaattgacttccaaaatttttgatactaatttagactcccacagagtgtatgagagtacccatttcaacgcatcctcatggataccgaatattaagtggtaaaaccatttaaatcactgctgtaaaaggcatttttttctctgtagaaaatgttttcagattcaaagtaagggatgcataatttttaaatacaaagctagagattttagttttacaaaatattagtttttttttgttgttgttgttgttgtttttttttactatttgtgtagccccaactgaatactgaataacagttgttattatttgatctgtcatactgaagctgttacttttgaagtcatgtaaaagttgcattttctctaatgcttaccagatgggagatagtttgacagctgctttgttgaaatcagcaattaagtaatatgtgtgtatatgttaaccagcaagcaaatagagtatgtattatgccctggaaaaaatatatatcagctgggcgtggtggcttatgccggtaatcccagcacttgggaggccaaggcgggcagatcacttgaggtcaggagtttgagaccagcctgaccaacatggtgaaacctcgtctttactaaaaatgcaaaaaaattagccaggcatggtggcgggcacctgtaatcccagctactcgataggctgaggcaggagaattacctgaacccgggaggtggaggttgcagtgacccaagattgtgccactgcattccagcctgggcgacagagggagactccatctcaaataaaaaagaaaagaaaagaaaaaaaatatgtatgttattttaacaaataagcctttagtatttcttctaaaagagtccacagatgctgtggaacatatttgttcaggtacaaatgcattccatagtaataaaatgttgttattttttatattgcaatcccaaatattttctgagtttaagcttttaagatcttttatagcttaaaagctgttctccctaccctccatacccatgtaacaaccagtttcactttcttttatcagttaaaatttttccccagcaatgaatgttagttatttggactaagtgggaagtattatatggtctgttgtgacatatattattcttaaagtgtaacttttgaaatttgtcttttcatgtatatatacattgctcttagtctttgctgatagtttaagttgatatactaatgctgaaatagctttaaagacttttcaattttaaaagacatttttaaaaataggctatgtctgttgggggaactttttccctcttgttgtttttatttttgcttatttttgtaaactcagaggaccctgactaccatttatagtggtatttcaatgctctaccatttggatataattaatatagttagtgctgtattaaccaaatacgggagcagataaaatatgtttatacttacaacgatgtcattttatcttcctgtaagatcagcactttaaagggattaactttatttacttaaatggatcacattttcagttttattatatattaattgtgttatttttctgtttatttttgtaggccctgattttgttgtttgtgatgaaggccatattctaaaaaatgaagcatctgctgtttctaaagctatgaattctatacgatcaaggaggaggattattttaacaggaacaccacttcaaaataacctaattgagtgtgagttaatatctctgattatgcagtagaatattggtatttcctcagatatatttttgtaacgttaccatttacctttcttctacttattctagtatagtcctagaccatgatctacataggttcatcttagtctgctgtgaaagaataacatacttttcaaatgagatgctttataaatgagtggtaaaatacagttaagagatacgctattgtgaatgttcatatataaatatggaatgtgaattattgcaagagtatcagaagtcttaatgattgctttagaaagtacataagcatatgtgattactccagataattttaaggggatattccagttttggggcatgtactgtcaagaaatcagaaagaaatgggaactgtgaacattttagtaaagtggagatgggagaaggagaggtttgctgaatccatggcaggacagtttgctgaggctaaaggtagttgatgtgaacctagggaaatgacttgtgaattaccctcattttcgtatgtctgtggtgacactaaagaagggaacatgagattattcagcaagtaactaattgaaatttcctgttataatctctcactttttttctttttcccactgtaatggctttttgttatttttctctgtgttacattcctttagtgtatttatggtaactttttgctattttattatttgtaatactagtcatttcactttagcctatactttatgtttgtttttatctgttccagttttcctcttttctattctgttaccctatttatagaaatgctgtttcatattgtggtcctatatagtatgggacaagtgatggctctgttaatttttacaaaatgggttagtcttacaaaatacattagtaattaattttttttttttactatttgtgtagccccaactgaatactgaataacagttgttattatttgatctctcaaatattatttggttattctggaaatgaatcagttaatataaattaacttgcttagtagcttattacctcctatttattgttttgacttagtatctcctttcttcacaagatagcctcactgaccataaaatcatggttagattaatggaccacttgttttatacttcatatctcttataaagaataatagtgagtttgaataaactgtccttaggtatttttaaaaaacgttcatgtctagtatttagggatggtttttacttcaattttctctctcgttttggtaattcacttgtagatcagacttataaccatgtttattctatacttagcttgatattctttctttatagcttaattctaatgcatgtgtttttgacatgagcatttcattggggaatttttctaagtctttttaacgattgttaatgttgttaatgaataatgtcttctctcttagatcattgtatggttaattttatcaaggaaaatttacttggatccattaaggagttcaggaatagatttataaatccaattcaaaatggtcagtgtgcagattctaccatggtagatgtcagagtgatgaaaaaacgtgctcacattctctatgagatgttagctggatgtgttcaggtacaaatatgttccatagtaataaaatattcttacttttttatataacaatcccaacatattttctgagcttaaagtttaataattttgtgttttctttcccgctctttcagtagatagttttacagttatatctccttgcgttgtcttaaaaaatttctgctgcattcaacttttaaaaaagaagttccgctgagtttaaaacatagttgattcatttgccaggtgtaaagcctcatatcttattatgttaatgtttagatttttcatccttaagatagggagttccttaagaggaacatagctactatgatgaagttcctatgctcaccctaattctgtagtacagtattataaatctcacttttttgaaatggttataggagaggccagtatgaattaagagaggagccacttttaaagtaatcctggagaaacagttttgttactttcaagtatatataataacctgaacagactagtggtgtcgtttacatacagattttcagtgaatctatattaatgaatggataagtgtctagagactgagctggcagttaatagatctcaagatacgcactttctctgtagatgttaggtactgatgatagcctcaaagatgttttaacaaatgagacaggctattcttttggttggatatacagtttgccctccatatctgcaggttctgcatccatggattcaacctaccatggatcaaaaatatttttttaaaaaatagataaaatggacagaggctaggtacagtggtgcacacctgtaattccagcactttaagaggccaaggtgggaggatcacttgagcccaggagttcaaggctgcagtgagctaaaatcatgccactacactccaggctgggtgacagagcaagaccctgtctctaaaaaaagttttaaaaaattagccagccacggtggtgcgcacctatagtctctgtcacttgggaggctgaggcaggaggattgcttgagcccaggaattcaagactgcaaggagctaagattatgccactgtacttcagcctcaatgatagagtaagaccctgtctcttaaaaaaaagaaagaaaataattaagaaaaaaatggatgattgtgtctgtactgaacatgtacagacttttttcttgtcattatttcctaaacaatagagtatagcaactatttacatagtatttgtattgtgtgaggcattataagtaatctggggatgatttaaagtatatgggaggatgtttatatgttatatgcaaacactacattatttatataagtgacttgaactttcatggattttgctatctgtggaggtggggtgggttctggaaccagtctcccatagatactgaggcatgactgtacttgccatcattataaggagtagttgttccgtttggtcaggttggctacatgtgctagcaagtaccctgtttctgtattgctgctactacccaggcagcatttttctttctggtttaaggagtaatttctatttagcacattggtgttctgtttttctactcttacaataaaatggtttcaagagtgcttgtagaggggttgctttcttaattgggcaaatattccctctaaaattatatgttattgtttgacatattagcatatctttctaagaagccaactcagactgcattagactttgattcctaggttttattacatgattaaagcaaggcattttgctcacactacctactacatcccctccataccttttgttatttttttttctgtacagagaagactattttgaaaacttaaattgctcacttggtaatgtgattgcttcaatttaaaacctacctggtgtgttgcagtgtctttttaccagtgtaccatattgtatagtcatatgaaatacattgtgtagataattgtgggtttagaaagggtaaatatatttaagaaaatgttttcttatatgtttagtgcctatttatttatgtgtatatttcagttataagcaatgagaacttgtagttcattcctgttaaatatttagattaattttcattctctttcttgttaattacagaggaaagattatacagcattaacaaaattcttgcctccaaaacacgaatatgtgttagctgtgagaatgacttctattcagtgcaagctctatcagtactacttagatcacttaacaggtaaacaatacaccttgttgatttcatcttctctataaagacattctttttccaaagaagattatttcagtcatcttactatgtctgttgttctttttcagttttgcatttgaataaaatgggtatgcttaaaagcataaaatatttctaattaaaacactgatgctgtcaaaattaaaatcaagaagcaaattgatgaaaaagatatacagcacatatgaataatgcccttaatttgtaaagagcttttatttcagaaaaattatgaatgtgaataaatccataaaagaagatatacaaaattccagagtatttttttaaaaagtatttacccacattaataataaaaggtgtataagttaaattcatgagtttgtttctcagttatttaattaacaaaggttgaaggcaaaagtaaaatagaaggcaaggcatgtagtatgcctaaaatacaccaaaatgctaacagaagttgttttctgggtgcttttgttatgaagaccttctagtttatttcttgtatttttctatgctttaaaataatacaatgaatagtttttgttttaccatcaataagctttttgtgtgtgtgtgtgtgtctgtgtctctctgtgcctgaagatgtctgtcttcacacaacaaaacctaatctttggactggagtgagatttcttacttgttgatcacttattctggtacctttccccaaatgatattactgatttaattaggagatacaggttagagggtgctctttggccaattgtgaatacagtaattgatcaaaaaaaaaaggaggatggaagtacgtacacacatattaacatgataattatagctaaagtggtactcttttttaatagcagtgcatcctagagagtaaaatatgatggttctcaagaaacattctgctggggaaaacagtgtttgaatcttagtattttatggaactgcttttttgcttttataaaagcaatttttgtattgacttttggaagaaaatcagttccaataaagcacacattttcatttgtatatctgtcagaagctgatagatttactatactattctgttttgaataataaaaattgcaggcataattaaataaccaaatagttatcccaatgagagagttgctgtatagtttaagagacagatgttcagatctgtctttaattaatctctgagtaataaggagtaataaatttggtcatttaatattttttccttttaaaatgttttatattagggaaaatgctcacaatagtgttttcaggttttatagaattagttgtctttaataaccaatcataggctgagcatggtggttcatgcctgtaatcacagcactttgggaggctgaagtgggaggattacttgagctcaggagttggggactagcctgggcagcatagtgaaaccttatctccacgaaaaatcaaaaaattagccgggtatggtaatgcacacctgtagtcccagctacttgggaggctgaggcgggaggtttgcttgatcctgagaggtcaaggctgcagtgagacatgattgtgccactggatttcagcctaggcaacagagcactaccttgtctcaacaacaacaacaacaaccaccaccaccaatcacaaatggtaacagctcaggtataaatgttaagctctactcttttgagttgacctcatggaggtagatagaatgatagatacccgaatctgggaagtatgtgtgtgttgagggagggatagagagaggttggttaatgggtacagacacatagttagatagaaggaataagttctactgtttgatagcagaatggggtgactgtagttaacaacagtgcattttatatttcaaaatagctggaagagaggactcgaaatgtttccaacatataaaaatgataaatactcaaggtgatggataccctgaataccctgacttgatcattgcatattctatgcatgtaacaaaatatcacatgcactcccaaaatatgtaaaaataatatgtatcaatttttaaaaattttaaaaaaacactctttttgagagcaatgcaattatttaagaatttagggggctttgctttattctttgtgactatcattgataggagtaaatatctaaagcactaattgccatagctaaaatctaaaagatatgattgttaaattatcacctggtaccgtgaatctttaagttttagggtgtggggttttccccttaccaaatgcaatattacccatagagtagaataacctgagttaaatagcctctttgaaaaacattcataaaaggccaagtgggttatatgaatggctactctgtcttgattctcagtacaaatcttcacagtatttctcttgaaatatcacctgcctattttacttgcatttaaaatgtttggtattttgtctgttaaatattccagaaattttttgtttctacattaggcttttttagactgtggttacttttaagaagttcacccaaattttgtttttaacattagcagcagtttcatattaattttagtgataatttataatatttgcagaatgaaagtcctaagggactggcttttaaagaatattgaggaaatctaaaatcctcttaatttttcttagttttctttttttcagtgtaattctatggtttgccttttattgtcaggtatcagaagtttataataacatgtaagcctctgcaattcagtaaacacttaaggttttataagcatgtagatacttaattttttaataactaaatattagtctggctttaaacttaaaatccacacactgtcttattttgacaactgtgcaaaaaatagaacacaggaaaagatagcccatggaatgtgagaaaatattgcaaaacatatatctgataagggattcacatgcagaatatagttgtcccttggtatatgtgggggattggttctaggacctgcctgtgtataccaaaatttgctcatacacaaatcccgcagaacctgcatatatgaaaagtcaaacataggtttcacattctgtgaatactgtattttcaatcaacatttggttgaaacaaagtctgtataagtggacccgtgtggtttatacctttggtgcgcaagggtcaactgtatgtaaagaactcctacaactcaacaacaaagaaacagtctgtttcaaaaagaagcaaaggatttgaatagacatttctctaaagaagatatacaaatggccaataagcacataaaaaaatgctcaacatatctactcattagaggaatgcaaatcaaacgtacagtgagataccatttcacacccattgtggtggccattataaaaaaaaaaaaggaaaataagtgcttatgaggatgtggagaaagtggaaccctgtacattgctagtaggaatgtcagatgatgtggctactatggaaaaacattgtagtaactcagaaagttagacatagaattaccatttgatctaatagttccacttataggtatacccagaagaattgaaagcaggaactcaagcagatactgggacacttatgtttatagttgcatcattcataatggcaaaaaaaggtggaagcaacccaaatgtccattgatggatgaatgcataaacaaaatgtggtatggacatacttcagtggaatattagccttataaaggggggaaattccgacatttactaccacatagatgaagcttgaagacattaatgctaagtgaaatatatcagacacaaaaaggcaaatactgtatacttctgcttaaaggtacctagagtagccaaactctacgagtagaaagtagaatggtgattaccaggttctgggggacgaagggaatgggaagttactgttaatgggtactaagttctgtttggaatgatgaaaaagttctagaaatagagagtgatgatgtttgtacaacattgtgattatacttaatgccactcaattgtgtacttaaaaggtagttaaaacagtaaattttttattttattttatttttattttactttaagttctgggatacatgtgcagaacgtgcaggtttgttacgtaagtatacatgtgccatggtggtgtgctgtacctatcaagccatcatctagttttcaagccccacatggattaggtatttgtcctaatgctcttcctccccttgcccctcaccccccaacaggccccagtatgtgatgtgcccctccctgtgtccatgtgttctcatttaaaacagtaaatttttaaaatgtatattttaccagaatttaaaaagtacccccaaatggagcacagtaatatgcttttgtctctaaaaatgcatggacccaagtgccactctttagagattgattcaaaaggtctggagtagggccgatgcatctacagttttatgagccctacaggtgattttgatggaccatcagcttaagaaccattgctccaaatttttttctttggtaaggggtgagctgagacctgagatgagtgaactagacaaggggaacatggagaaatgacactgaaatgttaactttgatggttttctctaagtggtggaaatattaattcttttgtattttacttgttatatacatttctgcaaaattacaaaatccaagaaatatacatatatgtaaaacttccataatcagaaaaatactttaaagtttcattttgtttttaattgacacatggtaattgtacatattaatgggcacagagtgatattttgatacatgtatacattgtgtagtgataaaattagggtaatttagcataactatcacttcaaacacttgtcatttctttgtggtgagaacattcaaaattctcttctagctgttttttaaaattatatttcttttaattaaaaatatttatttaaacattttttatatagagagatggggtcttgctatgttgcccaggctcgtcttgaacttctgggctcaagtgataccccatcacagcctcccaaagtgctgggattacaggtgtgagccaccatgcttgcatgaaatagcctcatctggctatttcaataagttattaagttaaatttagtgtttaaaaatattatgactaacattggaatagtgtacttcaagctgggaaaagaatgtataatagtaatttccaaatgtggttgtactgtcagaatcaccattaaatgcagaacactactaaatttacaaagataaaatgatactaagtgtttctgaggctatagagaaatgagccctcttgatggtaacataaattggacagtaatttggaaagggacgtcaaaattaatttcaattgtatgcttttttccaaaggaaatggtcagaaatgtatgcagagatttatattaaaagatgttaatctcagggtttgtttcaaaacttagttttctggctacagaaatagcaatgtgtgttcattgtgaaatatatatgaaatattgaaaggcactaatacaataaaaactacctataatcttataaactagaagttggaactgctagttatttaatatttaatatcttgctttccagtttttaaaatgtatgtgtgacacttaaatgtcataaacacacactacataaacacacaatacatatacattgtgtttatatactatatatatatatttatttatttattatttttttaatggctggaattatattatccagcttgtgacctaaagtgaactgttacttgttgtggcattatttataataatgaaaaattgaaaattaacccaaatcctcaacttttggggatagtttatattatggtatatcaccataatctaataccatgcaggaagatacattaaatattataacatagaatattgtgtgttaatatttaggaatatatagaatatattatgtaataaagatgaaatagtacccatttctgtgaaataaaaaggatatgtatgaaaatgcatagcaatgtgatcaaaaagataatgccacaaaatattttttagtgtacactctaatattttcaaattagtagaattgtgtttataatgtgtattaaattacctcttcaaattggctctatccccttctctctgttttgatatgacatttatcagctcttctgactccatcaaccacgtctcaagatctcttccacattcctgatcattttaactctgctgcattaagttagtatattctgacatatcttccagctaagtagtttttgtctttggatgtgtgtcttatgctattaagaggaatttaattgaaatgtaaaactcaatggctttctcctgaggtcaggaacaaaacaaggatgtcacttttgcttcttatatttaacattttctagaggttctggccaggacaattataccagaaaactaaaagtatgccacagtgtcatggaaggggtaaaactatttcagtttgcaggtgacatgatattgtatagagaaaaaatttattgttttaagttttgtgggtacatagtaggtatatatatttatggggtacatgagatattttaatgcagccatgcaatgcataatcacatcagggtaaatgaggtatccatctcaagcattcatccttaaatgacaaacaagtcatttatattattttatttattttaaagtgtacagcaaattattgttgcctgtagtcaccctgttctataaaatattagctcttattcattctacctaactatatttttgtacctaatgtccatctctcctttccccctgccctactacccttcgcagcctctattaactgctgttctacattctatctctgtgagttcagttgttttaaattttagctcctggacgggtatggtggctcatgcctgtaatcccagcactttgggaggccagggcaggtggatggcttaagggcaggagttcaagaccagcctagccaacatggtgaaaccctgtctataaaaaaaaatacaaaagtcgaggtggcatgtgcctgtaatcctggctactcaggaggctgaagcaggagaatcgcttgaatctgggaggcagaggctgcagcaagctttggtcatgccactgcattccagcctttgtgacagagctgcctcaaaacaaaaaacaaaaaacttagctccccaaaataagtgagaatatgtaaaatttgtctttcgtgctgtttcatgttgtttgaaatgacaggatctcattctcttttatggctgcatagtactccattgtgtacatgtaccatattttctttattcattcatctgttgataaactttgggttgcttccaaatcttggctgttataaacagtgctgcaacaaacataggagtgccaatctcttcaatatactgattttctttcttctgagtatatatccagctgtgggattgcaggatcatatggtagctctatttttgcttttttgaggaacctccaaacttttctccatagtggttgtactaatttacattcccaacagcagtgtatgtgggttcccttttctccacctcctcgccagcgtttgtctgtcttttggataaaagccactttaaagggtgagatgatatcttattgtagttttgattagcatttctcagatgaccaatgatgttgagtaccttttcttatacctattttccatttgcatgtcttcttttgagaaatgtctactcagatcttttgccaattttttaattaggttgttagaatttttttccatttgacttgtttcagctccttatatattgtggtcattaatcccttgtcagatgcgtagtttgcaggtattttctcccatcctgtgggttgtctcttcactttgttggattgtattctttcctatgcagaagctttttaacttgatatgatcccatctgtccatttttttgtgttggttgcttctgcttttgaggtattactcaaatctttgcccagtccaatgtcctgtagagtttctccagtggtttctcttagtaattccatagtttaaggtattagatttaagtttttaatccatttgaatatgatttttatatatggcaatagataggtgtccagattcattcttctgcgtatggatatccagttttcccagcaccacttactgaagagactatcctttccccagtgcatgttcatggcacctgtgtagagtatgcgttcactgtaggtgtgtgaacttgtttctgggttaattattctgtttcattggcctatgtgtcttttttttttttttttttgagacggggtctcgctctgttgtccaggctggagtgcagtggtgcaatctcggctcactgcaagctctgcctcctgggttcacgccattcttctgcctcagcctcccaagtagctgggactacaggcacccaccactgtgctggactaatttttcgtatttttagtagaggcggggtttcactgtggtctcgatctcctgacctcatgatccgcctgcctcggcctcccaaagtgctgggattacaggtgtgagccactgtgcccggccggcctatgtgtcttttttatgctagtacgatgctgttttgattacagtagttctatagtatactttgaagttatgtaatgtgattcctccagttttgttcatttagctcaggatagctttcactattctgggtctttcgtggttccttataaatttcaggatagttttttcaatttctgtgaagaatatcattggtatttatttcatagggattgctttcaatatgaagattgctttaggtggtgtggacattttaacaatattgattcttttgatccatgaacatggaatgtctttacattttttggtgtcctcttccatttcttgcatcaatgttttatatttttcattgtagagttcttttacttcttttttttttttttttttttttgagacagagtctctgtcacccaggctggggtgcagtggtgcgatcttggctctctgcaacctccacctcctggtttcagtgattctcatgcctcagcctcccaaatagctgggattacacgtgtgcaccaccatgctccgctaatttttgtatttttagtagaggcagggttttgtcatgttggccagcctgctcttgaattcctggcctcaagtgatccacccgcattgatctcccaaagtgctgggattacaggcatgagccaccgtgccctgcctcgcttcttaaattcctgaatattttgttttatttgtagctattgtaaataagattactttcttgatttcttcaaattgttcactgttggcatatagaaatgccaatgatttttgtatattgattttgttacttgccactttactgaaattgctgatcagttcgaatagttttttggtggagtctttagttttttttctttcccaaatataaggtcatgtcatctgcaaacaaagataatttgacttcttcctttcccatttgtatgcgctttatttctttatcttctttgattactcttactaggacttccagtatgatgttgaataacagtaatgaaagtgggcatccttgttgtgttcaagatcttagagcaaagactttcagttttttcccattcagtatgatactagctgtcggtatgtcgtatatagctttaatatgttgaagtatgttcctctgatacccagttttttagggctttttattatgaagggatgttgaatattatcacatgtgcttccagcatgaattgaaatgattatatggtttttatcctttattttgttcataacgatgtatcacattgattgatttccatatatgtgtgtgtgtatatttatatgtgtgtatgtatgtatttttgtgtgtgtgtgggtttttttttttttttttgtagagatgaggtctctatgttgcccaggcttgtcttgaactcctgggctcaagggatcctccttcttcggcctcccgaagtgctgggattacaggtgtgagccatcacactcagctgatttccataaactgagccatcgttgcatccctaggataaatcccacttggtcatgatgaatgacctttttaatgtgttgttcaatttgttttgctagtattttgttgaggttttttgtatgaatgatcatcaggaatattggcctgtagttttctttttttgatgtgtccttgtctggttttggtatcattgtaatactggtctcagaaagaatttggaagtattccttctctattttgcagaatagtttgaggaggattggaattagtacttcttggaatgtttggtaaaattcagcagtgaaggtattaggtacctggcttttcattttttaatttttctttgggggatggggttggggctttacatgccataatatgtttattttattttattttacattttcattttaggttcaggggtacatgtgcacataaattggggtaaatttacccatacatgtacccatgaacctaaaatgaaaattctttaggtaaattggggtctctaggttttctttgctttggagactttttattattactttgatctcattacttgttattggtctgttcaggttttggatttcttcctggttcaatcttagtagattgcatgtgtctaggaatttatccatttcttctaggttttccaatttattggcatatagttggtcatagtagcctctaatggtcatttaaatttctgtggtatcagttttaatgtctccttttccatttctgatttcatttatttgggtattctctcttttttttcataagtagtctgactaaaagtttgttgagtttatcttttcaaaaaaccaagtgtttgtttcattgatcttttctacttttctacttttaaactttttgatgtgttgttgaattaggttagtattttattgagggttttaatatctatgttcatcagtgatattggcctatggttttcttttctttcagcatctttgtctgcctttggtatcagggtgatgcttacctcacaaaaagagtttggaagtatttcctgtaattctgttttttggaagagtttaagaattggtattcatggttttttgaatgtttggtagaattcagttttgaagctatctggttctgggtgatttttgttgggaggtttttttttattactacttatttctttttcttaattctatttttaatttaattattttgttttgttttatttgagacagagtattgctccatcacccaggctggagtgcagtggtgcgatctcagctcactgcaacctctgcctcccaggttcaagcagttctcctgcctcagcctcccaagtagctgggattacaggcgcccaccaccatgcttggctaattttttgtatttttagtagagacagggtttcgccatgttggccaggctgttctcgaactcctgacctcaggtgatccacctgccttggcctcccaaagttctgggattacagacgtgagccatcttaattttattcgtataaatttatggggtacatgtgtaattttgttacatggatatattatagtggtgaagtcagggcttttagtgtatacacagaataatgtacattctacccattaagtagtttctcattcactcttctcgtttcccccgacccttccaagtctccattgtctgtcattccacactctacatccatgtgttcacattatttagccccacttataagggagaacatgacactatttatctttctgtgtctcaattgtttcacttaagataatggcctccagttccatccatgttactgcagaagacatgcttttgttcttttttgtggccaaatagtattccactgtgtatatataccacgtgttctttgttcatcttttgatagacacttaggttgatttcatagctttgctattgtgaatagtgctacaataaacatgtaagtgcaagtatctttttttttatgtttttgatataatgatttctttctcttttggtagatacctagtagtgggattgctggatcaaatgttagttctatttttagttctttgagtaatctctgtactgtttttcatggagtttgtgctaatttacattcccaccaatagtgtaaacatattctctttcctccgcatctttgccaacatttattttttgactttttaataatagccattctaactggggaagatatgtcattgtggttttgatttgcatttttctgacgtttagtgatgttgagaattttttcatatgcttgttggccatttgttatatcttcttttgaaaaatgtctatttatgtcttttgcccactttttaatggaattatttgttttgttttgtgttgttgtttgagttccttgtaaattctagatatcagtcccctgttggatgtctagtttggaaatattttctcccattctgcagattgtttgttcactcagttaattatttcttttgctgctttttatttaagtcccatttgtctgtttttgttttagttgctttgcttttgaggtcgtagtgatgaattatttgcctaggccaatgtccagaatgattttctccaggtttactttctctaggttacttctctaggtttacttctagtatttttattgtttcagctcttacatttaagtctttaatctatcttgagttgatttttgcatatggttagagataatggtccagtttcattcttctgcatatgggaatccagttttcttagaaccatttattgaaaagagtgtcctttccccagtatatgtttttattgactttgtcaaaggtcagttgactgtcagtatgtgtctctatttctgtgttctgtattctgttccattgatctttgtgtctatttttataccagtaccatgctgttttggttactgtagccttgtagggtaatatgaagtcaagtaatgtgataccttcagctttgttcaagaattaatattattggccaggcacggtagctcacatctgtaatcctagtactttgggaggccgaggcaggcggatcacttgaggccaggagttcaagaccaacctggccaacatggcaaaaccctgtccctactaaaaatacaaaaaaaaaaaaaaattagccgagcatggtggcaggcacctgtagtctcagctactcgggaggctgaggcaggagaatggcttgaacccgggaggcggagattgcagtgagccgagattgcgccactgtactccagcctaggcaacaagagcgaaactccatctaggaaaaaaaaaaagaattatattattaaaatgaccatactacccaaagcaatctacagattcaaacctaactctatcaaaataccaatgtcattttttatagaattagaaaaaacaatcctaaaagtcatatggaaccaaataagagcccaagtagccttggtctctttatttgtaattggtctgttgaggctatttcttttttattcagtgttgatatattgtatgtttgtaggaatttatttcctgtagattattcaatttcttggtatataatttttcatactagttctttatgatccttctttatttctgaggcattggttgtaatgtcttcatgtctattttatttatttgagtcctctctcttttttcttaataggctaagggtttgttggcttggcttatttttttcaaaaaaacaacttttccccctatatcttatctattatttgatttactaatgctttgatccttatttccttccttctgcaagctttgggtttagcttattctttttctagctcctagaggtataaagataggttccttatttgagatctttttttgacataggcatttatcattaaaacattcctcttcttactaaagtattttctttaaccacattcaaatgaaattagaaaccaataactgaaggaaagtttaaaaatttacaaatacatgtaaattaaacaacatatatctaaataaccaatggaccaaagaagaaatcacaagggaaattaaaaaatgcttagaggttaatgaaaacaaaaacacagggtactagaatatgggatataacttaagtaatacttagagagaaatgtatggtggtaaatacctgtattaaaaaagaagaaagatctcaaatttataattcaaccttctactttgcaaattaaacccaaaacaagcagaaggaaggaaataataaagaaatgtgaggaacagaaaaacagtagggaaaatcattgaaaccaaaggtaggttctttgaaaagattaacataatcgacaaaccttccttcacttacaaagtaatgaaaaaaaaaggcacagctaaaataagtgccgactacagtgggtcatgcctattaatcccagcctttcgggaggccaaggcagaacaatcctttaaagctaggagtttaagaacagcctggtcaacaaagcgagaccctgtctctacaaaaaataaaaaaaagaattagccaaacctggtggcatgtgcctgtagtaccagcttttgggaggctgaggcaggcagatggcttgagcccgcaggagttcgaggttgcagtaagctatgattgcatcactgcactccagcctgggtgacagtgtaagaccctgtatcaaaaaaacaaaaacaagaacagaaagaaaaatgacctaaagtaaggaatgaaagagtatcactactaaccttacagaaataaaaagaattataagtgaatattgtgaacagctgtatgccgagaaattatatacctcattttcatagcagtgatttctgttacacaatggaaataacctctatcaggcaaaataatactcagcagatttttatgcattattaatgtttcatatcactactaaattttctctcactcgtggaggcaaaatttgctaattatttaaacaacttacatagtttaaaaccgtggataggaaaatatgttattgcttaaatgctgttttttccttttaatcagttttgttcttttgcatattaccttcttgataattttattatattaatgaaacgtgcattcattttctttatgttttataggaaaatgataattctgttgaaattattctggatagagcagagctaatatttacattttatacatcaaaaacataatttttggaaggtcttttttttttttttttaagagacaaggttttgctctttcatccaggcgggagtgctgtggtgcaatcatagttcattgtaacctcaaactcctgggctcaagtgattctcccacttcagcctcccaagtatctagggtatctagggctataggtgtgtgccatcatacctggctaatgtttttgtttttcttggtggagacagagtctcgctgtgttgtccaggcctgtcttgaactcctggcctcaagcggtcctcctgcctcggcctcccaaagtgctgtgattacaggtgtgagctactgtcacttgcctagaagtaatttttttgagtgagcatagttggcgagagtcagtaaaggactatctgcatggagcaaagtttatttataacaggagtttgtaatctagggtccatggatagaatttaggggattatatgtacctggataagaaaaaaattatatattgatttcccttaacctctagctaaagcagcagcatttttcccagtgatgaatagaggcaacaatctatagtagtgttagtgataaccatgactttgttaccaatagaaatcagaaatatttttacatgttgttcctgatacctcaaaatcatttatgtttatcaatacttcagaattttaggtatttattaaacctgtgcatattttgttacttaatgcattaattttaaaaagcacatatttctgtagtacaaattctttaatattttgataatttctatatgatgggtttcttttgtaatcctatttgttttatgtgtttcaaaacgatattccaagagaatttataagcttctctacactgccaaaagtgtttatgtcacaagtaagattaaaactcctaatctagaaacttggttgatatagacaatttttgtgtctttaaccatatttcttttgatcaggtgtgggcaataatagtgaaggtggaagaggaaaggcaggtgcaaagcttttccaagattttcagatgttaagtagaatatggactcatccttggtgtttgcagctagactacattagcaaagaaaataaggtaagtcaggtaacttagtttaaaagcatctattggaagcagaataaacttagacaaaaaattgacctacagactgtatattcaaattttctattgctttgttctattctatgtcttatttctaatttctatatgtcttgcatgtattatgattataggagtgttaaatgttattttattgagcccattttaaaaaactttttattttgaaataattttatacttatagaaaagttgcaaaaatagttctgagaattcccctatacctttgacccagtttcttctaatatcagcatgttgcattagtatagtaaagttatcaaaactaagaaattaactttggtacaatactattaactaaatggcagactttatttggatttcttcaatgtttttacttatgtcttttttgttttccatgatccaatctaggacctcccattgcatttagtaagcatatctgtcctgtcttctttgtctactaaaatctgtaatagttcctcagtccttcctcagctcgtgccaattaacttattcttaaatgaacatcaatataatttccagtgtaagttgagatattctattaaaatagtggtcatttttttttctctagggttattttgatgaagacagtatggatgaatttatagcctcagattctgatgaaacctccatgagtttaagctccgatgattatacaaagtaaatcgaatactttttcgtgccatcctgtattgacaaagttaaaacccctacttgctgattgacctcttataattgacgtttacatctttcctatgcttttctaacaatctgaatgtgtttttttgtttgtttgtttgtttgtttttagaaagaagaaaaaagggaaaaaggggaaaaaagatagtagctcaagtggaagtggcagtgacaatgatgttgaagtgattaaggtctggaattcaagatctcggggaggtggtgaaggaaatgtggatgaaacaggaaacaatccttctgtttctttaaaactggaagaaagtgagtctaatgaatgttgcctttatcatggaacagtaatttggaaaatgtcatgtcgttagtccttttttcagtcacttacctgactaattgactcaaaggaatctttcctcaattgatgagtctaatcaagtactcataattacagtaaatatctgatgaatctttaattataagcaagctactctgtgctctctggtatttgggggaaaggtaaaaagaaaaactaatgtttatttacttgtatatacctaaactctattattttcactacatgtgttagctaactgaattcttgagcaggcttgcaatgtagttgatagttttaaaaatgagtaggagaactggtattcagacctaaaaatgtctaatctcaaagccaccatgatattttcacttaactgtatgggaataaatggaaacatttcagataatcaagtgtgattgtagttaatttttagtcagtaatatacagtaaaactaattttaatcatttagtgtttttcctttgtgattcttcataatctgcaattatctactttaggtttcctgtgtattatgtacagtttctatcacctcttttgttttctttctgtctctcttgtgcatgaaagtgaagtcttagattgaactctgcagtggtttaagttgtctttacctatatgtaagttgaaggattagtgttgagacactgtatcctactagtgcagcctgtatgcctaggagcttaaaaactgggaccaaatgtctgcctatttgaaatagcagattatgaagagagaacaaggtagtggctctaaatatttggcatttgggagttgtggagcaaagcagttaactgtctataaggagaagagagttgtgggggccacctaggttagtgatcctgtgatcagataaacttggctggtctcaggcctacagctgaaataacttggtgattaattattttaattttatttttataatttcaacttttatattcgggggtacatatgctagttgattaacatgggtatattgcatgatgctcagctttggggtatgattgatcccatccccaggtactgaacatagtactcagtagttagtttttcagtctttgccccctttctctctccccactctagtagtcctccgtgtctgtcgctctcctctttatatccatgtgtacccagtgtttagctcttacttatatgtaagaacacgccgtatttggttttctgtttctgtgttaattcacttagtatataatggcctccagctgtatccctgttgctgcaaaggacatgattttgttctttattgtggctgtgtatattctatggtttatatgtaccacattttctctatccaatccactgttgatgggcacctgggttgattccatgtttttgctgttgtgaatagtgctgtaataaatatatgagtgcatgtgtctttctggcagatttattttccttttgttttatacttgtaatgagattgctgggtcaaattgcagttctgctttaagttctttgagaaatctctaaactgccttccataggcggtgaactaatttacaatcccaccaacataaatgttcccttttctttgccccttctccagcatctgctgttttttgactttttaataatagccattctgactggtgtgagattgtgtctcattgtggtttggatttgcatttctcctgtggttaatgatgatgagcatttttcatgtttgttggctgcttgtatgttctcttttgagaagtatctgttcttgtcttttgcccactttttaatggagttacttgtttttttgctgttgaattaagttccttatagattctggatattcattgttggatacatagtttgtgagtattttctctcattctgtaagttgtctgtttactctgttgatagttttttttttgttattttgtgtttttgtttttttgtttgtttgtttgttttttgtttttgctgtgcagaagctctttagtttaattaggtcccagttgtcaatttttgtttctgttgcaattgtttttgaggaattagtcataaattctttctgactcggtgatttctttataaacatttctctcttcagtacctccatggaatagacagatggcagtctaacagtagactctgacttctcttaagaaatcaggggaatagtaaaaattaaactacaaaatttctcttctcattcttctcttctgttaccccataaaacagtttactatcaatgttcatcttctggatagatataaagaatatttttatcagaataataaattattatagtgtaatttaaggcaatgagaagttcctgtatctccttccctgctgctgctgccccaatctgccttttccacataaattcctcagtctctcatctcataattaaaaatatataaagtttacatgttcctggaaattattttcttaaaatactcttgttgaattttttctcataacttatggctaacaggagcagaagagtagaccagtcagtgtgcatcatcctgtgctataaatgggttacgtaagagtatactgagattttttttttaaagtgtactgagatattgatcctttgtcacttgggaatacaattagaatctgaggcagctggtttgcctccgtaaatgagtagtctcttctctttttcctggtatgctatataagcattaacgttttttacatatgccataatgtgaatgggttggaaagcactgggggcagaatgtaggaggctacatgttgtgagcccaaaaacacacagggaaggccatcagttccaaaagacaaattttgaccacttgtctaggatttttgtttcattttagttgtgtgcagtcaaatataagtcatttgtatatggatatattttatatatttttgtagcttatatacgtgtatagtatattagaagcattctccagaactaatagataataaaaatttatttttttctttgcatctaaattaactccatataaaatggagtatatcataatgtatggacatacgtagctggtattgtataactttaaaaaaaatgactttcttacagtaaatataagaaaatctgaataggaagtattaaggggctagtctgcctccttagcgcagtaggcagcacatcggtctcataatctgaaggaagtattaaagggttaacaatgttgtacctggaatttgaaatggatattaaataattaattacctataattgagctacaatatgatttttgccacatattttattttcacgtcaaagagttactgtttgctttaatccttttgtagtagctgtctcgtttttctgagaagcagcatcttgaatgagtcatttaagtttagcttacatcatccccatttctgtgttttaaatgttttttattagaaggagagttcatgatcacgaaatgactatgtaaattacttcaaagtgttagatttattattacttaagtatttttagagtaagcttcattggtaagcatttgcattttaaaacgtatgtaattgtatggatataaagttttgtgacagaatccttgtatatgatgtagagccgtaatattagtactaatataccatatttattcactcaacagatatttataaagtgcttactatatgcccagacataaggagggaactgataagcctaaatggtaaattgaagaaggtatgctatggaaatcctagggagatgctagtcttgagactagcagctttgattttcatttatccagggacaggatttgagacttcgagccctctataagttggagagttctgtgaccccttctcaaagctgaatccctttaaagtttacaatcccatcgacaatccagggagttgacaaggaagcttatctatttcagccagggctcttggttgggaaaaatagttacattgaatttacggtcatggccttcacctcacatactttatggtttgaatttatattactcatatagtctaaaagatccgaaactgaaatattaacttcacaagtaattctgagttggtgattccctggagacctggtagaagcaaatgtagaatcactctggagatatatgaccttaaccaaggctacccagaaatttcacagattgtagctacacctgagaaaataaccttaggaaaagctaggaacagaaagtattagtagtcaacctgaggaaagttagcatacaaaataaatggcatgattagattctcaagaacttctgataatagaagtatttgataaagactataagtatgtctaaaatgatatttttaaaattcctaatcataactttatgccagaaaatttaaaacttaaaatacacaatatttaagaaaaatatactcagcaatgagcattcgttgcagttatttcatattagccaaaaacaagaaacaatctagatgtctatgaggagaactaataaatgatagtgtattcatgcagtggaatactacatggtagttagaatgattgaacgggagctccatgtcaagcatgagtaaatctcgctttgagtgaaaaagtaatttgtaggattttacaaacagtatagccatttgtacagtttagtgatacacatgcagtaaaaaacataaaacactgcaaaaaatggtaaatatataatttaggggtttagttacctattggaaaggaaggaaggaaagagaatgggatcatgtaggatcatatattaggcttcagcttcatccgaagttttaacagtgttaaaatttgatgaagatggaatgtggaagcacatttgtttcttatatcttatatacttttctgagcatttaaatttttgtaacaaaaatatattttaaaatactttgcattaaaaagcaattgagaaagtgtataaacatgctaaacctgcatatttcttattttgaatcaaactatgtttaaatcttttaataaattattttatgctactttctccttccacctttcatagtcaaagtttgtggggaaaatatataagaacgaaatcatttaatatgatatgctgattctggggtcaattcttgttggcggtttccagatcctagtagcacagtgaaatgttttctacccccaaggtcttttctctcgtggtaactgagcctttccatctctgttgattcctgtctcatggagtatgtttgggggcattttactctcttagggcctggtgggaaggggatggtttctcttctctttgggtctctgtctttctgagctccactcctaccccgagggtttgtctcttacacttgcactctctcagagtcaatctcttgcttgttctcttatttggcatctccttcctttctctttttctatctagagctcactcttctgggatagtctctgtccttctgtgctgtatgtgcgtgtgcctgcctttctcttttttccctcccctctcccaagtccccatcagtttctttcttactctccccatgggtaggtctttttctgtctctcttgctctctttccatttcttttctaatttacctacttatgttccatttgtcttatttaggtaaagctacttcttcttctaatccaagcagcccagctccagactggtacaaagattttgttacagatgctgatgctgaggttttagagcattctgggaaaatggtacttctctttgaaattcttcgaatggcagaggaaattggggataaagtgtaagtgctttaccatatttattatataaattaaccttttgattatgtttttattgcttaaacaatgtatttgaacaaatctgttgcttttccttccttcctaaagatgtgatttatttggtcattgtagtgctaggccaatacaagcaactatcttttttgtaagccactagttctgattgcatattcaggttatttcttcagtgtaaatttctgcttctacctattgcaacttgaacttatttccttgggtagagctcttagttgaaatttgtgtttctccatcttcaaaatcatttttcggtttatgtagtgtgacttctaccgtgttgctttactgagatttccccctgtaaagtcactagtgaccttctaatcctcaaatctagtggacatctctcaggctttattttattttacctgcttgattattctttcttcttcttcttcttttttttttttttttcattatgagacagggtcttgctctgttgcccaggctggagtgcagtggcacaatcacagcttactgcagtcttgacctcccaggctcaggtgatcctcccacctcagcctctccagtagctgggactacaggcgcacaccaccatgcccagctagtgtttttatttttagcagagatagggtttcaccgtgttgcccaggctgatctcgaactcttgagctcaagcaatttgtgcgcctcagcctcccaaagtgctgggattacaggtgtgagccaccacacctggcctgattattctttctttatcatttattctttgttttttgttccacttctaacatttttgccaccattcctttctttgcatcttcaccccccttcaaattacttttccaaaaacattatttttttttttttgagacggagttttgctgttgttgcccaggcgggagtgcaatggtgcgatctcggctcatcgcaacctccgcctcccaggttcaagtgattctcctgcctgagcctcctgagtagctgggattccaggcacgcaccaccacgcccagctaattttgtatttttagtagagatggggtttctccatgttggtcaggctggtctcgaactcctgacctcaggtaatctgcctgcctcagcctcccaaagtgctgggattacaggcgtgagacaccacgcccggcctccaaaaacatatttttaaagttttgaacaagacttactgtctaggctgctaggtcccaacatctgattataaacgatttttaaaagtatctgagatgcttttttttttttttttttgagacggagttttgctcttgtcacccaggctggagtgcagtggcgcaatctcagctcactaaaatcacctccacttcctgggttcaagtgattctccagccttgcctcctgagtagctgggattacaggcacacaccaccacgcccagctaattttgtttttttaatagagacggggtttcaccacgttggcctagctggtcttgaactcctgacctcaggtgatccacccgcctcagcctcccaaaatgctgggattacaggtgtgagccaccgcgcctagcttgagatgcttttaataaaaattttaaataaggctaaaataaaataatcttttatgtttaaaaaaatctcaaaatatggtctgaaacaaaagagttcttcatgttgtctgcaactggaaaaggttaatagagagaaccattagtatagacatttaatcctaacaacttttttccttttctactgtaagacttctctgagttcagtggttcccagaaccagccttaattgctaactgactaaaatcaacctctttccagtatagtaacccagattgcagattaattccaatttaataattagtatttctaagactttaattttttcacttacgggaactttcaagaacttaatttgtagcacagaaagaattgattcaattatgtttttgattttgggaaagataaactactgaggggtcaaagcataggccttggtcatttgagctgagcaccaggagtcaattcattttcttaccaacattctagaagtagttaactgggagatagtagactccaacagtgtggagctcaggaagtcatacaataaaaaacacttaagtggttaactccaacagccgtttcatagcttcaattgttttcagttctactaaatctgaagatatgtagcagggaatgttgaaggatcttcaggagtcataagtaccttcttctcctatagtatagcttttagaataaaaataaaacttaaagcatacttgccacaggtatattgtttcttatatactgatctactttgtttgcatatataaagggcaatagaagacctcttatattctctttctagattttatttcttttctagtgtgtaagtatgttataaattctgtccagtgggttagaccagaatagtcattttagaactatttctcagagcccctgcaaattggtgaccgaaaggagagggtaagggaacagtaacatttttcctccttctcccgtaatgcctaaaacagcttgcttttataatttattttatttgaactctacacaaaacttgatgtgaccaaatagttttcatggctaaaaaggagttagaaaattactagggcagagaatgaggaatttgcagacatacttgaaatgtaatgacaaagtgttatagaatgcatgtaattttaaattactgaaatacttgtaatagggaaactttttacattctctaaaacagtgtcttttatagagcagaagttttaaattttgatgaagtctaatttatcaacttttaaaacaatgatactttgtgtcatgtgtaaataattttttacctaacccatgttatgaagattttcttctgtgttcttctaaacattctgttcttacagtttttacagttagatttatgctccattttaagttattttttgcataaggtatgcagtttaggttgaagttcactttttttcatgtggatgttcagttttgctaagaccattgtttttgtcatgtggatgttcagtttcgctaagaccattgtgtaggtttttttttttttttttttgagacagagtctcgctctgtcacccaagctggagtgcagtggtgcgatctccactcactgcaagctccgcctcctgggttcacgccattctcctacctcagcctcccgagtagctgggactacgggcgcccaccacagtgcccagcttattttttttgtatttttagtagagacggaatttcaccgtgttagccaggatggtctcgatctcctgacctcgtgatccacccgtctcggtctcccaaaatgctgggattacaggcgtgagccactgcgcccggctaccaagaccattggttaaaagactatccttttaccattgaaatgcctgggccctacaattaattatcctatgtggctctctatctggactctattctgttctattgatctgtgcctgtccctttactacactgtcttggttactgtaactttgtaagtaatgaaatcatgaagagtcagccctccaactttgtttttctttttcagaattgtcttccctcctctgaggtggcattctcatatacattttacaatcaccttgtaatttctacaaaaaaatcctgctgggatttttgttacaattgtgttaaatttgtagatcgatttaggaagaagtgatatctttactaggaatcttctaatccataaacactaatctgtttttttagccttgttttcagccagtccctcatatctctggacttgattgaagattttcttgaattagctagtagggagaagacagaagataaagataaaccccttatttataaaggtgagctacaaatatttctgtgtcgtaattttaaaaatactgatttaaacataccatacaaacattttagcaacaaaagaaacaaaactacccagtctcacaactctatcatatcaaaatttttttgcaatgtctatttgtccttatccatatatatgtatagtctttttcaaaataaaattgtattgtttatatttgaggtttacaacatggtgttatgggatacatatagatagtaaaatggctactgtagtgaagcagatgaacatatctatcatctcacatagttttttttggtgacaagagcagctaatatcaacttaagaaaaattcctaatacagcagtctttgttgttgaaattgttggataaattaaaactttttggtttctaaagcagttttattgagagataattcacatcctgtacaattcacccatttaaagtgtagaactcaatggttttaatatattcacagagatgtacaaacatcactagagtcagtttttgaacattttaatcactaccaaataaaactctgtaccctttaactattactcccctatccagcccaaaactccctcacataagcaaccactaatctcctttatgtttctaatagattcatatattctggaccagtcacataaatggaaacatgtaatatgtggtcttgatagatattagggttgttctcacctttcagctgttgtgaatagtgctgttgtgtacatttgttacacaggttttcatttatttaaacaaacggcaataccaaactgttttctacactgcctgtactatttcagtcctaccagcaatgtacaagcatttcagtttctccacattcttgtcaacacttgttatttttcatttttgtttttgttataaccatcctaatggttgtgaagtggtatcttatgattttaattttcatttctctaatgactaataatgttgaacatcttttaatgtacttgttgactatttctttatcttctttggaaaaaatgtttattcaggtcctttgcccatttttgaattggattgcttatctttttgttgttgaaatgtgttttaaaaaatatattctacatactaggcccctatcatatatatgatttgcaaatattttctctcattctgtgggttatcttttgctttcattaaaaaaaaaatagttccggtgatctgtatcactttcttttatttatttatttttaatttttcgtagagatgaggtctccctctatttgcccagactggtcttgaactcctgggctgaagcagtcctccctcgttggcctcccaaagtgctgggattaaggtgtgagccaccatacctggccatctgttgctttcttgagtgtgtcctctgatgcgcaaaaatattttattttgttgacatccaatttattttttcttttgttgcttgtgcttttactgtcatagctgagaaaccatttcgaaataaaaagtcgtgaagctttaacccctgtgtttgcttaaaagagttttatagttttagtccttgcacttaggtctttgatccattttgagttaatttttatgcatgatatgaggtaaaggctcaacttcagtcttttgctgtggttatccatttgtcccaggactgtttgttgaaaagaatattctttctttattgaatagtttttgtcactcttattaaaaaggaattgatgatggagacacatgtttgtttcctgaccctcaattctattccattgatctatatgtcagtcgctgtgctaatactgcactatttcattaccattgctttgaaagtgatgttgaaattggaaagtgtggctattccagatctcttggaattcaacatcaaccttagaatctcctataaatttctacaaagaagtcagcttagatgctaatagggattgtgttgaatgtatagttaattttaggaagtactgccatcttaatattatgtcttatccatgaacatggggtgttttgctgtttatttaggtctcttatttatttcaccaatattttatagtttgcagagtatacattttacacttttgttaaatgtatttgtacatattttatttctgaggctgagtgaaatttgttcttagtgaattctttaggattttttatatacaagatcatgtcatctgcaagtacagataatttcctttctaatctgaatggcttttatttgtttgcttatccagttgccctggttaagacctcaagtacaatgttgagtgaaagtggcaagagctggcatccttgtcttgtctctaatcatagtgtgaaggaatccagtttttcaacattttgtatgatgttagttttgtggatactatttatcaagttgaggaaattatcttctctttctagtttgttaaatgtgtttgtcatgaaagagtgtgacatactatcttgatttctctgcagctattgagatgatcatgtcatgttttttttttccccattctattaacatagtgtattactttgattttcacatgttaaaccaaccttgcatacctgggataaatcccacttgtcatggtgtataattctttttatatggtgctggatttagtttgctagtgttttttgttgttggcaatggaatgttttaattggctttttttgtcctgattatgaaagtattattatatcttgcatatataatattggctgtataatattctgtcatatggctgtacataacttatttaatcatttgattgctttctctaatttttcaactttttttttttttagagacagggtcttgctctgtcacccaagctgaagtgcagtcgagcaatcttggctcactacagcctctgcctcctgggttcaagcgattcttgtgcctcagcctcctgagtagctgggattacaggtgtgtgccaccatgcctggctaatttttgtattttttgtagagatggggttttgacatgttggctgggtcttgaactcctggcctcaagtgatccacccgccttggcctcttaaagcactgggattacaggcgtgagctaccacacctggcctaatttttcaacattttaaatttttgtacataagtttatatctgcgttttaaacttttttgcttaagatagattcctaagaggagaaatcatttaccaacaggtatgatcttttttaggacttttgaaacattgtcaacttattttccagaacagttggattagtactcctagtaggaatccttgaatgatcactacaccattgccataataactaaaacctttcttaatagatgaataatgatatcttgtatttgttttaatttgcatttattttataaccagtaacatagattgtctctgctaatctctttttgcttttactgctgactgatggctatgtttctgtctgcctgcaatgctctctccacccgcactatcttcttcacctgattaattcctatccattcttcatctttcatgtccagtgacactcctcagtactgacttccctcctcctgactccaatgtctgattttttccttttaatttttgtgggtgcatggtaggtgttatgtattcatgggttacatgagatattttgatacatgcatgcaatagataataattacatcagggtaaatgggatatctatcacctcaaacatttatcctttgtgatacaaaaaatccatttatactcttagttatttaaaaatatacaatttttaattatttttgacggtagtcaccctgttgtgctagcaattactagtttttattcattccaactatatatttgtacctgctaaccatcagtacttccaccccaaccacccactacccttcccagcctgtggtaaccatccttctactctgtatctccatgagttcaattatttttatttttagatcccacaaataaatgacaacatgcaaagtttgtctttctctgcctagcttatttcacttaatgacctccagttccatccatgttgttgtaaatgacaggatctttctcttttatggctgaatactattccattgtatataagtatcacattttcattatccattcatctgttgatggacacttaggttgtctccaagtcttggctattgtgaacagtgctacaatagacagtgcagatatgtcttcgatataccgatttccattattttgggtatatacctaggagtgggattgctggatccttttttttttttttttttttttttttttttttttttttttggtggggggagacaaggtcttgctctgtcacccaggctggagtgcagtggtgtgatcttggctcactgcaacttccacctcctgagttcaagggattctcccacctccgcctccccagtagctgggactacaggcatacactaccacgcccagctaatttttgtatttttttggtagagacagggtttcaccatgttggccaggctggtctcaaactcttgacctcaggttatctgcctgccttggcctcccaaagtgctgggattatataagtgagccactgcgtctggctgggattgccggattctatggtagctctatttttaattttttgaggaacctctgaactgttctccatagtggttttactaatttgtgttcccaccagcagtgtacaagagttcccttttctccaaatcctctctagtatttgttactccctgactttggataaaagccaagttaactggggtgggaagatatctcatagtttgatttgcatttttctgataatgaatgatgttgagcaccttttcctatacctgtttgccattggtatgtcttcttttgagaaatgattattattttgtccattttaaaatcagattattaaattttttttcctgtagagttgtttgagttctttatatattccggttattaatcgcttgtcagatgggtagttttcatatattttctcccatcctgtgggttgtctcttcactttgttgactgtgtcctttgttgcgcagaagctttttaacttgatgaaatcacatttgtctgtttttgcttttgttgcctctgcttgttgggtattactcaaaaaatctttgcctagtccaatgtcctggagagtttccccaatgttttcttgtagtagatttgcagtttgaggtctaagatttaaatctttaatccattttgacttgatttttatatatggcgagagataggggtctagtttttttctcctgaatatgtatatccagttttccccagcaccatttgctgaagagactgtcttttccccagggtatattcatggcaactttgtcaaaaatgagttcactgcagatttatacatttatctcagggttctctattgtgttgatctatgtgtttttatgccagtaccatagtgttttggttactatagttctgtagtataaagtcaggtaatgtgattcttacacttttgttcttttggcttagtatagctttggctattttgggtcttttgtggttccatataaatttttagggttgttttttgtatttctgtgaagaatgtcactggtattctatacagattgtaatgaatctgtagattgctttgggtagtatggacattttaataatatcgattattccaatccctgaacctggaatatcattctatgattttgtgtcttcagtttctttcagcatctttttatagttttcattgtagagatctttcacttctttggttaattcctaagtattttatttatagctattgtacatgggattactttcttgatgtcttaaaaaattttcttttaatttgtaagtttctttatttctctttcaggttgtttgctgttggtatatagaaatgctactgatttgtgtatgttgggtttatatcctgccacttcacagaatttctttatcatttctaatagttttctggtggagttttcagatttttccaagttaagatcagatcatctgcaaacaaggataatttgatttttttctttccaattttgatgccccttatttcttgttcttgtctaattactctagctaggacttccactactatgttgaataagtgatagaagtgggcatccttgtcatgttcttgatcttagaggaaagccttttagtttttctttctttagtatgatactagctatgggtctgtcatagatggcttttattatttttgaggtatgttccttatgtacttagtttttttagtgttttttcataaagggatgttgaattttgtcaaatgctttcttaccatgaattgaaatgatcatatggttttgttttttgttttttttttgagacggtctcactctgttgcccagactggaatgcaatggcgtgatcttggctcaccgcagtctctgccttgcaggttcaagtgattctcctgcttcagcctcctgagtagctgggattacaggcgtgtgccaccgcgcctaactaatttttgcatttttagtagagacgaggtttcaccatgttggccagacaggtcttgaactcctgacctcgagcggtccacctgcctcggccttccagagagctgggattacagacgtgagccaccacaccccggcgatcatatgggttttgtctttcatgctgttgatatgatgtatcacatcaatttgtatatgttgaactattcttgcatccctggagataagccccagttggtcatgatggatgatcattttattattgaattccgtttgctactgttttgttgaggatttttacattagtattcaccagtgatattggcttatagtttaatttttttatgtgtgtttatctggttttgttatcagggtaatactggccttgtaaaatgagtttggaagtattctgttctctacttttcagaatattttgagtaggatttgtcttatttcttatttaaatgtttgatagaattcagcagtgaagctattgggtcctgggattttccttgctgggtgactttttattatggcttcaatctcattactttttattggtctgttcagattttggacttcttcacggttcaatcttggtaggttgtgtgtgtctagaaatttatccatttcttctaaagttttccaatttatcggcatatagttgctgataatagcaactaatgattctttgaatttctgctgtaacagttgtaatatctttattttcatctctgattttatttttttgggtcttctctcttttttgcttagtctgtctcaaagtttgtcagttttgtttattttcttcaaaaaacctgttttttgtttcattgatcttttgtattgttttctttatttcaagtttatttatttctgctctgatctttatttctcttctactaattctgggcttggtttgttcttgcttttctaattcttctcttctcttcttttttgttttttttttctttttttttgagacaaggtctcgttttgttgcctaggctggaatacagtggcgcaatctcggctcactgcaacctctgcctctcaggttcaaatgattcttccgcctcagcctcctgagtagctgagattacaggcgcccgccaccatgcccagctaatttttgtatttttagtagagacagggtttcactgtgttggccaggctggtctcaaactcctgacctcaggtgatccacccgcctcagcctcccaaagtgctgtcattacaggcatgagccaccgcgaccagcctctgattctttaagatgccttgttacattatttgcagtttttctacttttttgatataggcatttatagctataagctttcctcttagtactgctttccctgtgtcttatgttttttggtatgttgtgtttccattatcattttttaaagaaaatttttgatttccttcttaattccttcattggcccaccggtcattcaggaatgtgttgtttaaattctatgtatttgtatagtttccaaaataccttgttattaatttctccttttattccactgtggtgagagaagatacttgatattatttcaggttgtttttgatgttttaagacttgttttgtgacctaacatatggatgatccacatgctgaggaaaaaaatgtgtattctgtagctgttggatgaaatattctgtaaatatgtattaggtccatttggtctatagtgtagataaagtgtgatgtttcttagttgattttctgtgtgtagtgttgaagtctccagctattattttattggggtctatctctctctttggctgtaacaatatttgctttgtatatgtgggtgctcccagggttgagtgcatatatattttaaattgttatatcctcttgtagaattgaactgtatcattatatagtgtccttctttgtctcttcttacagtttttatcttgaaatctattttgtcctatataagtatagctgttcctgctctttttggtttccattggcatggaatatccttttttatccctttattttcagcctatgtgtatttttacaggtgaagtgtgttcttgtaggcaacagatcattgggtattttttaaaatccattgagcccctctgtcttttgattggagagtttagtccatttacattgaatgttattattgattagtagggacctactcctgccattttgttatttgttttctagttgttttttgggctcgtcttctttccttccttcttatcttccttttaatgaaggtgattttctctagtggtatggtttagtttcttcctttttgtttgtttgtttatccattatatgttttttggtttgtggctcccatgaggcttggaaattctatcttaaaacccattattgtaagctgataacaactttacactgtttttataaacaaagaaagaaacaggcaaaaagaaaactaataaaaattctacaccttaactttgtccactttttagctttttgttgtttctgtttatatcttattgtactatgtcttgatatgttgttgtagttatttttgttgcttcaacatttagtctttctacttataataagagtaatttatacaccacagttacgctgttataatattctgtatttttctatgtacttactgtttttagtgagttttgtacctttagaggatttcttactgctcattcatgtccttttctttctgattaattacttcctttagcctttcttgtaggacaggtttggtgtggataaaatccctcagcttttgtttgtctggaaagtttttatttttcttttatgtttagaggttattttttccatttatataattctagggtgaaagttttttccttgagcactttaaatatttcatgctactcttctcctggcctgaaagatttccactgaaaagtctgctgccagacatattggagatccattgtatgttacttgtttcttttctcttgctgcttttaggatcctttctttatccttgacatttgggagttattaagtgccttgaagtagtcttttttgggttagatctgcttgatattctataaccttctacttgaatattagtatctttctttagatttgggtttctctgttattatccctttgaataaactttctacgccagtctttctctctacctcctgtttaagaccgatatctcttagatttgctttttttgtagctattttctatgccttgtaggcctgctttattcttttttattcttttctcttttgtctcctgtgactgtgtattttcaagtagcttatcttcaggctcactaattctttcttttgctttatcaattttgctattaagagactcttatgcattctttagtatgtcagttgcattttttgactccagaatgtctgctttgttcattttaattattccagcctcttcattaaatttatctgattggagtctgaattcctcctgtgttatcttgaatttcattgtttcctcaaatcagctattttgtgttctctctctgaaaggtcacatatctctgtctttcccggattttcccgattccctgtttagttcatttgatgaggtcatatttctctaaatggtcttgatgcttatggattttcgttggtgtcttggcattgaagagttaggtatttattgtagtctttgcagtctgggcttgtttgtacctgtcatttttgggaaggctttccaggtatttgaagggacttgggtgttgtgatctaactttttagtcactgaagctgtgtccacattaggggtcaccctaaggccagtaacgctgtagttcttgcagccttgtagaggtaccattttggtggtcttgtataagatccaaaagaattgtctgcattaccagatggagaatcttgttctcttcctttactttctcccaaacaaatggagtctctctgtgctgagttgcctggagctgggggtggggggtgggtgacacaagcacccctgtgactaccactgcgggtatagcacttggtcagatcttaagccagcagagcaatgggtcttgcccaaggcccactgtaaccactacctggttactgcctatgtttgctcaaggcccaagggctgtacattcagcaagtggtgaagcctgccagtactgggtctttcccttcatgttggcaaattctcttagtccctgggcgggtatagagatgctttctggagccagggcctggagccagaaatgttagaaatatacctagtgctttattctactatggctaaactggcacagaaataacaaaacaaagtccttcctactcttctctttcttttcctcaggcagaggagcctctcttcgtggccaccaccaggacaggcccgcagagagtactgccagtgtaccgccagtgttcacttaaggcctaagggctatttagtcagcttttggtgaatgctgccaggccagagactcacccttcagggcagtgggctccactctgccccaggctcagtccacaaattccattcaagagctaaggcctggaattggggacccaagagcccgtttgttgcttttgtccgctgtggccaacctggtagctacactgctagataaagtcccctttactcttccctctccttttctcaaacaggaagagcctctctttgtagccaccacaacttctaataagctgggtctcaccataacctaacacatttctgtctaatccatgccccacaatgtgtactacctggttattgctgctgatgattcagggcccaagggctctttggtcagcaggtgatgaatcctgccatgactgggtccctcgattcaaggcaatgggttgccttctggcccagggagctagggcctggaatgggggcttcacgattctgcccagggccctgtcctactgtgactgagctggtatccaagttgcaaaacaaagtgctttttctcttcccttttctctcctcaagtagaaagcagaggtctcttttggagctctaagctgcgctacctggaattggaggagtgaggagtggtggcataagcactctcttagccgccccagtggtatctgactaagtcaagtgcccccattttactggctccaagccctttacagcactaggacttgcccagaagttgcagtccttgtggcctagatagcctttcagttttatttagggccccagtgcactttagcccactgtggcgtgacttactaaaactcaacttctgatcactgtgatggatgattcccctctggtttgggcaggtttatatgctcccttcatgtgtgtaggctgagttccaattcaaagtcctatgatcactgcactctccttcccgcaagtgcactgattctctccctatgacacgtggccacttctgggggttgaggtagcagtggcattggcgattcaagattgtctttccccttctgtgcctctttcagtgatatgaagttaagatcaggtactataattgctcacctgatttttgtttcttatgatggtgcttttttgtgtagatagtcataacatttgctgtttatgctgggaggttgatcagtagcagcttctattcagccatcttattccacctccttccccagtactgccctgattgaatgagttggtatttgttcctgtttctgttttttggaattgtttgtaaagcattgagcttaattatttaaatgtttgttagaattcagcattgaagccatcttggcctgggctcttcttataggtagttttttttctttttagtattatggtaaatatatatataacataaaatttactattttgacagtaaaaaggcaacctaccatatgggaaaaatatttgcaaatcatacatctgataaggggttaatatcaaaaatacataaaggattcctacaacacaacaacaaaaataatatgatttaaatatgggcaaaagagttgatagacatttctctaaaaatgatatacaaatggccaagaagcacatgaaaagatgtctagcatcactaatccttagggaaatgcaaatgaaaactgtaatgagataccaccacacacccattaggatgggctactatgaaaaaacaataatgagagttggtgaggatatggagacattggaactcttgtgtactgttggttagaatgtaaaatggtatagctgctgtggaaaacagtgtggtgttcctcaaaaaattaaaaatagtattaccatgagatccagaagtactacttctgggtatatacccacaagaattgagttcagggtgtcagagaagtatttgtatttgtacgcccacattatagcagcattattcatgaccaaatcatggaagcaagtcaaatgtccatcaacagataactggataaacaaaatgtggtatatacatacagtggaacataatttagccttaataaggaaggaaactttgacacatggtggaacatgtatgaatcttgaagacaatatgccaagtgatctaagccagtctaaaaaggacaaatattacatgattcctattatgaggttcctagagtagtgaaatttgtagagacataaaatagaatggtgtttgccagggcctgtgggtaaggggaaatggggagtgtgagagaacagataactccacggggcttcccagagtgctccatgttgtatggggattatgtctgtctcataaatatatgtatcattggagacaggttcattactacccatttttgtatactctttgtctagcaccaagctagacatgtagtaggtccatagtaaatacttgttgaactggtaagggaataaattacccttatctgtaacttccctagtttttttatacagagaatgatgctctagttaggcattttcctaggtatatacttgcactttttatctttctcatttccccgctttctttgtttctagagtgagtttttggcatatctttaacatatatatgtgtagtatatatgtgtatttttacatttgactgtagttaaatataagcttaaatatattttttttctattatcactatacattttattagattctatgttctggcagtttttcattattgaaaagcctatgttacaaaaacataccaatttactaccatcaataaatggaaaatgcttatcttaatatgtattgtaactacattttcttcatctttaatgggtaaaaacagttgtcattgttttcattaataattttttgaccactagtagggttgtacttcttttatatgcttgctagtttatttctgattttgtaaattatctttagcaaatgtttactaatcagattggtctgcctttgagttactgctattaccactaccactaccattaccattaccactgtgtattgagcactgagcaagatttaaggggtactacaggaaatcatggtgtagaagaggaacagacacatatattatgtgccataatagaggcaggtgtaatttgtcatgggatcttgagtgataatattaagaactcagtaagcttttaattaccatgtgacaggcaccattctaagtagtttttaaaatattatctcattgaatcctcataacaaccctatgcaataggtactctgattatcttcattttacagataaagaaactgaggcacaaggagtttaattacttgccataagtgaaaatgttagtaaatggtgaaactgagattaaactcagggagtgtcactccaaagtctgtgttcttaactactaacctataatgactctatcagtttttaagtgttggattcatcgaggtggtattagagatattcatttgcattataataaaaggtgagtatgttgaaatgctttttaaaatagtcatatcattttccattcatttatgattatttattttaataattatcctgttcaagtgaacaattaatgcaaatgtgactccagcctcttacctttttatgcaagtatccatctcaaattctttttttcttggatgtgtatgcctttttttctaattgaaaaaaaaatcataaataaaatgactttcataagcattaatgaatttttaacaaggaaattctgggttttctatatcagtgaagatataggtaagaaacatggaaaagcatcttttttttaactaatgtactaaatttaaagagcttgctggaaagacataagtaaatctcagttttgttaactgttttattttaaggctctggggcatgatagaattttgcttggattggaaatagtagcattgtgtttacagttaaataattagaatagaaattatgtatgataaaatataaaagtgtcataagcccttaatctcttggtattttagtatcaatgcaagtcttgggtaaaatttcacctcacttcttcctggtgtagattaaaggaaaaaaaaaacttaaactcactgtctaaaattgacatgtcatatcattaactcataaagtcgtactcctttacacacacacacacacatacacacacaccacatttgaaatggaaacgtacactgaaatttgcagctaccccatagaataatttttggcacatagtaggcattcagtaaagatttgttcagtgaatgaataaaggcattctttatctctcatttttatttgatcattatcaagttgttgataaggagaaaaacgtggccatttacagatataacttaaaacatgcctcatgagcgaaatgtaagtttaatcatattcttttgacagttttaaggattctaatcaaggaaacccttttaagaaattctcatgtagatgaaataggctttaaaaatacctgtgctcatcactatctatttgaatgaaatctgtggttaatttatttataatgtaatgactccttgattaagaaaagtatataatgtattttgctatacaaatagaatatatataacccacttttaaatgatgagcaaggtggaaaatctgttcttaccagtaagcagagcgatatatcaaattccttttgtgttcttttgttaaattttcaggtgaggggaagtggcttcgaaacattgactattaccgtttagatggttccactactgcacagtcaaggaagaagtgggctgaagaatttaatgatgaaactaatgtgaggtaggaaaaattttctgtatatgtagaaacattaaaataattaattttaaaatttacataaagttcactatttttattgtgtatttgaatgtttttagcaaatgcaaggtacagtcaggttgcaaaacagtgtcatcactccctaaccactgaattcacttatggaatcatataatttgtagccttttgagtctcacttctttcacttagtgagatttatttgagaatcatttacattgttgcatataccaataatttttaaaaattgttgtatagtcttccattatagggctatatcacagtttgttcagctacttccacttgagggacatttgagttgtttccaggttttggaattaaaatcaaagctgctctaagctttcatgttcaagtttttgtgtgaacataagtatttacttaaatgaaacaaaagcctaggattgtgattgctgggtcatatagtaagtgtacatttatctttgtaagaaactatcaagcagttttccaaagtgactgtacaatttttcattcccacccgcagttgtatgagagttccagtttccttacattcttgtctgtacatggtattgtcattttttaaaaaaattattttactcattctaatgtatgtgtagtggcatctcttgtgattttaatttgctattccctaatgataaattatgttgagcatcttttcatgtgcttattgaccattttaatatcattaactgtagatacaaggcaatttgtgtgtgtattgatattgttttaagctgttagtaattgacaaaatcaagctacatttggaaagaaaaagttttatatatagtcatatgttgcttaacaaccagtatacattctgagaaatgcatcattaggcaattttgtcactatgcaaatatcatagagtgtactgtacatcagtaggctttctgtgatatagcttattgctcctaggctgcaaaactgtacagcatgttactgtactgaatactgtaggcaattggaacacaatggtatttgtgtatgtaacatatctaaacagaaaagatacagtaaaaatatgtattatactcttatgagattgcctttgtacatgctgtctgttattgaccaacacattatgtggcacatgactatacatacatctaaacatatgcacatacgcatacgtatacacatacacaaacataagaaagcatggcatttaagaaaaggataaaggagatggggttagtttagtagaaagatggctgaagtatgccttaataaatattttaaactatggagaatattatactgtgtgtttaaaacatgttttaattttagcagcatcatgaactagacctaggcttaaggctagagaaatttcagttacattttaggaagattattaattattgaaaacccgtagcctaagagagcttacaaagggatgatttgagtatagttaaattataaatgtatatgattgattatataattgtttaaagaataaatacatttttatattctgtgtttttcatgtttaaacaaattattatttgtacatgagtgtgaagaagtaattttattgagtaactcaaatttctcaaacataatctaaacctttggcttgctaggtttcccaaattttaaaatacgacagaggcatataatctgtcacgtgacatttatacttgatgactagtagggaaaaacattgaaatgtagatgttgagctgtcagcttggcttactcactagtgaattacccctaaacatatgccaaaaagcatgtcattcaaattcatgcttcaggcatatactggttgagtatttcttatccaaaatgcttgggggtgctagggacccgaagaatttcagatatgggatttttttcagatttttgaatatttgtattatattcttacctgttgagcataccaaatctgaaaatctaaatccaaaatgccccaatgagcattttcttcgagtgttacgttggcactcaaaaagttttggagtttggtgaatttaggatttcagacttacagatttgggctgttcaacctgtacatgtatattatggatttggggagttgctcttgagtagctgaacccatacacatgaaatccacagatgttatgctgtctctcaaaatgcacaaacaaacagaaaatgaaacaaaaaacaaaatgaaaagagcaaggaaaaaatccacaaatgttttagattatatctctgtaaattctaatttttcatgactcagtaattttcagtaaataggatataaatataatccttgtttatgccaaagcaatctgaaagacacattaaaataaactttaagataatgaccatttgtaacgttgttgttttgtgtgacctggaagtagttttcagcagtctcagagtgcctcgttagcttgatactatttttggtttgtttctcttttaatttagaaatgattatagattcacctgaacttgcaagtacagagaggtcctgtgaaccctttacctaattttccccaatggttaaatcttatatttcaatatcaaaactaagaagttgacagtgtttcaatgtttgcatatatctttttttccacatatacacaatcaagatacagaaatattccatcaccacaaagctcgctctctctcactacccttttatagtcacacccatttttactgccaaccttgtcactaaccttaacccctgacaatgactaatttatgctccatctctattattttatcatattaagactgtcatataaatggtatcattctctatatgtgacctcttgagattggcttttttcagtcagcataatgcccttgagttccatccaagttgtcacatgtatcaatagtttgttcctttttattacagagtagtattctatgggatggatgtaccacagatgtttaatcattcacttattgcaggacattttcattttgtccaggtttggctattataactaaagctgctgtgaacactgtgttccagctttttgtgtggacctaagttttcatttctctaggataaatgcccaggtatgctgtggctaggtcatatggtaagtacttttttaggaaactgccaaactcttaattagaatggctgtaccattttatagtcctaccaagcagtgtgtgagaaatcaagtttctctacatcctcaccagcatttgctattatcactgttttttattttaggagttctgataggtatgtagtggtatcttattgtggtcttaatttgcagttccctgacaaccagttatattgaacatcttatgtgtttatttgccatcaaatattgtatatcctcttgggtgaaaatctctttatgtctttttgtccattttcttattggattgcttgtttttttattgtagggttttgagagttctttatataatctagatatgtgtcctttgtcagatatatggtttgcaaatacttcctgccagtttatggcttgtcttttcatccccttcacagggtctttcagagaacaaagattttaattttgatgaaatctagtttgtcaatgtttgtttctttgttttgatcatggttctgatgtcaagtctaagaactcttcctcaaagccctaggtcttgaagactttgtcctgtgttgtattttacaagttttataattttaccttttatgtttaagtccatgttgtattgagttaatttttgtataaggtgtgaagtttaaaggttcatatttttggctgtggatgttcaattgctgcagcatcatttgttgaaaaaaactatctgtggcagtgcacagtggctcatacttgtaatcctagtggtttgggaggctgagcccaggaattcaagaccagcctgagcatcacagcgagaccctgtctctaaaaaaaaaaaaatacccaggcatggtgatgcacaccagtactcccagctactctggaggctgatgtgggaggatcacttgagatcaggaggtcgaggctgcagtgagccatgattgtaccacttcactccagcctgggtaacagaggaagacactgtctcaaaaaaaaaaaagaacgaagaaaaaaccatacttcctttactgaattggttttgcacctttgtgaaaaatcagttggctatacttgttttgggctgtttttcagtttgctattctattcctttattccatatgtctttctctgcatcattactacatagtcttgattactgtagctgtgtactaagccttaatatcacattgaatgattcttcccactttgttctacctttcacagattgttttagctatttttatatgaattttagaataatcttgtctagacctacaaaagttttgcaataattttaataggtattgtattaaacctattactaatttgtagagaattgatatcatttttcaactgtaatacttttagcagcagagaattgataactttattgttttctgatcagtgaacacagtgtatgtctccattagttgatctttgatttcttccatcagtgttttgtagttttcagtatacaggtcctgtagatcttttgttagatttacacccaggtatttctctttttgagttattgtaaatgttactgtatttttaatttttgtttccatgtgttcattgctcaaatatagaaatgcaattgatttttgtgttgatcttttgtctgtaatcttgctgacttcatttgttctaggagtttgttttatagatttctggggattttctaagtagatcattgtactatccacaaggagggatagttttatttcttcttttatgatctgtatgctgtttgtttccttttcttgtcttgctgcaagaaaagtctccaactataattgtgaatttgtctgtttctcctttaagttatgtcaggttttgcttccgatattttcagctctgtttattatgcatgtttagtattgctatgtccctccctatacctcatactagttaaaacttaagagtaatatagttagtagcaatggtgagagtggacatccttaccttcttcctgatcttaggagaaaagcattctgtcttcattaactatgatgttagctgtaaggttgtttttttgggtgggggggttgtttttgtttgtttttgttttgagacaaggtttctgtctatcaccatgactggagttctgtggtgtgatcatacctcactgcagcctcgaactcctaggctcaagggatcctcctgcctcagcctctttgagtaggaatgcacagccatgttgtactttttttgtaattactcttcatcaagttgaggtggttcccctctattcttaattttctgagtttttatgacgaataggtgtttacatttgacaaatgctttttctgcctcagtttgtatcatctgttatttcttcttaatctgttaatatggtgtgctatgtagattggtttttgaatactgaaccaacttttcatgcctggaataaaactccacttgatcgtaaggataattctttttatatagtacttggttctgtttgctaatactttgttgagagatatttatgagagttactcttatatattcagttgttttcgtgttgtcattgtctggttttggtatcaggttaatatcgacctcataaaataagtcaataattgttttctattttctgacaaaaattatggggatttgtgttaatcttaaatgtttggtaaaatttgccagtgaaaccagttctggccttgaagatttctttttttgggagtttaaaaatcactaattaaatttcctcagtagttttaggattattcaaatgatctattttatattgaatgtgttgttgtagtttgtgcttttgtaagaattggttcatttcatcgtaatttcaaatatatgtgtagaattgttcatagcattttcttaatatccttttcatgtctttagggtctatagtgatagcttctgtttcacttctgatactggtaatttgtgtgttttctttttactagtcttgctagaggtttgtcagtttcattaattgttacaaataactagtgttttattcccttgattttctttttctttttttttttttcctattttaatttcatcttgcttttggtttgttttgctcttgttctactttctggaggtagaagcttagattactaatttgatttgagactttttttcttttctcatgtaagcatttagtgttataaatttcgctttcagcactgctttagttatacaaactttgatgtgttatattttcatttagttcagtatatttttatttcagaattcatctttggctcagctagaagcatgttgtttaatttccatgcgtttggaggttcccattatttttctgttgtggatttctagttcaattatgttcaggaaatataatctgtatgatttcaattcttttaagtttgttatgctttgttttatgtctcaagtagactggcccttgaagagaatatgtactctgctgttgttgggtggagtgttctataaatactgattagattttgtttttcgatgaggttcttgtattcttctttacttttgctgattttttttttttggctatgtggttatcagtttttgagaggaaggttgaaatctccaactataattgtggatttttctgtttctccttcagttctgtcaggttttgcttctgatattttcagctctgttgtttattatgcacatttagtattgctgtgcccctgtctatccctcataatcttctttgctctgaaatctgttttatctgatactaatataaccactcttgttttattttgattggtgtttgcacggtatatagtttttcatccttttacttcaactcacctatgttgttgtatttgaagtgagtttcttgtagacagcatgtgattgggtcatgttttttgttttattttttatccacttaatttttcttttaaatggtgtatatagaccgtttatatttaatgtaaggcttcagtctaccattttatttttttgttcagttggttctctttcattttattttcttttgtttatgatttctttttcctcccttcctgtgggttagttttatatttttgaaattctattttgattcatctgtagttttttttagtgtttctctttgtatagctttgatagtggttgctgtaggtattacatcatacctatacacacacttattacagtctactggtgtcattttgccagtttaattgatgtgcagaaaccttacctctttatatccttttgattccctttttataatatgactgtctcaagtgtttaaccatatcagtcagtgtaatcattctttcttcaaccatagaatataatttagaaaacacaacagaatgaaattgttgtattgacttatatttattatttgctgttacttctccctaatgtttcagtattcctttttatatcatttgctttgtatttagagaacttattgtagccattcctttttttttaagcagggtcttgctctgtcacccaggctggcatacagtggtgcaatttcagctcactgcagccttgacctcctaggcttaagccatcctcccacctcagcgtcccaagtagctgggactacaggtgggcaccaccacacctggctaatttctgtattttttgtagagatggggttgtaccatattgcccaggctggtcttgaactcctgagctcaagtgatccacctgctttggcctcccaatgtgctgggattacaggcgtgagccaccatgcctggcctagccattctttaacagcaagtccgctggcaacaaatgatttccccttcattcttgaatggtatttcagctggatatagaattctgggttggcaattctttcctttcagtacttgaaaaatatgtgtcactaccttctcgtctccctggtttcttatgagaaacctgctgtttgaattgtttttccccccttagataaggtgtcgtttctctcttctttcaagattatttttctacgtttttggaagatgactgatatattttgtcacgtatttgtttgggtttatcctgtttgtggttcattcagctacttaagctgcaggtttatgtttcttaatacattttggtaattttcagtcattatttctttgaatttcagcccctccttccttctcctcttcttttaggactctaatgacaaaaatattaaatcttttgttatagtcccatgggtacatgagtctcttttccattccatttttctctgttgttcagattaggccatttctgttgtttagtcttcaaaatcaccaaatcttctgttctctgctttctactgaacacattctgagtttttaatttctgttatatttttcagttctaattttttttttttttgagacagggtctcactctcgcccaagctggagtgcagtagcaagatttcagctcactgcacactccaccttccaggttcaagcaattctcatgcctcagccacccaagtagctgggattgcaggcatgcaccaccacacccagctaacttttgtaattttagtacagacggggtttcaccatgttggccagactggtttggaactcctgacctcaagtaatctgcgtgcctttgcctcccaacttgctgggattacaggcctgagctgctgtgcccagcctaaaattttcagttgattctttttttatgtcttcttgtttctttgctgagactgtttgtttcatttgtctcaagtatgttaataattgcttatgaggcatttttataatgactactttaaaaatccttgtcagacaattctaacatctatgtcatctcagtgttggtgtctgttgattgtcttttctcgttgaacttgagatttttctggttcttattatgagaaagttctatttaaactgggcatgttggttactatatcatgagatgctggattttatttaaatcttttggtatagtaggcatcttctgacaaatgttttggcagggcatgagacgccctaccacattgttgccagttgatagtgggagttcagtctcctcactaggcctctactggtattaccttggctgggtggggggacagaggctcaagattacctgtttacttctttccagatggcctccactgacatcacagggggtgactcattagttattattggatggtggtataattccagtaggaagggaaggggttttcttgtaactgctgggtgtgggtggatgtattgtttccctacatggtcttcattgacactgttgggtcacagggaggaccttgtgaaatcagacttgtctgaccccaccctggtagtgccttgttataacttggttacggtagaaaggtgaggattcagctgcattttttgctgtactgtttggttggaattgagtggttatcctaacattttctgtcttgctgtgctgcccctttcctggtcctttggctggagggtaggcttttcttggagatttttttgacagcaccttctggagttcttcagcaaccaatctaggatacatgaggcagaaagaaagtctgtaacagctgggctcggtggctcacacctgtaatcccagcattttgggaagtgaggcaggaggatcacttgagcccaggagttgaagaccagtctgggcaacatagtgagaccctatctccacaaaaattttaaaaattagctgggtgcattagtgcatttctggagtcccagctacttgggaggctgaggtgggaggagtgcttgagcccagcaagtcaaggctgcagtgagctgtgatcatgccattgcactccagtgtgggtgacaattcaagaccctgtcgcaaaaaaaacaagcttttaaaaataaaaaggtagcccatgaaactcagtaccacattatcctttatatcctgagggccctacccatctgcctcatccttctgacttttcagagctgccttctgttccttgtatatatacaagattggtaatttgggcttcattaaaattaaggacttctgttcaccaaaggtgtgatagttaattttatgtgtcattttgactgcactaagagatgcccatgcagctgataaaacacttctggatatgtctgtgagggtgctcctgaaagggtatttgaattaatagactgagtaaagaagattgccctcatcagtgtgagtgggcatcatcctacccattgagggcctgaatagaccaaaaatgcagaggaagggcaaatttgctctctctttctttgagctgggacatccatcttatcgagcccttggagattggtaatcatggttcttcagccttcagactcagacagactaggacttataccaactgcccccacccacaaccctacccccggattttcaggcctttgaactgggaccaggatttatacgattagctccctggttttgcagcttgtgaacagtacattgtagcacttcacagcttccataatcacagtgaggctaatgccgtaatatgtctacacacacacacacacacacacacacacacacacacacgcatgtacacacaagttcttaactccttttggttctgtttctctggaaaaccctgactaatacaaacgtcatttcacattaagagtgtaaaggcaagccacaaagttggagaagctatttccaatatatagatataaaaaggtctcatccaggatatataaataactcttaaaaatcaattggataaactagacaacccaatagaaaaatgggcaaaaacttgaacaggactttacaaaagacgatatctgaatggccaataaatgtatgaaagcatggtgatccttattaattatcagagaaattcaagttaaaaatggttttgacaaaagatgcaaaagcaattaaatggagagagcatagccttttcaaaaactggtattgaaacaattagactttcataggccaaaaacaaacctttacttaagccttacccatattttaaaaaatcaagtcaaaaggaatcataaatctaaatgtaaaactattatacttgtataagaaaacagaagaaaatcttctgcatctagggttagtcagagttcttagtcatgatgccaaaggcatataacccattaaataaaaaatcaataattggacttaatcaaaaataaaaacttttgtctgtgaaagactcttagggaaaggaaaagacaacttatagacttggagaaaatatttgcaatttgcatatttaacaaaggactcattcagaatgtataaagaactcagaaagaaaacaacccagttagtaaatgggcaaaggacttgaactgacacttctctgaagaaggctatgcatgtcaaataagcatatgaaaagatagcatcactagccattagggaaatgtaatttaggtgaggctagtggctcaggcctgcaatcccagggctttgggaggctgaggtgagaggatcacttgaggccatgggttcaagaccagcctgggcaacatggtgagaatctgtctttacaaaaaattaaatacaattagctgggcatggtggcacatgtctatagtcataactacttaggaggctgaggaaggaggatcacttgagcccaggaattcgaggttgcagtgagctatgattgtgccactgcactccaacctgggagacagagtgagatcttgtctctaaaaaagaaagaaaatgtaatttaaaaccacatgagttgtcacttcacacctatcagcatggctaaaataaaaaatagtgacaacattaaatgcttgtgaggatatagagaaactagttctatcctacattactagtgggaatataaaataacaaccattctgggaaacaatttggcagtttaaaaaaacaaaactaaacaactaaacatacttgtcatataaccttgcaattacactctcagaaatgtatcccatggaaatgaaaacattttcacataaaaacctaaacacaaatgttcacagcagcttttatttagaatggtcctcaactagaaacaaccaaatgttatttaacatgtgaatggataaacaaattgtggtatatctatgtagtggaatgctgctcagcttactgatccaagcaacaacttatatggatctcatgctaactggaaaatgccattcttgatttgacagaagtataatgatagagaactgatctgtagttgacagggtttagggttaggggaagggcatgaatacgaagggataacacaaggaaggtgtttttttgtgatgacagaacagttctgtatcctgctatggtaatggttatgtgattctacatgcatgataaaattttgtagaactatacatcaaacaaaaaactgatgaaacccaaatgagctctgtacttgagttcataccaacatcaatttcctggttttgacaatgtattgttgttatataagttgtaggttaccattggaagccgagagtgaaggatatatgggagctcgactgctgtaatttttgtgaaccttaaactgtttttgaaaggttataataaaaacaaaaagatagtaccatgagttgtcaaggacctgaacaactggaagcctcatataatgctggtgggaatatgaattggaataactactttatagaacaatttgttcagtttaacagtgcatgtaaataccctatgactcagcaattccactcttagatatgtacctgacagaaatgcttttatcaaaagacacgtataatatggtttataggagcattatgcaaataatgctttatattttaattatgtttgttttgagcatatactttaatactaatacttagtattaagaatatctaaaaaaggtattgggtagtttatctcaatatggacttgcgtattgaagttctttaaggtttcatgtgtgttgtgtgtgtgtgtatgtatgtatgtatgtgtgttttttaacctacatagtttataccattctatatgcttgattcttttgtatagctctatgccatcttttgcttatgtgggatagatattaataactggaataattttggaccagcatttacccatataccttcaagtatgtcctctaatgaaagatgctacagtttattctctgtaatgactatgtgttatagaggtataaagatgaaacttgtcatcataatcccactgaccacagagaaccactattaacattgtgtttatatgttttgtttttaatgcatttgcaattgtatttagtaaggctctatattctgcttttcttccgcataacatagtattttggatttttaatggtaacatagccagagtgtaatttacttctctatgttatacatattgtttaattttcaaccttatgctactgtaaaataacactgtgataaatacattttcttcaaaattggtcaacttttgtgataatttctatagtctgtattcatagatgtgtggtagctccaaattgacataaaacatgaatttagtatctctatttattttataccaggatttttctttagtatataatatgattggtagactaaattgtaaactttttcccatcatttaaatttagagtttctttgcattctagtgtatagtgaatgctataaatgtaattagtatggcattttagtcattaattttctttcatgaaagaaaagaaaaacattttgtgttgattattgagagcttattatattccagggatttttgtcactctgtaagttaccagcaataagcaaattattaaataaattactgtacaatcatccaatgaaatactatgcagctaccaagcatgatgtttaccaagaaatttggggaaatgttcataatacatattgtatatacagttactatcctgactgcaaaatttaaaaagtatatatttagaaaaaaagaaaactgtaggaaatatatcatgatttgaatggaggttgtttctggggagtggaactgagtaattcttttccttagagttgtttttattttcaaaaagtgtttatccaatctttttcaaattaaattttcattaatatcaaagtaatatatttacatatttttaaaaaacagatagttttacaaggcttcaaataaaaaccagtcccgtgaccaaacctctttctacctgtgatttctactttctggaggtaaccaatttcaactcttggcaattcttacttacttacatacatcctttctaaagtgtaaggtagtaatttaccacaagcacaggcacacttttcctcattcgttttcccagtataatttttcataatatttgcctaaattaatttgcagtattttctttattgtggctacgtaaatatttgtaagccacttgaatactgtgattgtttttcctttttcgtgtacttgtttattatattttgctgaagtattcattcgtttttaccatttgcttagttttctatatacctatcaccaattcattcctaaattatcctgtagaaatattgtaaatcctggccaggcatggtagcacatgtctgtaatcccagcactttgggaggccgaggtgggcagattaccttaggtcaggagttcaagaccagcctggccaacatggtgaaaccctatctctactaaaaatacaaaaattaaccaggcatggtggtgttcctgtaatcccagctgctcaggaggctgaggcaggagaatcacttgaacctgggaggcagaggttgcagtgagtcgagattgcgccattgcactcccgcctgggtgacagagtgagtctccgtctcaaaaaaaaaaaaaaaaaaaaaaaaaaagggaaagaaagaaagaaaccttataaatgcttgtgttccaacaaatcaggtaatctatcagtttctttttttttttctttagacacccttcctggagccccgtgtctgtcttcttgcttctgttttatctacctcagtaccttgcatctgtctaacgcctctccttacattctttatgctgtattataaatgttgagtcacccctacatattcacctacttttgcattttccttcattttgatgtacttagtgcccctagctgtacccaatacaatatagactttcaggttacatataaattctctaaatttattcagaaatctgtagataaaaccttgactacattgtaaatatttgatttttcatttcatctttattcttaaatcagacgattttattttccaacaataggattcttcctgggcatatgtattatcatcctgactccttagataatatattattttcttcagtaagtaagaaatgaattctctgaactcttgatagttaaaaaaaaactaagtatcaaaaagtcatattgtaattaaaatatttgtaaagtactaattactgaagcatttattctatattttcattttcagaggacgattatttatcatttctactaaagcaggatctctaggaattaatctggtagctgctaatcgagtaattatattcgacgcttcttggaatccatcttatgacatccagagtatattcagagtttatcgctttggacaaactaagcctgtttatgtatataggttcttagctcaggtaggtttataattctctttttcatattgaaagtttatgtgaaactgataatattttagagatatggaacatatgtgtattacagagagggaaacaaagttggaaataccatttctgtacataaagcagcagaagtcagttttggcttttcttgattttctgttttgtagtgtatccatttctgtgatgtcatctttctcaggttgagattgttttgcatgaacacatttagcagatgctacccccagcagatgcaacccctctcagcctgcctccaaatctgggcttcttaaccagaaactgggttttttttggtagatccttgcttatttgatcttctttagtacataagttgattgacaactttatgtaaactctttcctgttatttgtttatttattcaattttcttttatttttttctttcctgttaagtttaaaacttctgtacattctcatttataatttgtattatatttaatatacatttaatataatgtatacatttaattaatgtagtttatatgtaatggatatggtattttatatttgttttctgtcttgaaattatagaaaataaaacgatataaaggcattttatggtgtttgttgatagcttattatattacattgaaaaggaatcaaactgctctcttgcattctaacttcaatatttacctaaatgttttttgtgtctgtccctttatttctgtttactctggtatctgcctgctgtcctcctcctacagagtacagaaataaataaagcaacacttgaatgcattttggtcagttaatatagaataattatcagtaatgtaattttatttattatggtaaactatgctaaacagatgaaatctttcatgaattaagcaaaattgctgatgagtttttctttatggcaatatactaccataaagttttaccatttcatattaaccagtaaccgtatttatccttgattaagtttcatgcttacaaaattttatttttttgtatattcttccttctttttacaaagggaaccatggaagataagatttatgatcggcaagtaactaagcagtcactgtcttttcgagttgttgatcagcagcaggtggagcgtcattttactatgaatgagcttactgaactttatacttttgagccagacttattagatgaccctaattcagaaaagaagaagaagagggatactcccatgctgccaaaggtaaacatatttagattattggcttaacaaaccaacgtggactaaggaaattttactactgatatcaaatttagtcatctgattaaggctatatttcagaatttttcaaggataataaaatgatatttaatgaattttgtctagaaaattataaatgatagggtgcttgatctgttctccatatagcaccacaaaaagatagtatattctgaaacacatattttatgccacatataatatatctaattagcatattttctaatatactttacacttcaacttttataagaagtagcagacaaattttccaattagaaaaggggaaattacttcgaatttattcatatggtgaatttcgggttgcaggaaaccagttaattttataaacgtgtattatttgctgactttgagaggtatactgtgagagaatactaagaaaaacaagacattgttcagattatctccctcaatccagcagctgaaaagcagatagtcctgttttcattttcaagatgaggaaactgaggttcagagaggctaggtaacttacccaagtttacacaccatattgtaaagctggtcttcaaatcatatctgaccaactcaaaagcattactcttaatcattataattttttgtcctccaaatggagattagaaagttattttcaaatacaagaagcaaagcagaggacctgggatttccagaattgaatgacatttaggatgctttattttagtttaaataaatctggactttaaaatatagaatgctttcacagtcagtaatattgtgtgatataactgttaagatggtataatatagtcagtttagcttatgtcttgtgaaggttaaatactcctcaaatttatggaaaactttaaggtttacaaaggcctgtctcatatacattatctcaggaagctgagatttagagtttgtgattacacaagggtacatgaccagtaagtgttacagctagaatttgaacccagtagttttctttctctcttctcccctccccctctctcccccacccccacctccctcctcccctctctccctctccctcttcccctctctccctctccctcttcccctctctccctctccctcttcccctctctccctctccctcttcccctctctccctcttcccctctctccctctccctctctccctctctccctctctccctctctccctctctccctctctccctctctccctctctccctttccccctctccctctccctctccttctacctctttttgagacagtctcactgtgtcgcccaggctggagtgcagtggcgcaatctcagctcactgcaacctccacctcctgggttcaagcgattctcctgcctcagcctcccaagtagctaggactataggcgcctgccaccacgcccagcaatttttttttctatttttagtagagatggggttttactatgttggccaggttggtcttgaactcctgaccttgtgatccacccacctcagcctcccaaagtgctgggattacaggtgtgagccaccgcgcctggtccttttttttgttcttttttcttttttactttaagttctgttatacgtgtgctgaacatgcagtttgttacataggtatacatgtgccatggtggtttgctgcacctatcaacccgtcatctaggttttaagccctgcatacattaggtatttgtcctaatgttctccctcccctttccccccaccccctgacaggccccagtgggtgatgtaaccctccccatgtccatatgttctcattgttcaactgccacttatgagtgagaacatgcagtgtttggttttctgttcttgtgttagtttgctgaggatgatggtttccagcttcatccatgtccctgcaaaggacttgaactcattctttttatggctgcatagtattccttggtgtgtatgtgccacattttctttatccagtctgtcattgatgggcatttgggttggttccaggtctttgctattgtaaatagtgctgtgataaacatacgtgtgcatgtgtctttatagtagaatgatttataatcctttgggtatatacccagtaatgagattgctgagtcaaatggtatttctggttctagatccttgaggaatcgccacactgtcttccataatggttgaactaacactcccaccaacagtgtaaaagcgttcctatttctccacatcctcaccagcatctgttgtttcctgacttatttaatgatcattattctaactggtgtgagatggcatctcattgtgaacccagtcgttttcaaactgtgttacaaggaaccccaggagatgctttagggactgctaccatgtggctaagcaagtacagaggggccaggcaatgaacactctgatcccgacatcccatttcagtcagagcccctcttttatctttttaatgtattggacttcaacataagatttaattcaaagagaggacgtgcctgctttttaaaaaaaagtttttaaaacacaatgccatgttgcctttctatcacagtaactaaaaactgtgagagatctatccaggaagtacaatcagatacctgaaggagctgataatccggttggggagaaaaaagtaacattcttaaaagggaaagaatgaagtgctgatgtgactggtgctgagtatctttgcttataataggggaaggatggagcattcagatacaattttgatgggagaaaaatcagacttggttggcctataaaagatggttagtatttaattggataaagggaagaatcaagtgtgaatgagagattgaacagtttgggcaaagggacagaggtaagaatttatgtaccaggcttaagggatgatgaaattggcctggcattgatgaagagtggaggttagataagtaggaaagccatgaaaggcaaatggaggcattgcgctttaaaataatgtttactataagttcttgaatgggactgttgtatgatgaatctgggcttttagaaaattagcctggagtgattattgtgggctcgatcagacatttcatgaaaataaatggtagaactcaactgataatagactagcttttaaagggataggcagcgaaaatgttttttttttctttgagacagagtctcactctgttgcccaggctggagtgcagcggcatgatctcggctcactgcagcctccgcctcctgggttcaaatgattcttgtgcctcggcttcccgagtagctgaggttatagacatgtgccaccacacccagctaatttttatatttttagtagagatggggtttcaccatgttggccaggctggtctcaaactcccgacctcagatgattcacctgccttggcctcccaaaatgctgggattgcaggtatgagctaccttgcccagccaaaaaattttatcttaaataatgaagcttagttattcattcattgatttaaactttttggggtgcctatgatatgccaattgtactggtctctaaggatacactcataaataagtctaggattctgttcccaagaagctatagtcttaaaagcttaccttaagcaagtaatatagtaagagttacagatcctataatagaaatctgtgcaggtgccaaggaaggaatattcatttctttcttggaaagtttgggatggatattgatgtgcttgaacagatgttgaaagtagaactgggtaactgtttgcattgctaagacggcagaagagcaaaaggcctttcaagatggggaatagaaaaaaagaagcacatgcataacatggcatgataagtttgaagaacctcaagtagttaaaaataaataagagtataaggagatactggtagagtaagggtgagtgtgggaagaggtaaaagtaaagactggaaaggtaggtgggaatcaaatcatagaaattagtttgtaagttgtgttataggttgtggtatctatttaacaattttaagcaagagactaccgtcacattttcattttagaaaaaaatcattttatgtatcagtgtggaggatggatcagagaaaagaaaatggatattaagatacttgttaggatgctactaaaatgattcaggtgggagaggtaatacaggcctgatatgagatgttagcagtggagacagagaagtactgggcataatatagatactcagtaattattaatgttcccttgatttataattagaatttcatgtaagatttccactagtttaatagaatttgaaaactggtcatctgaaatgggtacgttttgatattcatggcgagggatttcttggtacgtttggatattcatggtgatggattttttggtatttgaagctgcttttattcaaggtattttgaagttggttcctgttattatagtacaattgcaaacaccttccttcttgtccatgatttttaagatgaaagactgctaaaaatgatacattttcatcctttcaattgctgttatctaagtaataattaaattccatgcttttatgaggtttttttgtcttttggtagtcccgaaagcacttctttttaacttacttgatatgtgattactgtatctctttctgcttcatcacttcctccttaggtcattattacttaattcctgttcctccatttctcttcttgttcagtttttacttctctacttctaatttgatttaatacctcagacttaattagccacctgactatttttcttgtctttgtacctctttaaaggcaagaactgcattctgtgcttccttcagtatccttagtgaataatgcaatgcttggcacttttttattattattatactttaagttctggggtacatgtacacaacgtgcaggtttgttacatatgtatacgtgtgccatgttggtgtgctgcacccattaactcgtcgtctaggttaggtatatctcctaatgctatccctcccccctccccccaccccatgacaggccctggtatgtgatgttctccttcctgtgtccaagtgttctcattgttcaattcccacctatgagtgagaacatggggtgtttggttttctatccttgcaatagtttgctgagaatgatggtttccagcttcatccatgtccctacaaaggacaggaactcatcattttttatggctgcatagtattccatggtgtatatgtgccacattttcttaatccagtctatcattggtgggcatttgggttggttccaagtctttgctattgtgaatagtaaacatacatgcgcatgtgtttttctagcagcatgatttataatcctttgggtatatacccagtaatgggattgctgggtcaaatggtatttctagttctggatccttgaggaatcgccacactgtcttccacaatggttgaactagtttacagtcccaccaacagtgtaaaagtgttcctatttctccacatcctctccagcacctgttgtttcctgactttttgatgattgccattccaactggtatgagatggtatctcattgtggttttgatttgcatttgtctgatgaccagtgatgatgagcattttttcatgtgtctgttggctgcataaatgtcttcttttgagaagtgtctgttcatacccttcactcacttgttgacggggttgtttgtttgttttcttgtaaatatgtttgagttcattgtagattctggttattagccctttgtcagatgggtagattgcaaaaattttctcccattctataggttgcccattcactctgatggtagtttcttttgctgtgcggaggctctttagtttaattagatcccatttgtcaattttggcttttgttgccattgcttttggtgtcttagacatgaagtccttgcccatgcctatttcctgaatggtattgcctaggttttcttctagggattttatggttttaggtctaccatttaagtctttaatccatcttgaattaatttttgtataaggcgtaaggaagggatccagttccagctttctacatatggctagccagttttcccagcacaccatttattaaacagggaatcctttccccatttcttgtttttgtcaggtttgtcaaagatcagatggttgtagatgtgtgatattgtttccgagggctctattctgttccattggtctatatctctgttttggtaccagtaccatgctgttttggttactatagccttgtagtatagtttgaagtcaggtagcgtgatgcctcccgctttgttcttttggcttaggattgacttggcaatgcggggtcttttttggttccatatgaactttaaagtagttttttccaattctgtgaagaaagtcattggtagcttgatggggatggcattgaatctttaaattaccttgggcagtgtggccattttcatgatattgattcttcctatccatgagcatggaatgttcttccatttgtttgtgtcctcttttatttcattgagcagtggtttgtagttctccttgaagaggtccttcacatcccttgtaagttggattcctaggtattttattctctttgaagcaactgagaatgggagttcactcatgatttggctctctgtttgtctcttattagtgtataggaatgcttgtgatttttgcacattgattttgtatcctggactttgctgaagttgtttatcagcttaaggagattttgggctgagacaatggggttttctagatatacagtcatgtcatctgcaaacagggacaatttgacttcctcttttcctaattgaataccctttatttctttctcctgcctgattgccctggccagaacttccaacactatgttgaataggagtggtgagagagggcatccctgtcttgtgccagttttcaaagggaatacttccagtttttgcccattcagtatgatattggctgtgggtatgtcataaatagctcttattattttgagatacgtcccatcaatacctaatttattgagagtttttagcatgaaggttgttgaattttgtcaaaggccttttctgcatctattgagataatcatgtggtttttgtctttgcttctgtttatatgctggattacgtttattgatttgcatatgttgaaccagccttgcatcccagggatgaagcccacttgatcatggtggataattgcttggcacttttatctagacttttttgaaattctagttgtctttatagtgttccttagtgatccatatatcattgaaaagcagtgttggaattagacttacttttcaagcagtaaaattgagatgaagattggttagtctgtcacagtgggtttgtggaaggaagagaattcgagctttaatttatatcttcagttagattcttaatttgctatcttagcttcattcaccactctactcattactttattatttttattttattttatttcatttcatttcatttcatttcatttcatttttgagacaaggtctcgttctattgcctaggctggtcctgaactcctggcatcatgtgatcctcctgccttggcctcccaaagtgttaggattacaggcatgagccactatgcctgtccactttattattttaaatcccctcattggattcttactgttgctgcttttcccttttggaaatataatagccttgacgtcctgtgaacctattttttaataagttgatttaagggcctcctgaatcatctctaccaagtatctgtgcatctttttagttgttcaggataatgtttctcagccattttgaaactgtagcatgatctagacttataagtagtttaacacaagtttctagcaataccgatttgttaacttattcttaatggcttgtgtttaaaatgttaaattaatagctaacctctgttaacgtttatgtaaatgttaaattgatagctaacctgttaacatttatgtaaattatgttagagaaagtaccttttctggtaataaacttattaattatacagatatcagagatgaaaattttggtcaaggtcatgttttattttattttgagacagtctcactctgtcacccaggatggagtgcagtgctgcaatctcagttcactgcaacctccgcctctggggttcaagtgattctcgtgcctcagccacctgagtagctgggattacaggcatgcgccaccacgcctggctaatttttgtatttttcatagagatgggctttctccatgttggccaggctggtctcgaactcctggcctcaagtgatcgacccacctcggtctcctaaagtgctgggattacaggcatgagtcaccacctgcagccaaggttatattttataatatgcttaagtgggtgttttgttcctcttaagtacagtatacacagcctactctgtaccttttattaagaaaacaaaagccaataaaactggcatagaaatgtttttatacttcccttttccagcactggactacgtatgtctttttaaatgtgaactacttgatgattacagggagaacaaaatggggatttaaattaaagtatcttaagtgaggctttaggtttgttttctctacgctgaatttgtgtgcagtgttctcccctttctttagtcctgtattcaaactttaatacttcaaagcataatttactgaacagagatgttattgtacagttttattagccggcagatggtaatataaggtttcaccttagtcattcttaataccagtgtgaaatacattccattaaaataatttgatgtaaagtatgaaatagctaatccacttatttcaggaactttctggtaacctgcctacatttacttttgagaataaaggttcaaaataacacatttaattgtagagcaagtgttagtagcctatggggtatgaaccacatggtggtatgtgaacctaatatttgttgtcatattcttctaggaagccatgctcataattgaagcatatataaggtttgatgtcattgtctcctacttctttgccttttttttaatcacaggttttggatttttttgtttaataaaacaagtttgaatattattcctatctttgtatttactagtataaaatgattgttattcatctgtatatgaatagaccaccagaaaaaataacgggcatcagaaaaattgtttgaattctaccatttctttgcagattacaaaagtgtcctattcgttttttgttggggtgattgatgccaagtaaaaagagcagcttgtttaagccctctcctaaataacttgccaaccacccttttcagatgtaatcttaggcaaaccatgtaagctttctaagcctcatttttctgaagaaaataagaatagtgccagtacttctctcacaaaggaggtaattcatgtaaacatactacctagcacatagtaagtgttcaaatgttagctgctgtttttgtttccataattgttattaatattaccattatagtaggttcatttctctgaaatacttatggacttacatttttggaatttcagaggagtcatgtgaggtcctgatcctgagtagaaaattaagcttgatatatgacagaccagtagaaaactaaaaacatttaggagccagaggagatcatctcagctaagctgcagaagacataggtatttgaggcttgcattcccccagagatcagttgtaatcaggaaggaatatattagatattgatcttcactttcaataaagttagcatgcagttgacaaagaacattgaaaggggttttttttcttaaataatataagcaactttagaataaagtctaccttatagccagctgatgcttctgtagtaattttccaaagtaaagagatgcttctattttccctccacaaactacacaataaatacttgttaacagactgaccatactttatttatagtgctgttttgtcttattttttattgtaccaccttatgacacaagaaaaactattaaggagccatttaccaagtcttttagggaaaacatttgggttacagaaaccatggagccaatgataccctgagatggcagcctccctaacgctggcaagctgtcttataaataattgtccatggaaacatcaatgtagataaggcagccttgctggcagtgttggggtggagggcagagttggggatggtatgcaagattctattggggagagtttaggatagactttaaaaagtgtctccttatggagagttggaagtactagaaatatttgctgcttaaggtcatagaaatcctgaaatttaaaataccaggtttgcatttaataaatgctcatttaataaatgaattaaatggtaagcttttttactttataggcaaattaaaatatctattctctctagaatatgaacttcctattagcctaggaaggcaagaactatattaatgcatcttcatcactctatccccaatacctggcataatacataatatagcacatagcaagtattcaataaaaatgtgctatgtgaacaaatgaatttttgtgctaaaattgcaagctaaatgttgtgaggcaatagttgacatgcctttgaaatagtgtttttccttgtgtgtacttcttggagaatcacctggtggcttgattaaaaatgcagattcctagtcggacacagtggcacacacctctaatctcagcactttgggaggccaaggtgggaggattgcttgaatccaggagttcaggatcagcctggtcaacgtggcaagactctgtctctacaaaaaattagccaggcttggtggcatgcacctgtagtctcagctgttttggagactgagttgggaggatcccttgaacctaggaggtcgaggctgcagtgagcaagtttgtaccactacactccagcctgggtgacagagtgagaccctgtctcaaaaaaaaaaaaatgcagattcctggcttcatctaagacctactgaatcagaatttctggaggtaggccttgggaatctatttttgacaaggtctaccactcttgtgtgtacaaggtatgtagtagtataatttgcctttacaatagttatcagctaaacctttgaattaaaaaaacaaacagtatctaagctttattgagcaatgtttatgccaggaactgtgctaaggattttactagcattaccttatttaatccttacaaagcaggtacaattttttctattttctgatgaaattatggcatggaaagtggtggcaccggggcttgaactcagtgctgtgactccagactccacactctttaaccattacactatactatcctgacattaatattctatatgattaagcttgcggagaagtaaattgaggtttgatatgactttacaccgttttaatcaatactgtgggtttatggaaaggcacagtgttatcaaggtgtataatattggggagggtatggatttcatctagttactacacaatcttacagtgtcagagctgatcctagtcctccttgattgtctttggtgctgaacttactgatccttagccctaagtcagtgtagcagagtggttaaggacaggggtcctggggcaagaccagggtttgaatctttatcttagtcaaaatatctgacttctatgcctcagttttttcattatacttctgagaaatgtatgtccattagttcttcaaaaatatcatcctttgcatttttatttttgtctctttctgagactgttactatctgaatgcctgctcttctagcctccatatcttttagcttttcttttgcattcctatttctttattctttcttactatcttctggaagagtatctcagtcttatctcctaattcactaagatattcaactgtaccccgcttgctgtttatactgagttattttttcaactgttatttttttttcctaatatttcatttagactcttaaatttgtttgaattccatattggtaatatcttcctttatttcatctgtttcagtaactatgttttagataaaatatgatgccagttgttaccccagggatgtctgtgtgtgtgtacatgcacatatgcacacattgtctataagtttctggaattcatattgccttttcccttctatagtttctgcagagttggttttgagggcaggagctagcagctcatgctggtttgccatgggagtagtttcgtccataatatggggatgatgattatatgtgcttcatagagttattatgaaaaattaaatgaagttcttagaacagtgctggtatgcagccatgcattcagtttagctttaaacaaatctacagatggctaagtttccagatcccaactttcgaatatactcttttgaaaagctagattatggttttgatttgcatttctctgatggccagtgatgatgagcattttttcatgtgttttttggctgcataaatgtcttcttttgagaagtgtctgttcatgtcctttgcccactttttgatggggttgtttgtttttttcttgtaaatttgtttgagttcattgtagattctggatattagccctttgtcagatgagtaggtttattcacgatagcaaagacttggaaccaacccaaatgtccaacaatgatggactggattaagaaaatgtggcacatatacaccatggaatactatgcagccataaaaaatgatgagttcatgtcctttgtagggacatgggtgaaattggaaatcatcattctcagtaaactatcgcaagaacaaaaaaccagacaccgcatattctcactcataggtggaaattgaacaatgagatcacatggacacaggaaggggaatatcacactctggggactgttgtggggtggagggaggggggagggatagcattgggagatatacctaatgctagatgacgagttagtgggtgcagcgcaccagcatggcacacgtatacatatgtaactaacctgcacaatgtgcacatgtacgctaaaacttaaagtataataataaaaaaaaagaaaaagaaaagctagattatagagctaatcagaagggggaagggtactgaccctctcttttagagtttgagctgtcccaggattctgccatatattctaatgttttctgtctctcttgttgcaaggaaaatatgaaaaaaattgttaattaattttcaaaaattcccattgtgaacatattcaaaccagaaaaatatattcatatacccatccgctagatttaccaattattgttttgccacatttgcctcatctatttttctgaaatcttttaaattacaagtatatggcatttcacttgtaaatacttcagtatataatacatctttgaaatagtaagacatttcttatataattacaataccataaaatgaataacttcctaattccctaacaccatctcataacacatccatattttgattaccctgcttgtgtccaatatatatatatatatatttaatattctaagttctggggtacatgtgcagaaagtacagttttgttacatagttatacacatgccatagtggtttgctatacccatcaacccgtcacctacattagatatttctcctaatgctatccctcccctagatccccacccctcaacaggccccagtgtgtgatattcccctccttgtgtccatgtgttctcattgttcacctcccgcttatgagcgagaacatgtggtgtttgattttctgttcttgtgtcagtttgcagagaatgatggtttccagtttcatccatgtccctgcaaaggacatgaactcgttcttttttatggccgcatagtattccatggtgtatatatgccacgttttctttattcagtctgtcattgatgggcatttgagttggttccaagtcttcgctattgtgaatagtgccgcaataaacatatgtgtgcatgtatctttatagtagaatgatttataatcctttgggtatatacccagtaatgggatcgctgagtcaaaatggtatttctggttctagatccttgaggaatcgccacattgtcttccataatggttgaactaatttacactcccaccaacagtgtaaaagcattcctatttctccacatcctctccagcacctgttgtttcctgactttttaaagatcgccattctaactggcatgagatggtatttcattgtggttttgatttgcatttctctaatgagcagtaatgatgagtattttttcatgtctgttggctgcatatatgtcttcttctgagaagtgtctgttcatatactttgcccactttttgatagggttgtttttttcttgtaaatttgtttaaattctttgtagattccggatattagccctttgtcagatgagtagattgcaaaaattttctcctgttctgtaggttgcctgttcactctgatggtagtttcttttgctgtgcagaagctctttagtttaattacatcccatttatcaattttggcttttgttgccattgcttttggttttttagacatgaagtctttgcccatgtcctgaatggtattgcctaggttttcttctaggatttttatggttttaggtcttatgtttaagtctttaatccatattgacttaatttttgtataaggtgtaaggaaggggtccagtttcagttttctgcatatggccaaccagttttcccaacaccatttattaaatagggagtcctttccccattgcttctttgtgtcaggtttgtcaaagatcagatggttgtagatgtgtggtgttatttctgaggcctctgttttgttccattggtctatatatctgttttggtaccagtaccatgctgttttggttactggagcattgtggtatagtttgaagtcaggtagcatgatgcctccagctttgttctttttgcttagaattgtcttggctttgcaggctcttttctggttccatttgaagtttagagtagttttttccaattctgtgaataaagtcagtggtagcttgatggggacagcattgaatctataaattactttggtcagtatggccattttcacgatattgattcttcctatctttcagcatggaatgtttttccatttgtttgtgtcctctctttatttccttgaacagtggtttgtagttctccttgaagaggtctttcacatcccttgtaagttgtattcctaggtattttattctcttagtagtaattgtgaatgggacttcactcatgatttggctctatgtttgtctgttattggtgtatagaaatgcttgtgatttttgcacattgattttgtattctgggactttgctgaagttgcttatcagcttaaggagattttgggctgaggcgatggggttttctaaatatacaatcatgttgtctgcaaacagacaatttgactttctcttttcctatttgaataccctttatttctttctcttgcctgattgccttggccagaacttccaatactatgttgaataggagtgatgagagagggcatccttgtcttgtgctggttttcaaagggaatgcattcagtttttgcccattcagtatgatattggctgtgggtttgtcataaatagctcttattattttgagatacgttccatcagtacctaatttattgagaatttttatcatgaagggttgttgacttttgtcgaaggtcttttctgcatctattgagataatcatatggtttttgtcattggttctgtttatatgctagattacatttattcatttgagtatgttgaactagccatgtattgcagggatgaagccgacttgattgtggtggataagctttttgatgtgctgctggattcggtttgccagtattttattgaggatttcatggatgttcatcagggatattggcctgaaattttctttattttgttgtgtctctgccaggttttggtattcaggaggatgctggcctcataaaatgagttagggaggattccctctttttctattgattggaatagtttcagaaggaatggtatcagctcctctttgtacctctggtagaattcagctgtgaatccatctggtcctggacttccttttgtttgtgggctattaattactgcctcagtttcagaacttgttattagtctattcacagattcgacttcttcccggtttagacttgggagggtgcatgtgtccaggaattcatccatttcttctagattttctagtttatttgcaccaaggtgtttttagtattctctgatgttagtttgtatttctgtgggatcagtggtgatatcccctttatcattttttattgcgtctatttgattcttctctcctttcttctttatcagtctggctagcggtctatctattttgttgatcttttcaaacaaccagctcctggattcattgattttttttgaaggtttttttatgtctctatctccttcagctcttctctgatcttagttatttcttgtcttctgctagcttttgaatatgttgctcttgcttctctagttcttttaattgtgatgttagagtgttgattttagatctttcctgctgtctcttgtgggcatttagtgctataaatttccctctacaggctgctttaaatgtgtcccagagattttgatacgttgtatctttgttctcattggtttcaaagaacttctttatttctgccttaattttgttatttacccagtagtcattcaggaggaggttgttcagtttccatgtagttgtgcagttttgagtgagtttcttaatctcgagttctgatttgattgcgctgtgttctgagagactgtttgttatgatttccattcttttgcatttgctgaggagtgttttacttccaattatgtggtcaattttagaataagtgcaaggagttgctgagaagaatgcattgttctgttgatttagggtggagagttctgtagatatcttttaggtccatttggtccagagctgagttcaagtcctgaatatccttgttaattttctctcattgatctgtctcatattgacagtggggtgttaaagtctcccactattattgtgtgggagtctgagtctctttgtaggcctctaagaacttgctttatgaatctgggtgctcttgtattgggtgcatatatatttaggatagttagctctttttggtgcattgatccttttaccattatgtaatgcccttctttgtctcttttgatctttgttggttttaaagtctgttttatccgagattagcattgcaactcctgcttttttttgctttccatttgcttggtaaatattcctctatctctttgttttgagcctatgagtgtctttgcaagtgagatgggtctcttgaatacagcacaccaatgggtcttgattctatccaatttgccagtctgtgccttttaagtgggggaatttagcccatttacatttaaggttaatattgttatgtttgaatttgatcctgtcattatgattctagctggttattttgcccattagttgatgcagtttcttcatagcgttgatggtctttacaatttggcatgtttttgcagtgtcttatactggttgttcctttccatgtttagtgcttccttcaggagctcttacaaggcaggcctggtggtgacaaaatctctcagcatttgcttgtctgtaaaggaatttatttctccttcgcttataaagcttagtttagctggatatgaaattctgggttgaatattcttttctttaagaatgttgaatattggcccccattctcttctggcttgtaggatttctgcagagagatctgctgttagtctgtggtggtcgtttctgtttgttatgtctcttttttttttagcgtattcattttctcaccctccattctggatttgtttgattatttcctggcggtgtttgaacttattctacctcttatatgttctacctcttatatatcctgtacactagaaatcagaaattagatgtaaaggcttgattagatttatgacatacatttttggcaagaatgtcttaggaatgacatgtaaaaaggggttaatatttttttaaaaaccagtatgggaaagggagtaatatatatattgagtgcttatactatctacttttaaatacattgtctcatttactccttacaatagctctgagctatagatgatattattcctttgtagtaaaggatcgcccaactattaaggagcaaagtggccaggtgcagtggctcatgcctgtaatcccagcactttaggaggccgaggcaggcggatcacgaggtcaagagatcgagaccattctggccaacatggtgaaaccctgtctctactaaaagtagaaaaattagctgggcttggtggtgctcacctgtagtcccagctactcgggaggctgaggcagtagaattgcttgaacccaggagacggaggttgcagtgagctgcgattgcgccactgcactccagcctggcgacagagtgagactctgtatcaaaaaaaaaaaaaaaaaatggagcaaagttagcattcagaaagagaagaaaataaatccaacaaggccctttacctttacttaaacttaaaaattactaacaaatcacttaatgtctgcgcctcagtctctggtaaagtaagagcagcaaattaacttacttccaaagtttcttatagttccaacattatttgatcctcacaattgctcaggctactgtgtttttcattttaggtaatgagaggtgttctttatgcatcagctaacttttttaatttaaaaatttctttatttttatagatttagggagtacaagtgcattgtttttaaacagatatattgcacagtggtgaagtctgggtttttagcgtaaccatcacctgaatagtgttaattgtacacaatacgtaatttcttatccctcatctccctcctaccctcccaccttttggagtctctagtgtctattattccattctgtttgtccctgtgtgcacattgtttagcccccacttataagtgagaatatgtagtatttgactttgtatttctgagttatttccttaagataatggcctctctagttccatcaatgttgtggcaaaagacatgatttcatttatttttatgtctgagtagtattccatggtgtgtgtgtgtgtgtgtgtgtgtgtgtgtgtgtgtttgtgtgtgtatacacacatttccttttttatccttcagcttttaagttcgggggcacatgtgcaagatgtgcagatttacatgggtaaacgtgtgccatggtggtttgctgtacagatcacctcaacacctaagtattaagcccagcatctattagctattcttcctgatgctctccctcccctcaaccctcaccccgacagtccctagcgtgtgttgttcccttcaacgtgttcatgtgttctcatcattcagctcccacttataagtgagaacatgcacataccacattttctttatccagtcatccattggtggacacttaggctgattccgtgactttgctattgtgtatctgctaagtttttaaaaatacatatatatatattcaggacaggtaataactattggtctttccaaagttatgacagccatatatctaggattttcttggacaactccaatatcagataatttgtcctgtcaaacatctcaattttttattagaaaaacttggttagggtgtaaaacacctctgtatagaaatatgttttttttttaagagatagagtctcactatgttgcccaggctggtcttgaactcctcagcccaagcaatcctcccgcttcagcctcccaagttgctgaatctacaggcgtgcaccaccatgccaggctcttttctttctttttttttctttttaaggtgagggtcagctttcacactattagaaaaggtgttagaaataatagaaagtggtaaataacaccagtagagttctcccagaagccagccaagagaagagagtattttgatgaagagagtgattaaattctgtcacatgttactgatgagtaagataggatcaggtctgataattgaccaattagatttagtgacacaaaggtcattggtaaaccaggcactgtactcagcacttcatgtgtagtatttaatctccacaataatcccatgaagtagatgcttagtagcccattttatataccagaagactgagggttcagcaagttaacttgctcaaggacaaagggctaataagtggtggaactaggattaaaatctgcttgagactcactgttcaatacaagagccactagctccatatggctacttacatttacattaaaattaagttaaaaaatcagtttctccatcacattagtcacacttcagatactcagtagtcacatgtggcttgtagctactgtcttggatagtgcaaacacagaacatttccatcgttgcagagagtactattagagagcagtattccagagcctgtgatcttaatcactacacctaaagcctcccagttgacaaagttaccacctttttttggtgtgtgtgcacgtgcgtgtgtgtgtgtgtaagtatatataatttaaatcattccattaaatttacctctgaaattcaaaagactgaaacagatcttctttttatcaaataagttgattgcagagattatattggtgtttacatttcaggcaacctgctcatgaaattatccattgtagagagaaacctgggaaacaaagctatacgtcctttaatttttttccccattttcatttaaagttcagaagaacataatatgttggaatgatcaatgattctgaattaatatagatatttgaatgtcacagtatctgtatattaatatcctaaagtggtgttactatattggttaggttgactgattcatacatgtaagtcttttaacactcctggagtaagagtagcaagaaactgaagctatgatccttttaagggtttaagtaggtgaatacctcacttttgtctcttccattactagtgttttcatgaccaagttttttacatcagatttattattttggacccttaaaggaatataaattgcaagagagattttgatcagtgtaagaattactagatggccttatttatttccttctttattattgtacttcttatcttttattaatgttttctttctctaagatatatttgaaagccaggcatggtgacacacccctgtagttccagctactcaggagactgaggcaggaggattgtttgagctcaggggttcgaggctatgtagtacataatcacacctatgactagccactgcattccagcctgggtaacatagcgagcccctgtctcttaaaaaacaaaagatgtggccaggcatggtggctcacacctgtaatcccagcactttgggaggctgaggtgggcggatcacttgaggtcaggggttcaagaccagcctggacaacatggtaaaaccctgtatctacaaaaatacaaaaaaaaaaaaacacaaaaaaattagccaggcatgtggtggtggcaggcgcctgtaatcccagctacttgggaggctgagccaagataattgcttgtacccaggaggcagaggttgcaatgagctgagattgcgccactgcactccagcctgggtgacagagtgagactctgtctcaaaaaaaaaagacataatttaaactgctaaatagctgctttcattcctatttcatatcttctgtttcctttttacattgtacctataattgagttagagaatgtaacaatgtttgtgaaatgttaactcaagattgtgtagaatgaaaattgagtttcgattcaggctatacttggaaagctgcaacctctagaatgtcactgcagtcatataaaatctagaatgatgactttctacctcacagtggcatgtggcatatgtaatagttgtaatggatatccaatttttaaaggtaaattgctaaatatagtatctagttctttaagtgttaaggagaaaacattcttatcaaaggaggcttttaccttccacctaagtcattttggcaggcctgccttttctttcatttaaagtgataagttctgtagttgtcactatcttattcataccaacaatttgggaatctggatatatttataaatgctctttggcaaaggttatgtgctcgtgaccaaaaaatctgatacaaggtgttatgtgaatttcattcaataagctctctagttacttatcaaattcactgcattttttccagcgtagtttgggaagaaagaaccttcaaatttgaaagtagaggctttttgaccaggaatattaaatttctttactaagaagctagatttatttaagcaataaaaggaatttttcatagctttttgagtgggtcatgtggcagttaagtattctggtgattttatttccagatattacaaaactcaaattgaaagtaatggcaagcaaaatatttttgaaacatggcaaaccccctcccttacccccaggcaaagccttgattatttttttagatattttattttcaaggttgaatttcagaattaattagatgggaatttttgtcagcttgccaaatactttaaacttctaagtaaattaacttaaacttataatttatcattaattttgttttattaattgaactagtcgttttaaaagcttaaactaatttagattgtgagctagaatatagaccttgcttttccctgtgtataagctttttcacttatttaaggaaaaaaaagtttagacaaagaaaagtaaaggtacacatttggatgtaatttaaatctcattttgatgactgttggcttagtgattatagattctgctccactattgttttcaataatagtgttactctagcaactaatataaatgcatgcttttacaggataaaacaaaaacctttccaccagttgtgttgtgtattgggatgaaattttctttattaacttttataacttgctctggactttgcaaaactgttttttcccaaagaaataatctgaagatcctgttacaaatacttttttgtccccttaatttcattatttgtttcttatattgatagtatgctgctattaatttaaaaggggaagatttagaaacagtttgtatcagaaatcctatgtcttttttttctcttattcatgtcttacatagcactctggaggaaagaaagacttctgccttcctgcttatgaactacataaatgattttcaatttaaaaaaccagttaacttacttgcacggtcttttctttgttaaaatgaaaattatggaaagcatgcttatctttagtctttgaattttttggcataatcatataaagaagtgattgaaatacattaaactttattcattaacccttgttcgcagatttggtaataaaaactggaagcagtcttaatgttttaataaactcttaagtaagggaatgattaaatagatgataaagtataactatataagcactgtgcagctattagaaatgatgaaggtttggatttgatgtaaaatgatatccacggaaaggtattaagagataagagtatgtttcaaaactacatatacttcaattccattttttttctttcaacttttaagttccagaatacatgtgcagctttgttatgcaggtaaatgtgtgccatggtgggttactgcacagatcatcccatcacccaggtattaagctcagcatccattagctattcttcctgatgcactccctcccccaaccccccacaggtgccaagtgtgtgttgtccccctccatgtgtccatgtgttctcatcgatcaggtcccactttataagtgagaacatgtggggtttggttttctgttccttcattagtttgagaataatggcttccatctccatccatgtccctgcaaaggacatgatcttgttcctttttatggctgcatagtgtgtatatgtaccatctggtatatgtaccacattttctttatccagtctatcattgatgggcatgtaggttgattccatgactttgcttttgtaaatagtgctgcagtgaacatacgcatgcatgtatctttataatagaatgatttctattcctttgggtatatacccagtaatgggattgctgggtcaaatgttatttctgcctctaggtctttgaggaatcgccacactgtcttccacaatggttgaacaccaacagtataaaagtgttatttttctccacaacttttccagcatctgctgttttttgactttttagtaatagccattctgattggcatcagatggtatctcattgtagttttgatttgcatttctctaacgatcagtgatgatgagctttttttcatatgtttataggctacaagtgtgtcttcttttgagaaatgtctgttcatgtcctttgcctactttttaatggggttgtttctttctcatagatttgtttaaatgtcttgtagattctggatattatacctttgtaatatagatagattgcaaacgttttcttccattttgtaggttgtctgttcgctctgatgatcgtttcttttgctgtgcagaagctttttagtttaattagatcccatttgtcaattttggcttctgttgcaattgcttttggtgtttttctcatgaaatctttgcccatgcctatatcctgaatggtattgcctagattttcttctggggtttttatagtttggagttttacatttcagtctgtaatccatcttgagttaaattttgtgtatggtgtaaggaaggattctagtttcagttttctgcatatggcttgcctgttctcctagcaccacttattaaatagggaatcctttccccattgctcgttttggtcaggtttgtcaaagagcagatggctgtaggtgtgcagtcttatttctgggttctctattctattccattccattggtcgatgtgtctgtttttgtaccagtaccatgctgttttggttactgtaggcttgtggtatagataaaatcaggtagcatgatgccttcagctttgttctttttgcttaggattcattggctatttgggctcttttttggttccatatgaattttcaaatagttttttttttctaattctgtgaagaattgtcagtggtagtttaatgggaatagcattgaatctgtaagttactttgggaagtatggccgttttcacactattgattcttcctatccatgagcatggaatgtttctctatttgtttgtatcctctctgatttccctgagcagtggtttgttgttctccttgaagaggtccttcacttcccccttgctagctgtattcctaggtattttattctctctgtagcaattgtgaatgagagtttattcatgatttggctctttgcttgcctgttgttggtgtataggaatgctagtaatttttacacattgattttatatcctgagaatttgctgaagtttcttatcagcttaagaagcttttgggctgagacagtggggttttctagctatagggacatgtcatctgcaaacaaagatattttgacttcctctcttcctatttgaatatactttatttctttctcttgcctgattgccctggccaggacttccaatactacgttgaataggagtggtgagagaaggcatctttgtcttgtgccagttttcaaggggaatgcttccagcttttgcccattcagtatgatattggccatgggtttgtcgtatattgctcatattattttgagatatgttccttcaatgcctagtttattgagagttttaaacaatgaaggcatgctcaattttattgaagatgttttttgcatctattgagataatcatgtggtttttgtgtttagttctgtttatgtgatgaatcacatttatttatttccatatgttgaaccaaccttgcattccagggatgacgccatcttgatcatggtggataagctttttgatgtgctgctggtttcattcagtttgccattattttattgaggatttttttgcatcaatgttcatcaaggatattggcctgaagttttctttttttgttgtatctctgccaggttttcatatcaggatgatgctggcctcatagaatgagttacggaggagtccttcctctgtaatttttggaatagtttcagtattcagctcctctttgtacctgtggtagaattcggctatgaatccatctggtcctgggctttttttggctggtaggctatttattactgcctcaatttcagaacatgttactagtctattcagagattcagttttttcctggttcagtcttggagggtgtgtttgtccaggaaattgtctgtttcttctggattttctagtttatatgcgcagaggtatttatattattctctgacggttgtttgcatttctgtggggtcagtggggatgtcccccttatttctgattttattttttatttgatttttattttatttgattcttctttcttttcttcattagcctagctagcggtctaactattttattaatttttttaagaaaccacttcctggattcgttgaatttcttttgttattttttttttcttaggggttttccatgtctctgtttgcttcagctcagctctgatcttagttgtttcttgtcttctgctagctttggggtttgattgctcttggttctctagttcttttagttgagatgtttggttgttaacgtgaaatctttctagttttgttttgtttgtttgtttgtttgtttgtttgttttgagacggagtctcactctgttgcccaggttggaatacaatggcacgatctcagctcactccaacctccgcctcctgggttcaagggattctcctgcctcagcctcccaggtagctgggattacaggtacctgccaccacgcctggctaattttttgtattttttagtagagatggggtttcaccatgttggccaggctggtctcgaactactgacctcaagtgatccacccgcctcagcctcccaaagtgcagggattacagacgtgagccactgtgcccagtctttctagctttttgatgtgggcattttagtgctataaatttctctcccagagattctgatgtgttttctctttgttcacattagtttcaaaaaatttcttgatttctaccttaatttcattatttacccaagagtcattaaggagcaggttgttcaatttccatgtagttctgtggttttgagtggatttcttattcttgagttctaatttgattgcgctgtggtctaagagactgttatgatttcagttcttttgcatttgctgaggagtattttcctattatgtgataaattttagagtatgtgttgtgtggcaatgagaagaacgtatattctgttgtttttgggtgaagagttctgtaaatatctatcaggtccacatgatgcagagctgagttcaggtcctgaatatcctcgttaattttctgtctcaatgatctaatattgtcagaggggtgttaaactctcccactattattgtatgggagtctaattctctttgtaggtctctaagaacttgctttatgaatctgctttagcatcatcgtgatgctagctggttattttgcagacttgtttgtgtggttgcttcatagtgtcactggactgtgtacttcagtgttttttttagtggctgataatggttttttctttccatatttagtgcttccttcaggacctcttgcaaggcaggcctgctagtgatgaatgccctcagcatttgcttgtctaaatgggatcttatttctcctttgcttatgaagcttggtttggctgtatatgaaattctgggctggaatttcttttatttaagaatgttgaatattggcccctaatctcttccggcttacaggttttccactaagaggtctgctgttagtctgatgggctttcttttgtgtaagtgacctggcctttctctctggctgccctcaacattttttctttcatttcgaccttggataatctgatgattatgtgtcttggggttgatcttctcgtggaatatcttactggggttctctgcatttcttgaatttgaaatttggcctgtcttgctaggttgtggaagttctcctcgatgatatcctaaagtatgttttccagcttggttccactctccctgtcagttttagggaccccagtcagtcgtaggtttggtctccttacataatcacataattctcagaggttcattccttttcattcttttttctctattcttgtctgcctgtcttatttcagaaagatagtcttccagctctaagattctttcctcaccttggtctcttctgctattgatagtttgcattgtgaagttctcatgttgtgtttttcagctccatcaggttggttatgttcctctctaaactggctattcttgctatcagctcctgtattgttttatcgtgattcttagcttctttgccttgggttaaaacatgcttttttttagcccagcgatatttgttattactcaccttctgaagcgtatttctgttatttcatccttctcagcctcagcccagttctgtgctcttgctggagaggtgttgcagtcatttggagaagaaaaggcactctggctttttgagttttcagcatttatgcattgattgtttctcatctttgtgggcttatctacctttgatccttgaggttgctaacctttgaatgggttttttttcggggcctttttttgttgttgttgacattgctgctgttgttttctgtttgtttgtttttcttttaacaatcacgccaccctactgtagggctcctgtggttagctgggggtttgctccagaccctagtttcctcggcttctccagcacttgcaggaggcggctggcaacctgcactggaagatctcacccagtcaggagggatgggatcagggacccacccaatgaagcagtctggttgcttcttggtagagcaggtgtgttgcactggggtggacccttttcttcctctgtaccacctgtattctccataaccagcaagctgaaatggctgatttaacggaagcacagagatggccgctggccctcccctggggagctccctcccatggagagatcagatctctgtctgcaggagtgggtcgggacctgtcaaagaagcagtctggctacaatctggcaaggcagctgcgctgtgccttgtgcggggaaggagggggtgctccttgtctgggtggtctgcactctccacaacggggaggctggaacaactgagtccccagaaaccacagagatatcagccgccccccacccccccaccacccccagctccctcccagcgagagatcagatctctgaccctgcatgggaagtcctgctcagtttggagtgggtccgtctggttgaagaagcagtctggcccccttatctggcaaggccactgcactgcgctgtgggcggcccctcctcctctgggccgtgtccactcttcacagctggcaggctgtattggctatttcccctgaattgcagagatggcgaccgcccctcccgctggaacttggtcttgtctcaggcggacttcagccctctgctgttggctagctgagattccaagccagtgggtcttagcctgtgaggtgcgatggaaatggggcctgccgagccatgctgcttggctccctgtattcagaccccttcctagggatgtatatggatggattttatgccttggcggggatcccggggcaggagcatgcagaactcccagatctctgtgtgcgcctgagctgctgttttgctgagactccacacagctctgtgtatcagacccaaggtcctggtggaatgggttcacaacaggatctcctgctccgcatgttgcaaagatccatgggagaagcgtggtggcttcctgagcgggttgcacaatcactcactgcctcccctggctgggggtgggggttccttttgctccacgtggctcctggatgggccgtagcccttctccttgctctccatgctttttgcctattcagtcccaatgtgagaacctggatatttcatttgaaggtattggattcattcaccccttttcatgcctctctgtgagtgccacagaccacagctgcttctcatcagccatcttgccctttgtccagttccatttttatgcaaaggtgtgtgtgtgtcaatgtgtggaggaataaaataaaaaatggtactggtagttatttcctggttttgtaattggatgttagtattgtttgcatttctttgttttgttcggttctttgaaaagaggattatagtagccaggatggaggtaatgttttaggcaaaaaatctgaaactttttaagatagaaaacaaacaaattcacatgtacttttcctgtgacttacattggcatttcagttgactgtaagtcaaaaggaaagttattgcatcattagaggctgaaccttcaccataacctgaccttagacagtcatgtctgacttgataggataggttttaaatctggaattagtggggtgaatacgttaaaggggtttagaaatggcgtttctcaaaataagtgtctcctgaagatgaaaatggtaaaatagtgcgtggtattattttcaggcatagtataagcctgaactggcctttcacaagtttgtcttgagacttgtcattgtttcagtttttatgttttcttttattaaattaacatgcttgttttaaaaagttcaaaaagtacaaaagtacttttaggttcagtggctcatgcctgaaatcccagcactttgggaagccgaggcaggtggatcacttgaggtcaggagttcgagaccagcctggccagcttggtgaaactccatctctactaaaaatacagaaattagccatgcgtggtagcgagtacctgtagttccagctactcaggaggctgaggcaggagaatcgctggaacctgggaggtggaggttgcagtgagcactgtattccagcctgggcaatagtgagactctgtctctaaataaataaataaaagttaaaaagtgctaaaagtaagaaaatagacataagttccccctcccctggaatctttcattgaattacctttttttttctaagggaatagttctgggaagtagaggaactgtatctcaataaaacagacattctttgtggtgtgatagaatcatcactgcataggagccaggaaatttagtttccagtcccaggtagtccttagctgtataatcggaaaaagttactttgcctctttgggcctcaatttctactaattctatgatgacacagttggacttagaaattttaggatgctaaggactgacttaataaagctttcctggtatctcagacattttttaaaaggctgtatatgagtttgtgtatatgtgtatgtgcacatgcatttctggaaaggcttcccctccaaccattaaatatataattaatgttataaattgtgttgtttataattgagaaataaataccacacttgacaatgtctatttccaaagaattgggtatttttgtgcttttgtttattcctggtattttcatatcatcctgttacacacgtgagcagagaatgtgtgtatcatccatatttaatttacagtcatagctagactaagttattatccaatgttattgaaagaatcagtagcacagatagaaatgaattagttcctagtatacagttttcttggcctttctcttaaccagtttgctttcttagagaaatgaactgatctgactatgattaagatcatttattgctagacagaagtaaaattagagattatccatagaacattttaatcttgtaatttatttggtgtgttgtagaacacctgacttttctcattgtatttggtaaatgtgttaaaaatgttaagtcagtgttatctggttttattttatctcttgagtcatgtttggcatgtatgtgttgggggggtgggcataggagttacacatttaagaaagccctatcttttagtagaataaattaatgcagattggcctgtcttcctgcctgcctggtcagtaacagtggactttggagattgatctagtgatgataaacctattgtatgtggcataagccagagaagtcagcttcgatagcaagtttctacattggcgtgagagagaagcatttagttaacatttcaaagtaactaagcctgttagcatccatgtattctatcagtagactttattgagtcctgtcatttgtatggtcttttattgttttttgttttcaacaaaggaaatagcacacacatacatctcaaaatggattatacctgttgtaatctcagtattttgggagatcaaggtgggaggatcacttgaggccaggaatttgaaaccagcctgggaaacatactgagatcctatgtctacaaaatttttaaaattagccaggtacagtggtatgcacctgtagtcctagctactcgggaggctgaggcaggagaatcacttgagcccaggagttcaaggcagcagtgatctgtgatcaaaccactgcactccaacttgggtgacaacatgggaccctatcttaaaaaaaaaaaaaaaagaattataaagtctctattatggttgtatctattaagaatatcagttctgttaagaaaggaaataattgtttcaaatgtttattggggtagcaagataaaaagttgtttacaagatattaaatatcagaatatttggaattagtgtcagtatttgctattatatagaaaaaaaacctggggcctcatgatttgaatttttcatcttgagttatttaatgcacatttgagttcttaccactttttggaccctatactcaaggtgtgtaaaggcataattattttcaaatgtgggctttgtctatgcaaaaatttatgagtgcattaagcatcactaggtgcagattaaatttgaattcagtgtgctgtatgtatacctccactactttcatttgatcagaaatgcacaatttagaaagtgtgttctaggaaaacttgttaaaagctatggaaaatccttctgtaaagtgaattaatttgccttttatagatccaggttttcatatgtgatttcttaatgaacaacttgtgaatattttaaatttattaaaagtaacatatctgtaattcactttaaacccccaccccatctatctttgtgtctcactctcacagtcataattaaacagagcaggagtttagttgttcttactgagtatataaatgatcccaatttttaagcttttaattttttaatcttaaaagactggcttaagataccatgatttctttaaactatatatactatgataataaattgaaaaatgtatatcaatttaaatttgacccatgggtctttacagtgtaatttaacatttacattcctgcagttggaatataagggctatatgtttcagttaaactctcctataactgtttagattaatttagattagttttttgttaatatagtggttggcagttgaaatgattgtgaaaataaagttgtttatgatgtataaataggagtagccttgatttctagcacaggcatccaatatagtcactaatttaagcagacttatgttagcatttatcaactcagaattaagcacaaaataaaatgcatataaaaaatgttaagttggtggaaagaccttgaaatctgaaaagtggtaattaaaaaacaatggaatgcctaaaccatactgtataaacatgaaagtcttacataagaggctggtgttacatgttttgctgctgttttttaggtaatctgtcatatatatcagaaatatatatagcaatcaggttttagtttctagtacagttgaccatagaactatggagatattatactgtccagaggggaaaaataattgtctcttatttcaacccctctaaacaggataccatacttgcagagctccttcagatacataaagaacacattgtaggataccatgaacatgattctcttttggaccacaaagaagaagaagagttgactgaagaagaaagaaaagcagcttgggctgagtatgaagcagagaagaaggtagttgatgcaaaatgtgtttttgtttttgttatgttagtgatttgaaagagcaatgaagaagaaaagggtcacatttgaaacaggtaataataatatagtgggttttaggaacacattccccaattacaagaatctctttatgggttggtttcagctacctttagtggtagagtaggaggagaagacagaagaaaacagtttacacttaaagagtagtaatcccatttctgcctagtatttgttgaattgagaaatgagtgggaagccatatatttagcatcactaacctcccatcagtaccctctctgtagtaacaaacatacaggagcttagtgtttggaggttgtagtaaatgtagctttgcatgtataccatgaaatctaaattttggctgaatatcagaacacaaaaatatttcattattagacattaatgccatttgctccagcagcaactttatttaagatcattctatgtctgttttaaacatcaacccacttgagcaaaaatgtgcctgagcatgggaaaccttatcctaatacctgaatccttttcaaactcctaacttattgtaccaaacttctttaacattagtgtgatgttcagagtctcatcagaattctttgagttgcccccattctgtgggaattatcagaaaaaaaaagtacacctttaggggttaaagctttccttgtaataagatcttggtttcgggtgaaaagggtgttttgtttgtgtgtggaagagtgttaataatttcctggatctgagaatgtggattcttttctaaaccagtaggtgatgtagaatttcaagttttaaatcacaatgtgaaaagtgcataatttttttgtttttagggactgaccatgcgtttcaacataccaactgggaccaatttaccccctgtcagtttcaactctcaaactccttatattcctttcaatttgggagccctgtcagcaatgagtaatcaacagctggaggtgagttgtgaagtacaaaagtagtttgacatgaattaaaggcaatttcaagtgccttgttgttgagggttccctatgcagaaatatcacattctccaaaagattacccctgaatagacgaataaatttttgttttatttgttgaccgttttgaaccaacatgatgttgtaaaatgtggtttgttcagagcacaaaggaatcagtcggtgaattaatgtagtttgaattattttaattaagaaacaatagggctgctgactcgcttgggaaatagcaccttcttcagttataaaatagttataataaattgctatcttactgtttgaaagtaagataaatatactcattaacttctattctagtgcattatagatgcacaattaaatatataatgcccaatattatgaaataaatgatttaaagctagaatcaattgtaaattaaataggaaagactgggtttttattataccaataatgacttaattgaatctgaaacacattataaaatgtgcttatggattcttctgcattattaaattattggtgtgataaaactcaaacttttttaatcttcctaacaagactctttgagcattgatatggtttactccactttattgatactgaattttgctgttctcttcaattatttaaagagttttaaaaccgactgctctaagttggcaaatggaaggattccctatactttaacactatgctgtctttctgccttatataacttatttcttgcattcttctaggacctcattaatcaaggaagagaaaaagttgtagaagcaacaaacagtgtgacagcagtgaggattcaacctcttgaggatataatttcagctgtagtaagctaattggcaattgtcttattccaacctccaatttgtaccctccaccccctactgccatttttttaaatttttaattgttccttcttataaattgatttgcaatagtaaaatactggtaaaatggatggataatgccaaaccgtaacccagcaattttacatagatgttggcacaagagagaaatgggtaaaatgtaagaattgagaaatcaaacatggaaatgtatgcattgtttatataaacattttaattaccagttgtacaaattaaatctaaattattgtttcattccagagatagccagcccaggtacagcagtgaacaacttagtaccctgttttgcatcatgtttttcttcagaaaagaataaaggaaaaggggggtttgaaaccttgggaaatcccgaatatcttaaaataccttaattatttttcctcaattgtacagtaataaggagtaaatagaaaatttttcttttagtggaaggagaacatgaatctctcagaggcccaagtacaggcgttagcattaagtagacaagccagccaggagcttgatgttaaacgaagagaagcaatctacaatgatgtattgacaaaacaacagatggtaagaattctgacgtctgactatttctaggttatgtttaattttcttgactttataataagtttgtatgacatctacgtcagtaattattcctactatggagggatggatagtcattgataattctggaagaaatgtaaaaaacccaggaatgtcaagtaaaagtaatatattttgttacaaaaatgcaacagctacctaaatgggaatccttgaagtttacatatgatctagtccatataattttatttctcatatattctggacatctacgtaggaatttttgccagagttttaccacatttgccaattgtattttatttaacttttaatttttgtgagtatataataggtatatatatttatggggtacataaggtatattgatacaggtatacagtgcataataatcacatcagggtaaaggatatctatcacctcaagcatttatcctttctttgtgttacaaacaatccagttatactcttctagttatttttaaatgtgcaataaattatttttgactgtagtcaccctgttgtggtatcaaatactagatcttattcattctaactatacttttgtacctattaaccatcccccattaccccactccctgctacccttctcagcctctggtaactaccattctactctcttatcatcatgagttcaattgttttagtttttagcttccagaaataagtgagaacatatgaactttgtctttctatgcctggcttatttcacttaacataatgatctccaattctatgcatgctattgcaaatggcagtatctcgttcttttttatggctgaatagtactccattgtatatatgtaccacatattctttgtttattcatctgttggttgatacttaggttgcttccaaatcttaatgttgtgaacagtgctacaataaacatgagagtgcagctacctcttcaatatactgatttcctttcttttgggtataggcctagcagtgggactggtgaatcatatagtacctctgtttttagttttctgaggaacctccaaaccgttctccatagtgcttgtactaatacacgttactaacaacagtgtacacaagttcccttttctccacatcctcaccaatattagttattgcctgtcttttggataaaggccattttaactggggtaagatgatatttcattatcttttttgtttggttggttggttttgtagagacggggtctcactatatttcccaggctggtctcaaactctcgggcttaaacgatcctctgacctcagcctcccaaagtgttgggattacaggcgtgagtgaccatgcccagcctctcattgtagtgttgatttgcattatctaatgactgatgatgttgagtgccttttcctatgcctgtttgccatttgtatgtcttctttcgagaaatatctattcagatattttgcccatttttaaatctgattattagattttttttcctatgcagttgtttgagctccttatatattctggttattaatcccttgtcagttggatagcttgcaaatattttctcgcattctgtgggttgtctcttcgccttgttgattgtttcctttgctgtgcagaagctttttaacttagtggtatcctgtttgtccattttttatttggttgcctgtacttgtgagatattactcaagaaatctttgccagttcaatgtcctggacagtttgcccagtgtttttctgtagtagattcatagtttgaggtctcagatttaagtctttaatccattttgatttgaatgttgtatatggcaagagcttggggtcttctttcattgttctgcgtatggatatccagcttccacagcaccatttattaatgagactgtcctttcttcaatgcatgttcatggcacctgtgcaaaaaatgagtttactggtgtgtggatttgtttctgggttctcacttctgttctcttggtctgtgtgtctgtttttatgccagtaccatgctgttttggttactgtagctctgtagtatcatttgaagtcaggtaatgtgattcctccagttttgttctttttgctcactacagctttgcctattgtgggtcttctgtggttccatgaaaagttcagaattttttttttgtttctgtgaagaatgtcattggtattttgataaggatgcattgtatctatggattgctttgggtagtatgggcattttaacaatattaatttatccaatccatgaacatggaagatcttttcatttttttgtaccctcttccatttctttcatcagcattgtgtagttttcattgtagacatctttcacttctttggttaagtttattcctaggtatttaattttgactgtggctactgtaaatgggattactttctcaatttctttttcagattattcactgctggcatttagaaatgctgctgattttgtatgctgccactttactaagtttgtttatcagttctaaaatatttttggtggagtctttaggtttttccaaataccagatcataacatttgcaaacaggataatttgacttcttcttttccaactgggatgccctttatttctttctcttgtctgattgctctagctatgacttgcagaactatgttgaataacagtggtaaaagctggcatccttgttgtgttccaatttttagaagaaagtctttcagtttttccccattgagtacgatactggctgtgagtctgtcaatatatggcttttattgtgttgaggtatgttccttctataaccgtattttgaggatttatatcatgaaaggatcttgaatattatcagatgttttttcagcatcagttgaaattatcatacagtttttgtccttcattctgttatttgatgtatcacattgattgatttgcatagttaaatcatccttgaagcccttggataaatcccacttggtcatgttcaacaacacctttttaatgtggtgttgaattgtgtttgctattattttgttgagaatttttgcatgaatgttcatctcagatattgccctgtagttttctttttttgatgtgtttgtctggttttggtattaaggtgttactggccttatagaatgtgtttgaagtattccctcctcctctacttgtcacagcagtttgaggaagattggtattagttcttctttaaacgtttggtaaaattcagcagtgaagacattggtttccaggcttttctttgctggaagactttttattacagctttaatctcgttacttgttactgctctgttcagattttggatttcttaatgtttcaatcttggtagattgtatgagtcttggaatttatccatttcttctaggttttccaattttttgcatgtagtttgtcataggagcctctaatgatcctttgaatttctttggtaacagttttaatatctactttttgatctctgattttatttacttgaatcttctcctttttcttaatctggctaatggtttgtcagttttgtttatcttctcaaaaaaccaactttttatttatttctgtgctgatctttattatttattttactaatttggggttttattttcttttgtttttctagttctttaagatgcattggtaggtgtttgttttttttttcttttctgatgcacgcacttagagctgtaaactttcctcttagtaatgcttttgctgtatcccataggtttttgtatgttgtgtttcctttatcattcgttttaagaagtttttcagtttttttcttaatgttttctttgacccactggtcattcaggagcatattgttcaattttcatgtgtttatatagtttcaaaaattcctcttgttattgatttctagttttattccattgtggtcagagaagaaacttgatatgatttcatttgtttgaatgttttaagacttgttttgtggcctaatatatggtctttccttgagaatgatttatgtgccaaggaaaagaatgtatattctgtgaccattggatgaaatgtcctgtaaatatctatttggtctatagtgcagaataagtccgttggttttttttattgattttctgtctggatgatctgtccaatgtgtaaagttgaggtgtcgaagtctccagctattattattttggggtctgtctctctatttagctctaataatatttgctttttatatctggtgctccagtgttgggtgcacatatatttacaattgttgtatcttgttgctgaattgacccctttatcattatataatgaccatcgttgtctctttttatattttttgtcttgaaatctgttttggctgatgtaagtatagctagtcctgctcttttttggtttccattttcatgaaatatcttttttcatccctttattttcactgtatatgtgtctttataggtacaatgtatttcttacaggaaacagatggttgggtcttttttaaaaatccattcagacactatatgtcttgattggagagtttagtccatttatattcactgttattctgtttttaaactttcattttaagttcatggatacatgtgcaggtttgttatataggtaaatctgtgtcacgggtttgttgtacagattattttgtcacccaggtattaagcctagcacccataagttatttttcctgatcatctccctcctctcagcctccaacctctggtcagccccagtgtctgttattgccctctatgtgttcatgtgttctcatcatttagttcccactttttagtgaaaacatatggtatttggtttcctgttcctgcattagtttgctaaggataatggcctccagctccatccatgttcctgcaaaggacatgatcttgttcttattattaggtttatagaagatattaataaaattaaataaatagattgacaacagtcttgaaaatgtgtgctgagatctgggctcagctttacaagccgagaatgagaaagtagatttttgatctctgagatttctaatagttgagtcagctactgttggaatgagaaaagctctagttgtctataacatgttgaatttgtcagactctttgtgatgagctgcgttcaataaaccaaatgcagaggcattagtagcaggctatggctctgctagctgaggtttggaaatcacaggatgcaacgcctcaatttttgctgtggaacttgataatggggcattccgtaatgaatgccgtatgaggggacgtgagtatgagtaggcagagggcacatgtatctagagcttcagtcactgtaggtatcaggaagaaaggcacatttagaatacacctttacacacgtggatttttttttttcacccctcctgaactttttctttatttttattttttatttccacattttctttatccagtctaccattgataggcatttagctttattccatgtttttgcttttgtggatagtgctgcaatgaacatatacgtgtgtcattataatagaacaatgtatgttcctttgaatttatacccagtaataggattgcagggttgaatggtagttctgtttttagctctttgaggaactaccacactgctttccacaatggatgaactaatttacactcccaccagcagtgtataagcattcctttttctctacaacctcaccagcatcttttgactttttaataatggccattctgactggtgtaaggtatctcattgtggttttgatttgcctttctctaatgatcagtgatgttcagctttttttcatatgattgttggccacgtgtgtgttttcttttgcaaagtgtctgttcatgtcctttgcccactttttaatggggttgttattttcttctatatttctttaagttccttatagataatggatattagttgctagatggatagtttgcaaaacttttctgcaattctgtaggttgtctctctactctgttgatagtttcctttgctgtgcagaagctctgctgtgcagagtttagttggatctcatttgtccatttttgcttttgttgcaattgcttttggcatcttcatcatgaaatctttgcccattcctatatccagaattatattgcttaggttgtcttccagggtttttatagttttcgggtttacatttaagtattgaatgcatcttgagttgatatttgtatatggtgtgtaaggagggggtccagtttcaatcttctccctgtggctagccaattaccccagcactgtttattgagtagggagtccttttcccattacttgtttttgtcaactttgtcaaagatcagatggttgtaggtgtgtggccttatttctgagctgtctattcagttccattggtctgtgtgtctttttgtaccagtaccacactgttttggttactgtagctctgtagtatagtttgaagttgtatagcataatgcctccagctttgttcattttgcttacgattgccttggctattcaaccttttttttgttgttccatatgaattttaaaatagttttgtctagtttatgaagaatatcattagtagtttgataggaatagcattgaatgtataaattgctttgggcagtatgaccatttcaacaatattgattcttcctatccatgagcatggaatgtttttccatttgttttgacatctctaatttcttttagcagtcttttggagttctcattgtagagaccttttacctccctggttagctgtattcctaggtattttattctttattgtggcagttgtgaatgggattgcatgcctgatttgcctctttgcttgacttttgttggtgtataggaatgctactgatttttgtacattgattttgtaccctgagatattgctgaacttgtttatcagcttaagaagcattttgggccaagactagagttttctagatacagaatcatggcatctgcatactgtgatagtttgactttctctcttcctatttggataacctttatttatttctgtttcctgattgctctgcccaggacttctaatactatgttgaataggagtggtgatagagggcatccttgtcttgtgccagttttcaagatgaatacttccagcttttgcccattcagtataatgttggctgtgggtctcctcctggcggaattccagaggcccgaggcaagagccagttgcttcttgccacttcaactcactcattcccctggagttcttgtgggccaggaatgagtcctggtgtgcggtagccccattcagggttcccagcttcctcctccaaccaagcttctgtttcttccctccgcccactctcattgccttctctctgaagatctgttaggagtgtgccagtcatccttgtctttcggtggcagcttttccaccttgctgcatctagtcatccatcttgcccaaccccattattctttttttttttttttttttttttttgagacggagtctcgctctgtcgcccaggctggagtgcagtggcgcaatctcagctcactgcaagctccgcctcccgggttcaggccattctcctatcttagcctcctgagtagctgggactacaggtgcccgccaccacgcccagctaattttttgtatttttagtagagacggggtttcaccgtgttaaccaggatggtctcagtctcctgaccttgtgatcctcccgcctcggcctcccaaagtgctggggttacaggcgtgagccactgtgcccagcctccaaccccattattcttgataagttaggacttactcctgccattttgttatttgttttctggttgttttgtgatccctgtcttccttcttttcttcctatcatccttttagttaaagcaattttctgtggttgtatgttttaatttcttttattattatttttttgagacggagtttcactgtgttgcccaggctggagtgcagtggcatgatctcagcttactgcaatctctgccttcccgggtttgagcgattctcctgcctcagcctcctgagtagctggaattataagcacccgccaccatgcgcagctaattttcacatttttactagagacagggtttcaccatgttggccaggctggtctcgaactactgacctcaggtgatccatccaccttggcctcccaaagcgctgggatcacaggcctgagccaccgcgcccggcatgatttcttgcttatagttttttgtttatctgttgtatgtttgtttttttgaagttaccatgaggcttgcaaataatgtaatgcatcattttaagctgatgataacactgattgcataaacaagcaaacaaagtaacaaacaagcaaagagaaaactaatgttctattgccagtgagttttataccttcatgtaacttttcgttgtttgttaacatccttttctttcagattgagaaactccctttaatatttcttgtaggacaggtttgatattgaaattcctcagcttctgtttgtgtgggaaagtctttatttctccttcacatttgaagcatattttcaccagatatgatgttctagggtaaaagttttttgtttgtttgtttgtttgttccttcaccccttttaaatatctcatgtcactctctcctgggctgtaagttttctactgaaaagtctactgccagatgtattggagctcctttgtatgttatttgtttcctttctcttgctgcatttagtatactttctttatccttgacctttgagagtttgattattaaatggtaggaggtagtcttcattaggttaaatctgcttggtgttccataaccttctttttcttgaatattgatagttttctctaggcttggggaattctctgttgttgtccctttgaataaactttatacccctatctgtctctctgcctcctctttaaggccaataactcttagatttgcccatttgaggctattttctagatcttgtagatgtgcttcattgttttttgttcttttttcttttgtctcctctgatggtacattttcaaatagcctgtcttcaagcttactaattctttcttctccttgatcggttctgctattaagagactcttaatacattcttcagtatgtcaattgcattttttgactccagaatttctgcttgattcttttaaattatttcaatatctttgtgaaatttatctgatgtgattatcagtttcttctccatattatcttgaatttcattgaatttcctcaagacagctcttttgaattctctgtcacatatattcacatgtatctgtctctctaggattggtccctgaggccttatttagttcgtttggtgatgtcgtgtttcctggatggtcttgatggttgtggacattgattcgtgtctgggcattgaagagttaggtatttattataatctttgtagtctagccttgtttgtacccatccttcttgggaaggctttctaggtattcaaagggagttggatattgtgatctaatggtcactgcatctgtatctgcattagaaggcatcccaaaccgggtaatgctgtgactcttgtagtcttggagactcatagaggtaccgccttggtggtcttggataagatctggaagaattgtctggattaccaggcagagactcttgttctcttcccttactttctcccaaacagaatctctctctgtctgtgctaagctgtctggaaagctggtggagaggtgacacaagcacccctctggctcccttcacggggaccacactgggttagacctgaagcctgcatagcaatgggtctcacccaagatccacagtaactactggcctccgcctttgtttgctcaaggctctaaggctccacattcatcaggtggcaaagccagctcctcttgtgtccttcccttctgggctgcagatttcccccagccctaggccgatcccaagatgctatctaagatccagggcctggagtcagaatctttaggaatctgcctggagctctattctacttcggctgagctggcacccaagccataagacaaaatctttctacccttccctccgcttttcacaagcaaaggagtctctccctgtgaccactagcaccccaggcccacagcaggtattgcctggctactgctgatgttcactcagggcccaagggctcttcagtcagcttgtgttaaatgctaccaggactacgtctctcccttctgggcagtgggctcccctccagcccagggaaggtccacaaatgccatccaaaagccaaggcctggaattagggtccccgagggtctgcttggtaccctagcccactgtggctgagctggtacctaagctgtatgtcaaagttctctttactctttcgtcttcttttctcaagcaggagtctcttcccatagtgtccacagctgggaatgtgctatgtcacacctgaaggtagcatgtctctgagtctcactgaaggcccactgcaagtactgcctgggtaccactgctggttattcagggcccaagggctcttcagacaacagatgttgaatcctgtcaggattgagtcatttccttcaagagaatgagtttcctctggcccaggttatgtctggaaatgtcatccaggagctagggcctggaacaagggcctcaggactctgcctggtgccctgtcctactgtggctgacgtgatattcaagctgcaagacaaagtcttctttactcttccctctcctctcctcacctcaagcaaaaggaaagagtctctcctggagctgtgagctgtgctgcctggggtttgcgaaggtgtggcacaagcaatctcctggccaccctggctggtgtctcactaggtcatgtgccccccccccccgccccccgtccactggctttcagcccagcacagtacaggacttggactcttggtggcctagattgcctttcaggtttatttaggcccccagaactctttagtccacagtggcaaagcttgtcggaactcgggttctgcctgctgggataggtgatttccctctggctgtggctggtgtaaatgctccctctgtgggtgccagctgagttctgcctggtgtttcttttcactgtgacagggcagccctgagttccaatgcagagtcccataatcactgtactcttttcctgcaagcacatagattctctctccctgccacacggctgctgccaggggatgagtgaggggtggcattggcagttcaagactgtctttcctaccccctttagtgcctctttcagtgatatgaagttaaaatctggtacagtgattgctcacctgatttttggttctcatgaaggtgattttattgcagatagtttttcaatttgctgttccttcggggaggacgatcagtggaggcttctattcagccatcttgctctgcctccagtcacatttgccattgttaaacaacctcgaaatagtagtatacttatcagtgtgtttaatttgagaataaaaggtagagctatggatgatacatatcaaaggttcctactaagttatataattctttaaaagggtactgtattccaggatccttgatcatgtttcccaacacagtcgtttgccagccttctgccttatacttggaaatttctacgcttgacaccagggaatctatttctgtggcatatattttacttagaaagcactgcagggttatgtggttttacaatatattagtacatttgagatattcctggtcagaattattcctactgcaagtgcctttccctttggtgtttgtcactaaaatgtttgtctgtcatcatgtgaaatattcaaaagaatgacaaagaaaggagtcttaacaaaaagtgttgtaactaatacttgagactaatcacagtacagaacacattactatggcaactaagctaaatgctgcttgcaatataatagtcaagacattaagagaatttagccctaaatgatcttactaactggtttctacagtaatggtcctgtgaatgccatcacattagtaatggtgttaacaataatgtgttttccttttggtatggtacccccttaacaaattgattttaagtcaaaacttgatacctcttttgagacaggtcatgcacttgtaatgactcccattttttctctatagttaatcagctgtgttcagcgaatacttatgaacagaaggctccagcagcagtacaatcagcagcaacagcaacaaatgacttatcaacaagcaacactgggtcacctcatgatgccaaagcccccaaatttgatcatgaatccttctaactaccagcagattgatatgagaggaatgtatcagccagtggctggtggtatgcagccaccaccattacagcgtgcaccacccccaatgagaagcaaaaatccaggaccttcccaagggaaatcaatgtgattttgcactaaaagcttaatggattgttaaaatcatagaaagatcttttatttttttaggaatcaatgacttaacagaactcaactgtataaatagtttggtccccttaaatgccaatcttccatattagttttactttttttttttttaaatagggcataccatttcttcctgacatttgtcagtgatgttgcctagaatcttcttacacacgctgagtacagaagatatttcaaattgttttcagtgaaaacaagtccttccataatagtaacaactccacagatttcctctctaaatttttatgcctgcttttagcaaccataaaattgtcataaaattaataaatttaggaaagaataaagatttatatattcattctttacatataaaaacacacagctgagttcttagagttgattcctcaagttatgaaatacttttgtacttaatccatttcttgattaaagtgattgaaatggttttaatgttcttttgactgaagtctgaaactgggctcctgctttattgtctctgtgactgaaagttagaaactgagggttatctttgacacagaattgtgtgcaatattcttaaatactactgctctaaaagttggagaagtcttgcagttatcttagcattgtataaacagccttaagtatagcctaagaagagaattcctttttcttctttagtccttctgccattttttattttcagttatatgtgctgaaataattactggtaaaatttcagggttgtggattatcttccacacatgaattttctctctcctggcacgaatataaagcacatctcttaactgcatggtgccagtgctaatgcttcatcctgttgctggcagtgggatgtggacttagaaaatcaagttctagcattttagtaggttaacactgaagttgtggttgttaggttcacaccctgttttataaacaacatcaaaatggcagaaccattgctgactttaggttcacatgaggaatgtacttttaacaattcccagtactatcagtattgtgaaataattcctctgaaagataagaatcactggcttctatgcgcttcttttctctcatcatcatgttcttttaccccagtttccttacatttttttaaattgtttcagagtttgttttttttttagtttagattgtgaggcaattattaaatcaaaattaattcatccaatacccctttactagaagttttactagaaaatgtattacattttattttttcttaatccagttctgcaaaaatgacctataaatttattcatgtacaattttggttacttgaattgttaaagaaaacattgtttttgactatgggagtcaactcaacatggcagaaccatttttgagatgatgatacaacaggtagtgaaacagcttaagaattccaaaaaaaaaaaaaaaaaaaaaaaaaagaaaactgggtttgggctttgctttaggtatcactggattagaatgagtttaacattagctaaaactgctttgagttgtttggatgattaagagattgccatttttatcttggaagaactagtggtaaaacatccaagagcactaggattgtgatacagaatttgtgaggtttggtggatccacgcccctctcccccactttcccatgatgaaatatcactaataaatcctgtatatttagatattatgctagccatgtaatcagatttatttaattgggtggggcaggtgtgtatttactttagaaaaaatgaaaaagacaagatttatgagaaatatttgaaggcagtacactctggccaactgttaccagttggtatttctacaagttcagaatattttaaacctgatttactagacctgggaattttcaacatggtctaattatttactcaaagacatagatgtgaaaattttaggcaaccttctaaatctttttcaccatggatgaaactataacttaaagaataatacttagaagggttaattggaaatcagagtttgaaataaaacttggaccactttgtatacactcttctcacttgacattttagctatataatatgtactttgagtataacatcaagctttaacaaatatttaaagacaaaaaaatcacgtcagtaaaatactaaaaggctcatttttatatttgttttagatgttttaaatagttgcaatggattaaaaatgatgatttaaaatgttgcttgtaatacagttttgcctgctaaattctccacattttgtaacctgttttatttctttgggtgtaaagcgtttttgcttagtattgtgatattgtatatgttttgtcccagttgtatagtaatgtttcagtccatcatccagctttggctgctgaaatcatacagctgtgaagacttgcctttgtttctgttagactgcttttcagttctgtattgagtatcttaagtactgtagaaaagatgtcacttcttcctttaaggctgttttgtaatatatataaggactggaattgtgtttttaaagaaaagcattcaagtatgacaatatactatctgtgttttcaccattcaaagtgctgtttagtagttgaaacttaaactatttaatgtcatttaataaagtgaccaaaatgtgttgtgctctttattgtattttcacagctttgaaaatctgtgcacatactgtttcatagaaaatgtatagcttttgttgtcctatataatggtggttcttttgcacatttagttatttaatattgagaggtcacgaagtttggttattgaatctgttatatactaaattctgtaaagggagatctctcatctcaaaaagaatttacataccaggaagtccatgtgtgtttgtgttagttttggatgtctttgtgtaatccagccccatttcctgtttcccaacagctgtaacactcattttaagtcaagcagggctaccaacccacacttgatagaaaagctgcttaccattcagaagcttccttattacctggcctccaaatgagctgaatattttgtagccttcccttagctatgttcattttccctccattatcataaaatcagatcgatatttatgtgccccaaacaaaactttaagagcagttacattctgtcccagtagcccttgtttcctttgagagtagcatgttgtgaggctatagagacttattctaccagtaaaacaggtcaatccttttacatgtttattatactaaaaattatgttcagggtatttactactttatttcaccagactcagtctcaagtgacttggctatctccaaatcagatctacccttagagaataaacatttttctaccgttattttttttcaagtctataatctgagccagtcccaaaggagtgatcaagtttcagaaatgctttcatcttcacaacattttatatatactattatatggggtgaataaagttttaaatccgaaatata

SEQ ID NO: 1142 - DNA, 53252 bp, Homo sapiens
cgccgaggctccaccgcgcagccgcaaaaagagcggacgggtctgcgccgccgcaggaggagcaggcggtacctggacgggttcgtcccgggctgtttcgcgtccggcctgaggcggctggggccgcgcaggtagtgtccctgcacttcttgcccgggcgcgtgaggccagctccgctgcgcttgtctccagcttccagccctcctcccctaagccgccgccatcatgctgctgcctgtgttcaccctgaaactgcgccacaaaatcagcccccgaatggtggccatagggcgctacgacgggactcacccgtgcctggcggccgccacccaaacgggcaaggtaaccgctcccacccgcagggagcccgggccccagggaaccacaggatctccgccggccgcgcccctgggatcccgtcccctctccgaccccgcccccagcccgtgttgcccggcaaccggtcggcgagcaccttgtggctccatcctgcagaggacagtggggtcttagaggaagagcttttctgagaagttgacgttttcttgtcatcaggcacttggagtcaggcgaggtcggggtccctggacatagggagcttagaaaagagacgtctcctgagggaaggggtttggttcgggttagcagtaataaccgaccccagattcaagccaggggcctctgcttgtcacttggaactcggaattcctctgactctctaacactgcttcttcttcctttttttttttttttttttgagacggagtcttgccctgtcgcccaggctggagtgcagtggcgcaatctcgggtcgctgcagcctccgcctcccgggttcctgcaattctcctgcctcagcctcccgagtatctgagattacaggcgcccgccaccacgcctggctaatttttgtatttttagtagagacaggatttcaccatgttggccaggctggtctcgaactcctgacctcaagtgatttacctgcctcggcctcccaaagtactaggattacaggcgtgagccactgcacccagcctttcacagtcctttaccgaacaacgacaaaagaatgcaatacaaaaattaacttattcaaattgcacttttgatccttgcccatgtacattcagttctttccccgtaatttattcactaagtattaggtgtttactatgtgcgattactgggcaagatgtgagagtcaaagagataaaagagaaatcatgtaacattcaccagacttctactaaacaccttctgtatagattttggagactcggatgtaaaaggagtccctactttcagaaagcttatagtccagaagctaacagacaaggcaaatcagagccctgtgtatttgacggaggcatgcccaaaatacatggaatgtagtgacaacgctaataacttataacaggcacaaaactttattacatgagtcatctcagcgtcgttgtcacaaggccaacggcagcagcatggcatagggatggtgtttcttggctccagtacctactaatttcatgaccttgggcaaggcacttaataatagtacctaatacgtggggtcatgagctttaaaaaagttaatacatgtaaagtgcttgacatataggaagtggtcactgattgttacctgttattttctttttatggttctcactttattgactagaaattgcagttcagagaggttcaatacagtgcttggagccactcaactagaaagtgtggaatgtggtcagagtgcatgttctctgatccagtgtggatttaataagctaggatttgtgtaacaatttatagtttttaggacacttccatgtatattgtatgttatatgccttgggatacagaagtaaaaaataaggcttcattttcattaagtagtataacagagttaagctattaatacggggtctggcacatcatgatgttagttattgttacagttagaagtcactgacaggctgggtgcagtgactcatgcctgtaatcccagcactttgagaggctgaggcaggcagatcatctgaggtcaggagttcaagaccaacctggccagcatggtgaaaccctgtctctactaaaaatacaaaaattagccaggtgtggtaggtgcctataatactagctactcgggaggttgaggcaggagaatcacctgaacctaggaggtggaggttgcagggagccgagaccgtgccattgcactccagcctgggcgacagagtgagactcggtctcaaaaaaaaaaaaaaaagcactgacaaatgccaaaaagaacttcatgttgcttgtgctgtaggtgcatagcagatttataaatgggctgaaaatatcccattggtattaactcagcccctaatttgagggcttactatgtgctgggcagtcttcttagctctgcaggtgcattggagaatgtgacagacaagtttttgcccccttggagcttacatttgagagggggaaccaggtagttaactgaatatgcaagtgttttcataggagaaaaagaataagggattcagtgtgatgggagcttggtgtcttagacaggtggtcagatggcctctaataacatttgataagaggtttgaaggaactgaggaaacaagctctgcagatttgtgggataagcgccttgcaggcagagggatctgcaggtgcaagggccttgagctggagatatgcatggtgtgtttcaggagcacaaggaagccgctggggctggaaggcaatgagggtggtcatgaggtagacacaagccagatcatataggaacttgtaggccatggcaaagaccttggtttttatactgagtaagttaggaagtccctgaggattttgataaagtgggtgttggaatttgctttatgttttagataaaggctaactggctggtatgtggagaacagatgttctgtgacgggatgtagggaggtaggtgtcggagtagaagcagggagatcgggcagaggtccctagggcagcccttagatagagtgtgacctggagtggaaggcaggaatgcttgattgtagggctgttgtcgaaaatggcctaataataataataataataataaataaaataaaggagatcccttgtcctgtgtaactggatggatactttgtgttcagctctgtaaacaaatctaaaaagttctgacctgatcttttatcttgagaccttaaaaagaattagtagtattttatgactcaagtaatgccatgaatatattttcttaaaagcaattaaaacattccagctagggttaaagcctgcatgtctagaaacaggactttatccttacagctgggaccctgttgtgaacatggagctgactctgagccttagcaaggatatttttttaaaaggaatctctggccgggcatggtggctcaacacctgcaatcccagtactttgggaggctgagaggggcagatcaactgaggttaggagttcgacaccaacctggccgactgaaaccctgtctctactaaaaatacaaaaattagctgggcgtagtggcgcacccctgtaatcccagctactcgggaggctgaggcaggagaatccctaggacccaggaggcagaggttgcagtgagctgagattgcaccactgtactccagcctgggcaatagagcaagactccgtctcaaaaaacatataaataaataaaaggaatctcttgcagggtgaatattagagttttcctctggggacattttttctctcatggtaatgcttaggggtcagttgaatttatattgtttgcagcacctcctcagctagaacaaaagtgtgaacttcagcaagtcctttgaaagccctgggagtggtctttttgtcgtatgactgagattggctttctttccttgcctgaagggacagacttgtctccctgtggactctctttgagtgtagagaacagcaggagggaactgggggaaagtctgactcctgagatccttgttgctcttgacaaaaattgcaaactctttccattccggtaagaatgaatatggagcccgtaagctatttctgctcctgtactttctcagcatattggatttctggaaaactttgtaagaattggtttgttcagaactgttataaaaggaagtgtgatgtggtggtggctggagcgcagggcctggagcacaccaggctcttgtcttagccctgtcaccagtctcaagaccttggcaaagggccttaactcttccgacctcatatggaaatgaagggttggtgtcaggttcaaatgcaattaacattgaccaaggcatgttataaagtgttacacaaacggaacatgaaggcagtgttcagtggctgcacgttttctatgtttttagtcaattcttttgaaaattattttttgttgaataggctgccttgggtaggtgttaatttaaaattaattctgtttggatttatgtgaaagagatgaaatactcatgtaaattttaaaaattttagaactagaaggggctagagggatccctagtccagtgtttttcatcctcccaacctttttggtcatattgcccaccttggaacttttttagaccaagaaaattttcccagtgaaattctgatacctcagatatactttgtatctctttttgtactgtggtcctgcgaagggctacacgattccccatcgcaaacccatttacctgtcctgggagtgatctcgcccctcttaagactgcattttatagtccaaacctcctttttacaggtgaagtctaggaaagttgaataatttatgcagacactcagattatatttatgatagttgaaactgttgaatttattatctttgggctaattacttagttctatgtcactggtataaactgtgaaagccttcaagatacttgatttgcatgactcggtttaagtttgtgaaacaggtttactaactagcagaccattttaaggtctaggaagtgattcattaggtgcttggatgaaagataataaaggaagtgtttattctgttttccatgatcttcttggtgtgtggcaatcacattgaaggtggtagcagcttattctaggttgatcgggaaaaggctagctcctaagagtgctttgacatcctgctggtgggtagcatgtaagctggcctggtaagcagtgactagatcttgttcattaccttgttccttacaaggctaagaaccactggatttccgtgatttcataatgactgaaagttgtccatgcattgaactatgtacgagtgttttaagtttcataggagattaaagtgacctcttgttaatgtggatgtgttaataacctggttcttttttaaaaaaatgtatgatactaattttttatattttaagggaatgtaattagttatttttgtttcaggtttttattcataatcctcatacacggaaccagcatgtcagtgcatccagggtcttccagagccccctggaatctgatgtttctcttctcagcattaaccaggcagtcagctgtctgactgcaggcgtattgaaccctgagcttggctatgatgcccttttagtggggacacagactaatcttttggcttatgatgtctacaataattcggatttgttctacagagaggcaagtataacctttataaccataaaattgtcattactcattaatgtccattttttatgcttagaagagatcagatcatttattttggtctgtttgttgtatgactgttatagtataggtaaacaacatggagattttgctgttaacatctgctttatgtactcggaacttatttatttggttatggttgctaatcgcttggtgacactcgagcttatctctatgaggtatatctgtgatactgccatctgtcaagatctgttgagaattcagccaagagctgggaagccaatagacaggtctcctggtggacttgcattcaagtttagtgcaatagtttgtagaagcccttactgtagcctgccacctacaggctgctgcaactttaatacccaagcaattcatatttgttacagaaaagataaggaagtaaaaagtaaaagaaattacacctattttttcatctagaaagagcacttaactgttgagtttttgaatccagattttttaccaagcatatatgaatacattttgtagtaaaatggggtcatatatacatgtagccttttacttgtttttaccctatagcagctttattaagatatgattcacatgtacaactaacctacttaaagtatacaattcagtggtttttagtgtatccagagagctgtacaaccatcaccatcatcaattttcaacatttttattaccccctaaaaaacccatacccattagtatcactccccatttttctttaacctcctaaccttaggcaaccagttatctactttctgtctctagaagtttgcatattctagacatttcataaacaatggaattatataatatgtaatcatttgtgactgccttctttttcttagcatgatattttcaaggttgatccatgttgtagcatgtgtcagtaattcacttttatggctgaataatattccattgtatgtatataccacattttatttatccatttatcagttaatggacattccactccctggctattatgtgtggctctttcattcaataatatgttgtgaacatctttatatgaagttactacatacccgttatgtcattcttattggttctgtagtatttcattgtgttaatgtaatttgtttaaccgttccatgttgttgaacatttatgttatttccattgtttctgtattacagttcatagtgtaataactgtatctctttgaccacttccctgattatttcctgaggataagttcctgaaaatgcagatggttttctttctttttgtttttgttttctgagacagagtcttgctctgtcacccaggctggagtgcagtggcatgatcatggcttactgcagccttgacctcatgggctcaagcaattctcccacctcagccttctgagtagctgggactacaggtgtgtactaccacacccagctaattgtttattttttagagagatagggtctcactatgttggccaggctggtctcaaactcctgggctaaagcagtcttcctgcctcagcttcccaaagtgttgtaattatagatgtgagccactgcatttggctggttttcttctttgtctattttttgttgaggtaaaatgtacatacatgaaaatgcacagaccttctgtgtacagttcaatgagtttggatccctataaccaataccccaataaaaatagagaacattttcatcacctcagaaaatattgttgtaccccattccagtcaatttctatctcccatagacaatcactgttctgacttctgtcagcttagattagcttttcctgttgttgaactccatacaaatagtgtctggcttctttcacttaacataatacttgtaagaattatccatattgttgcatataaaagtagtcttttgttgttgttgctaagcaacaaaaatagtatattccattgtgtgaatatactatggtttgtttatccactctcttggtgatagacaagtggctggacatttggattgtttcagtttttaacaaccatttttgtttaagacttgtttttaataagacttttttatataagactttttgtagatatatgttttaatttatcttgggtaaatacccaagagtggaattgctgggctatgtggtttataagaactttatgacactgtgaaactgtttttgcaaagtggttgtatcactttatactcctgcctgcagtgtaggagagttccagttgctccacatcctttgtcaacatttgttgttgccagtctttaattttagccattttggaaggtgtgaagtgatatcttaggtgtggtttcattttgcatttccctgataatcattgatgcagagcaccttttcttgtgcataaatggacatttatgtgtcttccgtgaagtgtcttaagtcttttgcctattttttattggtagtttgtctctttattattgatttgtagacatttcttggatatactggatacaaactctttgtcagatttatatataataaatattttctcccagcctgtggcttgttccactaggcatgtgtcttttgatgagcaaaagttttgcatttttgtgaagtccagctgatcacattttttctttagtggttaggactttttctgccctttgcctatttcaaggtcacatcgtttttgttcagaagtgaaatcgagtttaggactgtattagtcagggttctccagagaaacagaaccaataggacatgtacatattagagggggaaatatttattttcaggaattggcttatgcagttgtggagcctggcaagtcaaaaatctgcatggtgggccagcaggctggagatctaggagagaattgatgttgaagctcaagtacaaaggctgtctgctggtagaatcccttcttccttgggggaggtcagtcttttttctattaagtccttcaatacttgatagaaagttcttaatagaaagtattgaaggacttaatagtaaagtagattattatccatatgtgcgtgggccagttaatgtgtgaggcccacccacattatggataataatctgttttactcaaaatctgctcagtttactcaaaatttggcccaattaatatgtgggcctgcatattatcgtgtctaagataatgtgtccttttacttttcttaggtagcagatggggcaaatgcaattgtgctggggacattgggagacatttcttcccctcttgcgattattggtggcaattgtgctctgcaaggtttcaatcatgaaggaagtgatctcttttggacggtatgaagaagaaaacattctttttggtacccttaagcatttttacttttaatgttcttttttaaccaccaactctactgagtaataatatttataattctgtgcattaaaaaaggatatgaataattcgaatagcattcattcgtgttttgtgtaatcctctccttcatgtagctaatatatttggagtaaatggagaaacgatggcatgctaatggtttggggttttattttcaggttactggagacaatgttaattccttggccttgtgtgactttgatggtgatggaaagaaagaggtatgtgggggaggagatatctctcttgtgtgttcagccaaatgaattttgccatgacagtgacattagtgttgacagaagtgtaagcttctcctggctgattttggtgctctgttgcctaaatgctcagccagttggccccattcgtctttctcttctcttttgaacaataaatcacttgtgcttgtgtaataaatacaaagatcaaagccatggtgtttcagagacacaggagagggcagagagggtagaagagttgggatttcagtcatattcacggtcttatgaattgctcctgatgctttgaaaccatattagtatatagttttcaattttggccaactgttttgaggaatctaaatgttttagagattggcttttagcctttgaaattattcttatggttaccctagaaattagcttcttgagcagttagtaggtgtgacgtgctgtgttgggcaccgacttgcccctctcttgtccatggacactggactctggtgtttgaacagggcttccatctgtaggcagagaaagttgctgatccagggagccttttcaggtactcagggaaataacgtattctggcaagatgtgcagctcccatggcaggataaaagctgcagtagcccctgttccttcattgattgaatctgctgatcctcccattagagggagcatttctgagcatcaaacgattatgaggttgtcaatcttgggtggcagaagcagcatgcaaagtactgtgcaattttttgttttgtttacagaaattttgttgtttgcacttactcacctgaacatgtatgatatttccccttcagcttcttgttggatctgaggattttgatatccgagtttttaaggaagatgagattgtggcagaaatgacagaaacagaggtaagaagctccacctcgaactatggtaaccttgagcaagatagatcagtactgtcagatgaaacatcaagtgagagtgctggggcatctccaaacccaggtggttttaggataaaagcttggggagggggtcagacagagctgtatgttatggtaagaaaagcaataaaaatcctaattaagatatattttgaaaagactgattaaatagagaaaaattattgcatatagttgaatacataaaggcatttcttttaatgagttaatacatgcaaataataataatggcaatcatttattatgtacctattgtatgccaggtagtgctctaagtactttatatgaagtaacatattgaatccttacaacaaccctaataggaagataaattattattatttctatagatgaggaaaatggtgttctggttttttgtttgtttgtttgtttgttttgaggcagagttttactccatcacccaggctggagtgcggtggtgcgatctcggcttactgcaagctccacctcccaagttcaagtgattcgcatgcctcagcctcctgagtagctgggactacaggcacgcaccaccacgcctgggtaatttttgtgtttttaatagagacggggtttcaccatgttggccaggctggtgttgaactccagacctcaagtgatccgcccaccttggcctcccaaagtgttgggattacaggggtgacccaccgcgcctgtattttttgttaagttacttgtacgtagtcttggctatgaaatggcatggtcagcatttgaacctttatgccccttcctcctcatcatgtgtattcagtagggctgaagtgcataaatgagatgtctatatttttttcttcctgcaaattcagtacttctttggcacatttctgtaggtaaacttaaaaattatagaacttgtgattagaatcactcatgtaactgaacctgagatatttcttaatatcccaggttgtttaggcctgatgtttaggcctggtgcagtggctcatgcctgtaatcccagtgctttgggaggccaaggtgggaggatcacttgaggccaggagtttgagacccgcctgggcaacataacaagactccatctctacaaaaaatattaaaaaattagccagaaggtgatggcacacgtctgtagtcccagctgcttgggagactgaggcaggaggatcccttgagcccaggagcttgaggctacagtgagctatgatcacgccactgcattccacccaggggcaacgagaacaagactctgtctcaaaaataaaatttttaagaagtaacagtgttaagagttaggaaaataaagacaaaaataaagcaaaaagcactatctaaagattacctgtatcctttatggttttgacattcttaggatatttatttgctgctggttttccaggattgggcaagactcaaacagaaaaaaataagatattcttaattaaggaataagaggataaaggagcaatagcttgtgaacgttgtaagtggacagaaagaaaccagtaaaagagagtcttagagatcagaatggtgggattttgcaaaatttagttatgtggtatttaggagtctgtatcagaaaagctcgagggcactagtctcaaaactgaccttggccacttgtctttaaattacttgcttcatgtcactcataaaagctgcctaagaaggtcagacttcttttctcctaactataaaaggagacaaaaagcaaaacctacacattgacatacagtgctaccaatgattttaactaagttatcctatagcaagagtcatcagtttttatttagtcctactatactttttatatattcacagttatcatgatgtaagatgatagttgtggacagagaagaaatgaagaggagaaatgggtgccaaaaggagcagtctgaggatgtgtgtttatacagggagtctgttttttattttattatttttttgagatggagtttcgctcttgtcgcccatgctggagtgcagtggcgtgatcttggctcactgcaacctccgcctcccaggttcaagtgattctcctgcctcagcctcccgagtagctgggattacaggcacctgccaccgcgcccagctaatttttgtatttttagtagagatggggtttcgtcatgttggccagactggtcttgaactcctgacctcaggtgatccacccgcctcagcctcccaaagtgttgggattacaggcatgagccaccatgcctggcccgggagtctgttttgtgtgtatgtgcttatatgtgctttctgaagagagggcccggagccttcattacattcttaaaggggtttgcaacctcccccaccaccaaaaaaaaacaacttgagaatccctggctgatagatggtgtgtcccgaattctcatatccctttcattctaatttgtggtaaatcttttctcctttggtgggaatcattcagattttgttggatttttattgcttgttaatattagatttgaggagactgaattctttgaaacatctctttcctaaatcctagaaaagaggacaagaacctggaatagagttagggatttgaggggacttgttgatcttctagtccacaaaaggaagaaactggtgaactaaggaagcagtaaaagagctgaggaatctggggctaaatttatgaaaatatggacttcataacattgttcacttgcagggccattttcctgttctctttgttaggttttgctcctagctcaaatatcatttcccagatcagcaaaatcatgattcatttggcagttgaacagtatgaagtattgtcagaagaatgccttgagctaaataattctggaatcctacacagcactttgtattcatagttaagtgaagtgggtggttttgtagaaaagctgtaggtgtaaaggaaattatataactattctctgctttatacaatttatttcttaatatctcttgtattaggaacagaattagaaagtagatctgcaggatcatggatatcattaagctttggttttaactttaaaggaaagttttgttcagtacctaaaattttatccttttaaggatgtcaaatccttgaacagtcctataaatatttctgtatcatatatgcattctgtatattgttatatactacacaaatccacgtgcctgggtttttacttttcaaaggattatgtgttctttcttttacctctagcaaacaaattatgtcatagaaagaaaagtgtatacatgaagtaagatattcaattgtgtattgttataagtcttttaaaaattgagactgtaggatgttataagttaagtaataatcattaaagcctcttgggtgaacatatataatatctattgtatatgcatattttcgatcttgtgtagttagcttatgttttccttagtccttcagttttcatgtgttttttaaaaataattttgtgaaacttgccacataaggttgctctaaaacaccaaaccctgtgagtttatttaaatctgattatacaactctgaagtagatgacatgtatcgtagagaagaggaatacattccccactaatggattggaagcgcttttaaatctaattttaacatagttgtaacaaggagtgtgaagtcttataaagccgtacttgacagtaaactgagtcttaatgaaaagatgttgtgtttttgtggattgttttgcagatagtcacctctctttgtcccatgtatggcagtcgatttggttatgccctttccaatggcacagttggagtttatgacaaaacatcccgatactggagaattaaagttagtataatttagcctttgatattcaggcgcttgatagttattgtgagacttctgtgctaattattaaaattctttttcagtcgaaaaatcatgccatgagcattcatgcttttgaccttaattctgatggagtgaatgaactgataactggttggtccaatgggaaggtaagtttgaatagcaaagttcaggtataattcagagtagtaattgtccaaggtgtattggctgtaggacttagaacagtaacattgggatgtaaacttcagttcgttccttggcaatgtttttacatttaacttaataatcttgacacattcttcctgctatcattgtcaagagctgcacagtgagagagtgtaagtcttataagcggtgtttgggggaaatcttcggggagattctgtctaaatctcttatttgaagtgctgagaatccatcagccagattgattctaggtagtacaacagtaaaaaaggagttttaaggaattgtttgaatagctcttttccaatacatcttcaaaactgcctgaaaacttagcactaataggaagaatcatgttagcatattgttttctgagctataactttaaaataaaatccttttgcttgctttccttttttaacttcaaatcagaattttttacagtcttttggcaagtcaggattgtcttcttagaagctgcctaggtagctgccagatctccatggataccatttgccctcgctttcttgtctgtcagtgttggattgcctgaaggggatcagcaaattcttatcttttcttctttgatttatctttacttttctctagcaccttgtaagcattcctttggtgttacgtgaagaacggattctaaaaagctgttatgttggtttctgcttcttcacttagttttgtcattagtatgggtactaaaaattataagactgtatagttgcttattaagaaatatgaaagtctgtgaaatgggtgtcttagttggtttgggctgctgtaacaaaataccatagggtgggtggcttataaacaacagaaatttatttcttatagttctggaggctgggaagcccccatcaaggtgttggcagtttcagtgtctggtgagggaccacttcctcataggagccttacagggtggaaggggcaagggatctctctgggccttcttttatagggcactaatcctgttcatgggggctctgcccttatgacctaatcacctctcacaagctctacttgccaataccattcattaccttggctaataggattcagcataggaatttgtgggggcaaaaacattcagatcatagcagtggatcatattttgagggaatataaattattatgactgacttaagaattagaaaactactagacttgaaaacttgtcaggttaccttgaaatataattgttgacctagatgtttttatagttaaatgcttttgaaattttaagggatttctattatgtaatgcgttcctgagcatgaaaaagataagaaaattatataagtggaaaaaccgattatctacatctaacagaaatatacaaaaaggaaatatacagatccaacttgtgaatacaggtgtgaaaatattaaataaatgctgctagacaattaactttgtcttttgtatgtcatttgatgagttggagggccatcctttcctttcagggtaaaacctcccagttggattaagcaaaagatcagaatatccacagaaatattaatttgtagtcctgcttcttagttagcaaatgagccttcttatttgctaaatattgtggaaatgcagtggtagaagccattaggtagctaggctttaactagaaagaagcaagttcaggtcagtctgagttagagggctacattaatgtgctttgttaaaaatgcaggtcattcgttctttcacaggctttagcattcataattttcaggcttccatgatgttattaatagcattaatacttgacagtgatatactgtagacaaggggtaggctgtaacctaaattactttatgttttggttgcaaagttttgcccagaagattgtttatgaaaagacaaaactagtgagtagcattggtcatcgaaatgattgctatgctagattttctgtagctagccttttgttgataatacctgtgtccttgcctggaacataatcatctttttttttttttttgagactggagtctcgctttgtcacccaggctggagtgcagtggcgcaatctcggctcactgcaacctccgcctcccgggttcaagcgattctcctgcctcagcctccctagtagctgggactacaggtgcgtaccaccacacccagctaattttttgtatttttagtacagacagggtttcaccatgttagccagaatggtctcgatttcctgacctcgtgatccgcctgcctcggcctcacaaagtgctggcattacaggcgtgagccactgtgcccggcctcataatcttcattttaagtgatggtcacttattatcacttttgagatgcatttgtttctgatcagtcatttatttatttgttctctctcttggaaatgggagacttagaggataggagagctctctaaagtatctgaatagtttttatgtggaagaggaactcttaacagggttgttgtaaaaggttgcatggtggaagactgggctaactccgtagtttctgaacttcagattcaacatactttatacatttatatataataaagatacaatttttatatagagctaacatttattacgtacttctgtgtgtcaggccctgttgatatatgttaacttcattaggcctcagttatacccaatgggatatagtactgttaatttctccatgttctggttattgaaccccagatgaaaagaccaagcacagaatggttaagaaacttgcaagatgctgtggatagtacgtggcagagctagattctgaacctgagcggtttggccattaagcccatgcccttttgcactgtgctgtgtgtactatatgtactggctcttagcagacccgtttcttcaagtgaagcattgtgtgaaggcctatgaaaaacagcttttatttaaaaagaaggaagcacagctggttgaggctctttagggtccctcttggccccagcagtcataggtatctcctgagaagttgtagggcttcatagaatactcttgaaaactgctagactaaatgacctttaaagctgatttttatttttaaattttgtggtttttaaacatgtagcataagcaacttttaaatttgtgttttatttgtaggttgatgctcgaagtgaccgaactggggaggtcatctttaaggacaatttttcttctgcaattgccggtgtggtagagggagattaccggatggatggccacatacagttaatctgctgctcagtggatggggaaagtaaattgggatgagaaaaatccttaaaaagtcacgttttccatttgattgggtcaaaatatcaggaaatttcacctgaagtatttgtaccgagatcctgtagttctaataaattcaccaaagttggggagaacttaggtttttgtttttaagagcaggtaattgatgacctaaaagtatacctggttatacttgcggttttttccttctgttcagtccggggctacctgcctggcacggctgagatgaggggcaacctcatggacaccagtgcagagcaggacctgatccgagagctgagtcagaagaagcagaatctgttgctggaactccgtaactatgaggaaaatgccaaggtaggtgtaggtcctaatgtgaccaggtaatggaggctgaaatgttgagactgaccgggaggatcagcaaatatggaagaatgagagtgtcattgccagggtgtggcctttttgccattgtcagaattgagaggggatatatgctttcgtcttgaaatttcatttccaggtagttaaactgtagaaatgttttcctgattgtttaaggacatttcctgcagcactatttatttatagcagtgaaaacagctggaagaaacttagatgttcgtcagcagtagggagtatgtgctaaggaatattaagcagctcaaagaatgaatacttggactgatatggaaggatatctgtcgtcttaccaagtgacaaaaggcaagaacaatatagaatgtcttttatctttttcaaaaacaaacatgttaaaaacagacaactgtaaaaactgtgtgtgtgcatacagcaaactggctgaaatattcctttaatttgtcctgtaatgcattactgtatttgaatttgatgtaacaagggaatttgtttgcttactttaaaagaacaatacttcaaaaatgttaaagtcatgatgggatacagtggaccatacccatagaaagatgcaagggtattttcccacagggccagatagagcaagggagcactaatgaggtgagttctctgaattctaaagaatcagattactataataataataatatgctggaggctctgtcttttgaagctgaatagcaatattatttaaaattgatattagttcagtgttttggtgactgagtaggaaatgggtggggtgttttgcaggctgaattggccagtccactgaacgaggctgatgggcatcggggcataatcccagccaataccaggctccacaccacgctctcagtcagcctggggaatgagacccaaactgctcatacagaattacgcatttccacttctaatggtaagacagtactcacagctggtatttagaggcacctgtgccatcttggagtcattcttttttttttttttgagacagagtcttcctctgtcttggctcactgcaagctctgcctcccgggttcatgccattctcctgtctcagcctcccaagtagctgggactacaggcgcccaccaccacgcccagctaattttttgtatttttagtagagatagggtttcaccgtgttagccaagatggtctcgacctcctgacctcgtgatctgcccacctcagcttcccaaagttggagttgttcttaaactgtttttactcttccctgcagacaccatcatccgagcagtattgatttttgcagaaggaatttttacaggtgaaagccacgtggtacatcccagcattcacaacctctccagttccatctgcatccctattgtgcctcccaaagatgtccctgtggatctgcacttgaaggcattcgtgggttacagaagcaggtgaccctttgcaagtcacagttcatttcaggacagcacttagaggagggcaagatgtataaattttccatatgcccagtggattcttgggggcctgagaaaccatttaatggttctgtctacccaaagtttctcatgaccttttatttcctcagtttgaaacctgtaaaaagaaaatggaaaaactgatatgtaagtttaagatggttctttttttttttttttttttgagacagattctagctttgtcacccaggctggagtacagtggggcaatctcagttcactgcaacctctacctcctgggttcaagcaattcttctgcctcagcctcctgagtactgggaccacaggtgcccaccaccacgcccagctaatttttgtatttttagtagagacaggagttcaccatgttggccaggctggtcttgaactcctgacctcaggtgatccacccgccttggcttccgaaagtgctgggattacaggcatgagccaccacgcctggctaagatcattattttctgtttttagtcaggtgatctcataatcaaaaaatgtttaattgatgatttgtcaatttgtagttttggccactaaaactacaagagttaggatgcacctttatattacagtcatacataacctcagctagtgaagaaaaactgctctatttgtggaagataagatactttttacatcccctttatgatattttaaacccttagtgcatgcaggtatatatgtagactcatgctgtctttaaatcccaaacctaatatattactgtagtactttaaccctcaagtgttttgggggttccttcttaagtgaaacccttaaatatcaattgatgacccagaagtggctttattttctgggccttgcattttgaaagaacattctatacaaaacaattctcttgtgtttcattgattggccatagcacccagtttcatgtatttgaatcgacaagacagctccctcgattctccatgtatgcgctgaccagcctggaccctgccagtgagccaatcagttatgttaactttaccattgcagaacgggcacagagggtgagtatctcgcttttctctttcaatgcttttacacagtagaatcctttagatgttatttcatagaaagggaaaattacattaatgtgttatattggtagcagtaaatatgatatgaaagaattctctaacttgggggtggcttgtaacctgtaataaaaatattgctaaaataccttctctcactttgaaaaagcatctgagcaatcctcagttattggtgaattcttaccagtgtttaattcctctctttccgttatggtcttagtgtggttgtcctggtgtagtatttcaagaggaacctgcagcaagatgaaaagagagtgggacttggagctaagaacgtttttggctttaagtgctacgttaactcattaaattcttagtgatcttggggaagtcccctcaccagtgtgagcctcagttttcttatctaataagtaaggataatcttacccaccttattgcgggggcccgaggattacatgattggtgtaacagtagcaccttgtacatttgaaaggactaataccagtggactttaaccttggctgggctttggaattcttggtgggactttttaatcatgtagattctcaggcccctgcctggcctgtggaaccacagactctataggtgggcccttccagaaggcctcatgggtggttctcatgtggaacctgtgttgcaagccactgcatggtgttactgctattaacattaaaacttatattttccttattgtgtggatatatctgtggtgtttgcccatgtatacttcattttacatttcttaaagaatagaatggaatggttttaagcacgctacattgtccaggttatacccacagaagagctgttgtgtaacagaatcagcatcatacctgaatcatttgtacattgcatataagactatgtctaagtagaagatgctatgaaatcatgtctgctgtggggccaggcataattatgaatgttacttaagagcataggtgaggtgagaaaagggaatgtgactagtgttttagtattttcttggtgtgggatgaagtataattcttttttttttttctcaacaaagcagtaaaactagaaagaaggagaactcttccctcaagaatggctgtaccttcatatctagaggcacattaaaaaaaagaacgtctgtaccttaaaaatggaggtcatttcattgtgttcattttcaaggttgttgtatggctcggtcagaactttctgttaccagaagacactcacattcagaatgctccatttcaagtgtgtttcacatctttacggaatggcggccacctgcatataaaaataaaacttagtggagaggtaatgtttaatatcacggggcatagatttcttttttgaatttatttattcaaacacttagaccatggaatgagaggggcatagatttctcatgtggtgtttaccattcagtccaaagtgaggtgggggacatcaatgtcaaggtcataaaaccacgttttgttttatttttttcacatggtttaacttagtctgttagtgttaccattttagacactggggtataatttggaatagctgttttctgcctccttcccttcatctcttccttgtctaatttggaaagaattgggaatacagaggtcaacaaaaacattttcaatgtttggatgattttgtcatttaatttctaaggccagaggatttaccttttagctagctgctggaaataatgcagtttgtaatttctttgagagctaaactttcctttttcaacactgcatatatatatatatgcacaataattttgttgagtatggggaaattcaggtactattttagctaagtttgtctaacatctgaggatgctaaacttgtctattttttctctgggtagatcactataaatactgatgatattgatttggctggtgatatcatccagtcaatggcatcattttttgctattgaagaccttcaagtagaagcggattttcctgtctattttgaggaattacgaaaggtgctagttaaggtgagggaatgcggtagatgcatttgtgagaatgtggtagtctaataatatttgaggagattaatggtactacaaatgtacttatgttatagtgatgttttcaagaatttttgcaattcttgaagtaaaaattgaactagtattggagagtttactacttaaggatttattttataaaaggaagtgtttagctcctgagcaccatgcttgctttgtttggtttaaagtgatgcatttaaatattaacattttcctttgttagctcttcatcttatttgtagtatctgctttggtcttcttcagtttgggtctttccaaaaacccaaattcaagataaaagagcaaaataaagatgattctgattggccccaaagtatacaatattcccactgcaaatccctaaaatattaatatgtgtgttgtgggggctcctggtgctaaagcatggggaagattcacatggagtgtcgtgttgaaattggaggcagcacagatgagttaacttgttgagacagagatgaaataacgggaagtagcttaattggtataagcgaacaggggaaagaagggggtctctgtatctggtaaatagtgtcttttcatttgtctgggttcaagaagtttgtgaggcctttttcattcctgagtgttcatggtctccaggtggatgaatatcattcagtgcatcagaagctcagtgctgatatggctgatcattctaatttgatccgaagtttgctggtcggagctgaggatgctcgtctgatgagggacatgtgagtatttgtcatggttagtacaggtgcagggttaaaaatgtgagcagtatggaatagcaactctcagatgttaccaatagaagtataaattgttacagtgactttggaaaataacttggcattatcagtaaagttgaaaatgcatgtcctctatgacccagcaattctattcctggtttatagcttagggaaagttacagcttagttatatgtatgcttataaaccaggatatttatataagaatatttgtaaaggcattgtttataaaaatctcaaaatggaaacaatccaaattagcatgaacagtgtagcgacagtggatgaattgtgatatattcatgcaatggaatactacacagcagtgagagcacatgaatctccatgacacataagagcaaggaaaaatctgataagcataatggacactgaaagaagacagacttaaaagactataaaatgtatccgtgtgtatagttagagaaaagagtaaactatagtttgggaaacatgcaataaataaaaatataaattcagggaagagattatcatataagatagtattttctcctagagaaggagggattatgttcagaaaaaacacattgggaaacttcctgtctgaagtcttgtttaacttcattaaatattctgaatttttctgaatatgtaacattttacaataaaaaagttaagtatgtacagtacaggtcttccttggtgcttgctaggatgccaaatttaccttgccaataaaatgtactgaaaaaaattcagtaaaatagttaacaaattatagatgaaatttatgtgtatatattaggggcaagagttcactcagagtgctgcttgtgttttttcctgagacgcctgaattattggcaaataattataatggttttgctcagaggtaaatggtttttaaaataattgtattgttgaaaatttcaaacacatacagaagtacttaaatataatgatttcatatataccacccacccaacttcaacagttatcaactaaagactgatcttttttcatctctacactcaccctctttccctcccaggcactagataattttgaggcaaattttggacattgtgtaattctagccacaactatttcagacaaagggcctttcaatatcatatatatatatatacatatatatacacacacacacacacacacacacatatatacacacgtctgtataaaaatcacaatgccatatcacacttagaaaaatttacaataattgcttaatattacaaatacctcatctgtttagatgttcccagttgtcttataaatgtggacatgtgtgttttaagttggcttgctcaaatcaaaatccagatcaaagtccatacattggatttggttggaaatcgtttaatcttttaatccacacttttgcttgcccactcagtctcttctctccttctcctgtggggtgccattttggattttgctggtggtatccttgtggtaatgtttagtattattcttctgtcccctgtatagaaagataatggtagatctggaggcttgattagattcaatttcaaattttggcaagaatacttcgtgagtagtgttgtttacttccatgaggaagcatgcaatttttgattgtttctttttatgatattatcagccattgatgatcattgcctagattcattatttcttttggggtttgcaaaatagtgatattctaattctgttattcttttcttcatatattagttgaaatacttctatgaaaaataatgttccctcatgaattaatgaattatttggttccctgaggtacagtttgtacaggaaagacagtttctttatcagctttaaaataatgtgttgatctccagcatgcactaggtgaccaatgagatttttaagtccttacatactcatgtatttgaacatatttaatgtgtttcaatttatatctgttattattaatttttatggctagttttttttttttttttcgagacggagtctcgctctgtcgcccaggctggagtgcagtggtgcaatctcggctcactgcaacctccgcctcccgggttcatgccattctcctgcctcagcctcccgagtagctgggactacaggcgcccgccaccaagcccggctaattttttgtattttcagtagagacagggtttcaccgtgttagccaggatggtctcgatctcctgagctcgtgatctgcccgcctcagcctcccaaagtgctgggattacaggtgtgagctactgcgcccggccttttacggctagattttccagtctgtgggcaatggaagtctctttaggttggatacagttacctttggacatggtcccattaatttggttggttctttgttttcttgtatgatgaaatgtttcaggcttatctggtacatttcccagtcttcatatggaaccagccatttctctcgagtcctggttcttttacatgagaaatggtatttagagatcatggtctgaccactaaagatgttcattgctactgggttgattattgtttttaggccttttcaatgcgtagagctaggaattttttttttcaatgagaaaatatgagttcatactatttaccattcagatttatgaatataggctcttcgattttattactgcgcctcttctctctcacattgaaaatcatggcttcaggttgggcacggtagtttacacttgtaatcccagcactttgcgatgctgaggtgggaggatcacatgagcccagggattcgagaccagcttgggcaacatagtgagacccagtctctgcaaaaaaaaaaaaaaaaaaaaaaattagctgggcatagtggtgcatgcctgtagtcctagttactcaggaggcagaggtaagaagatctctggaacctaggagtttgaggctgcagtgagctatgatcatgacactgcaatccagcctgggatgacagagcaagatctcttaaaaaaaagtgggggaatatcatggctccaatcagtatcaacataactatttgcttcattttacagcacagacacaacatttaagaatattagccaagttgttatcaacaatatgattgctgaaaacagtttaagattttttgtgtgttaattctttgtgtctttagggcatatcccagcagggagtttccgtcaaattactgtatcttaaaatcatttgagattatttctcttttggttatgccacagatttgatagagagttaggttcattgtcttattttgctctcagttttggaggattggcatttttacctttttggtttaattctattacatatttactaaaacctttttgtaattccaaagttagatctataagacaggcatgcacggaaaagtctaactttccattcctgtgaccttcattctgttctctcccttttactataaataaccagttgaacatttaagtatatatatgcagatacacacagatatatacacacacacccctcttcatgtcttagattaagtcatagtatgtatatatctttttctccaccttggttttttttttttttttttttttttttgagacaaggtcttgctgtcacccaggctggaatgtagtgatgcaatcacagctcactgcagcttcaaccacccgggctcaagggatcatctcacctcagcctcctgagtagatgggactaaaggcatgagccaccagcccggctaattttttatttttttgtagagacagggtctcaccacattgcctgggctggtcttgaactcatgggatctactgatcctcccaccttggcttcccaaagtgctgggattacagatgtgagccactgtgtccagcctccaccttgctttttacatttaaaatatatcttggagatttctccaccatggtgtagagaaatacatctcatttgtctttacggctacatagtactccattttctggctgtttttcagccagtttcctctatttggattgttttttttttactgtagataatgcttaagtgaatagttttgttacgtaaatctttttatatttttgccaggatagtttgagaaaaaggcttaacaaatgggattactgcagtaaatgatacatgcatacagaattttgcaaggtcttgtcaaattctccataggtgttacctcattttgtattcccataagcaatgtatgagattgcctgtttctcttcagccttgccagtggagtttgtgggcatactccaggggatgagaaatggtctcttagttttaatttttattttttaaattttattttattgtggtaagaccacagcatcagatctaccttcttaacacatttttaagtgtataatacattatcgttgactataggtgcagtgttgtacagcacatctttagagctgattcttcttgcttaactgaaactattggtaagcaaattcccatttcttcttcccctctttcaactatcattctactctttgattttatgaatttgactattttagatactccatgcaaatatataatatttgtccttctatgactggcttatttcactcagtgtaacatcctcagagttcgtccatgttgtcacatattgcagaatttccctctcttttaagactgaatagtgttccattgtttatatgtactaaattttctttatccattcacctgttgatgaacatttatgttttttccacatgttggttattgtaaatagtgtggtgatgaacgtgggagtgctaataggtcttcagggtcttgtcttcagttcatttggataaatacccggaagtgagattgctagatcatatatggtagttctatttttaattttttgattacatttttaatatttaatcattaaaaattaaaaatttaaatttttaatatttaatcattaaaaatttaaatttttaatatttaaatgttttccatagtggctgcaccatttttcattgtaatcaacagtgtacaagggttccagtttctctacatccttgccaacacttgttgtcttttttttgataattttcatcctgacaaaggtgaaatgatacttcattgtggttttgatttgcatttccctgatgactagtggcattgggcgtctttttatatacctgtcggtcatttgcttttcttgtttggagaaatttctattcaagtccctagctcattttttaattggattactagtgtttttttttttttttttttttgctgttgagttgtaggagccatttattatgttcagtattgggcatttttcattgttttaattcagggccatttccatttcttttttgtgtgaactatttgtctgtttacatatcaggtactgttgtagtccattttgtgcctctataacagaatacccgagaatgggtaatttataaaggaaagaagttgatttagcttatgggtctgtaggctgggaattacaagaaacatggcactggcatccgcttgacttctgttgagggccatgtgtgaagtcaaaacatggcagaaaaggtcaaaggagaaggggacatgtgtgaagaggcaaagcctgaggggtgccctaactttataacaacctgctcttttgataacttcattcctgcatgagcgagaactcactcctgagagatggcattaatggcattaatctattcatgagggatctgcccccatgacccaaacactccctactaggcccacctcccaacactgctgtgctggcatttcaacttcaacatgagttttggcggggacgaaccacatccaaaccatagtgggtatattaatctcttacgtgtgatatgagttgcaaatatgttttccggagtttgtcatttgggttttccctttgcttagatttttaaaaaattttgctttaatgggccaggcgcggtggctcacgcctgtaatcccagcactttgggaggctgaggcaggtggatcatgaggccaggagatcgagaccgtcctgactaacatggtgaaaccctgtctctactaaaaatacaaaaaatcagccggtcgtggtggcgggcgcctgtagtcccagctattcgggaggctgaggcgggagaatggtgtgaacccgggaggcggaggttgcagtgagctgagatcgcaccactgccctccagcctgggtgacagagtgagactccatctcaaaaaaaaaaaattttgctttactgttggttttaccttgtaagagcttttaaaattttgtatatagtcaaattataagaaaatttgactacattaagaaaatgtaagtcattttcttaatactttatttatttatttttgagacagagtctcactctgttgcccagcctggagtgcagtggcgtgatctcggctcactgcaacctctgcctcccagattcaagtgattctcctgcctcagcctcccaagtagcgctaccacacctggctgatttttgtatttttagtagagacgaggtttcaccatgttggccaggctggtctcaaactcctgacctcaggtgatctgcccgccttggcctcccaaagtgctgggattacgggtgtgagccactgtgcccagccacattttcttaatacttttacattttgaattactgttagaaaagttttctttaacagcagggtatagagtaattcatctgttttcctttagtacttgtatattttgcttttttacattaagtctctgttccagttggagtttatcctggtgttcatataaataataaactcagttttatcattttccttatgactatcacattattattatattattattatttttgtgtgtgtgtgtgtgtgtgtgcgtgtgtgtgtgtgtgagatagggtctcactgtgtcacccaggctggagtgcagagagatcacagctcacagcagcctcgatctcctgggctcaagttatcctcccacctcagctgctggagtagctgggactacaggcgtgtgctaccatagccagctaatttttgtgtagacccagggtctcgctctgttgcccagactggtcttgaactcctgggctcaagcgatctgcctgccgtggcctgtcaaaatgctgggatttcaggcgtgagccactgtgcctggccacattgcattattttaatactactactttttttttttctttgagatggagtttcgctcttgttgcccaagctggagtgcaatggcgctatcttggctcactgcaacctctgccttcctggttcaagccattctcctgcttcagcctcccgagtagctgggattacaggcatgcgccaccatgcccagctaattttttttgtatttttagtagagatggagtttcactatgttggccaggctggtctcaaactcctgacctcaggtgatccaccaacctcggcctcccaaagtgctgggattacaggtgtgagccactgtgcccagcctgatactacttcttttaaagttcatcatgcttacaatgatttcagatactgcccttatcatatatcatatttctgtacacagttgaatctatttctggattttctgtactattccattggtctgacttgtcacttcatttgacaatatcattcttttttaaaaaaaattattttgagacagaatcttattctgttgcccaggctggagcacagtggtgtgatcacagctcactgcaacctcggcctcccaggtacaagggatcctcctacctcagcctcctgagtaggtgggactacaggcatgtgccaccacacccagctaatttttttttatttttggtagagacagggtctcactatattgcccaggctagtctcaaactcctgaggttaagccatcctcttgcctcggccattttttttttttaatgtttggctgggtgcagtagcttatgtctataatcccagtgctttgggaggttgaggcatgaggatggcttgaggccaggagctcaagaccagcctgggcaatatagcaagaccccatctctaaaaaagaaaatataaatttcattgtgatattctgaaatacatatttgatcttcaaccctgtttcctgacataataactcctaaaatcttaggctctccaaagtgatgtctttttgtatgctattgattggtttatggctggcagctcctaggtagcttcaggataggggtcagtcaccagaacgaccaaggcaggattagaggattgggactttctgcccacccctctcccaacctccagggagtggagaggggctgagagttaagttgatcacctatggccagtggtttagtcagtcatgcccaaataatgaagattccatcaaaacccaaagggacagcattcagagattttctagacatctgaacacacagagtttcctgaaggttgatgcacctagggagggcatggaagctccaagcgccttccctaatacttcgttctatgcatctcttcatctgtatcctttgtaatatcctttataataaactagcaaatgccattaagtttccctgggttctatgtactgctctagtaaattaatcaaacccacagagggggtcatgggaaccctaacttgaagcagatcagtcagaaattctggcagcctgaacttgtgatatgtatctgaagtcaggcagtcttgtgggactgagcccttaatctgtgagatctgacagtgtctccgggggaatcgtgtcggaacggaattggaggacacccagctggtgtctgctatagaactgattgttttcttggtgtgtgggaaaaacctccacacagttgaggacagaagtcttctgtgttgattgttgtggtgtgggagcagaggaggaacagtttgtttttttccccactcatggtgaactacacaatgtgaaatttaccatcttaactactgtatactacttttagtgtacggttcagtggcattaaatacgttcataatgtgtaaccatcaccaccagcagcatctctataattctttatctcttaaacctgaaactctgtacccgttaaacagtaactacccattctcccttccctttagctctggcaactaccagtgatggtgccattctttcatgtatggatgttttgtatgtttcaatatctggtgtgggtagtgccccgtccccaacccctgttgcttttctttttcatggtttttcctagctacttgtgcttgtttgttctttccaatgaatttcatcagcaatttttgtagctccgtaacaaaaataggtattttaattgagatgatgttaaatgcattaacttagggagaactgatgctgctgcagtgatgtttggtcttgctagctaagaacatgctatgtctttatatttgcttaagccatgttttgtgtctttctggagtgctttcatggtttactcttgtagatactggatgttaccaattttaagtttatgcttaggtattttctgtatttttagacaattacgaaatattttataattgtaaatattttttacattatcttattctataattatggttttgtgtttgtacatatgaacactgatttttatctgttgattttataatgtgccctttactaactatcttatagtttttccagatgtattcttgtatcatctgtaaattgagatagatatttgctctttttggccaactatctgtagggtccctagtttctctatctctctatctctctcttaagtcaaaaatggttgctggctttaggcatttgattgcaaaatgtcaacatttgtttttttttttaaatcaaattaattgatatataactcatacatgcagaaaatttatgcttttaaggtttacagtttaatcaattttgagaaacttatgtaatcatgttgctactactacaatcgagatataggatatttctatcactggccgggtggctcacacttgtaatcccagcattttgggaggccaaggtgggtggatcacttgaagccaggagttcgagaccagcctggccaacatggtgaaacccagtctctactaaaactacaaaaaattagccaggtgtggtggcgggtacctgtaatcccacctattcaggaggctgaggcaggagaatcacttgaacctgggaggtggaggttgcagtgatccgagatcgtgccattgcactccatctagcttactgggcaacaagagcaaaactccatctcaaaaaaaaaaaaaaaaaaaaaaaagaatatttctgtcactcttgtgactgtttgtatcaatacctcttctaacctccagttcctggaaaccactcatcttatttcttttcctgtagtttcaaccttttcaaaataccatataaatggaatcatactgtatctatatctatatatccttttgagtctggcttcattcacttacataatgtcttagagattcatccatgttgctgcatgtatttgtagttccttttttattgctgaatagtattccattgtatggatatatgatatttatctattcaccaactgaggataattgggttgtttccagactttggtgagtagaataaagctgctataaatacttgcatacaagttttttatagacataggttttcatttctcttgggtaaataccttacaatgggattgctgggtcatacattgtgtgtttaactttataagaaactgccaaatcacctgtcaaagtagttgcagctttttgtatttctgtccacaatgcatgaaagttccagttgtcccacatctttgctagcatttggtatcttcagctatatttttctttagttattttcattgttgtgtagtatagatctcatttctgttttaattttatgactttgttttaaacctttgataaaatacaaggctgagttgtcaaccaggccactttagtctaatgaatattcatctgaaacttggaaggtgggctgtcaccttgctcacttgtccctactcccagcacagtgggcttgagaattcttaaccacctaaatcaaccattgaccagtaaccaaggaaggccacttgtcttctgtttatttggaaggaaaagaatatttttatggaacttatccgtattttcaaagcaaactagcagttactcgattttaatgaaaatatagcttaaaaatggtgtcttttctttgtatgtctaagaaatttgcaagtttttcttaagcttgccatatcaacatgaaatgatgtcaaatttctactgatttgcacaggaaaacaatgaagagtcgttatatggaactctatgaccttaatagagacttgctaaatggatataaaattcgctgtaacaatcacacagagctgttgggaaacctcaaagcagtaaatcaagcaattcaaagagcaggtcgtctgcggggtaagtctcttttcataacactgcactttgatctgtaatgtttttggtggaactcattgaagatggtggtagcatccaataattcatattggggctgaaagtagcatacctttcacactccagagctggcaccagtcacttatgtttcagtcagtcggcctagtgtttggcttttgtctccggacttcaaagggagagaaaaccttcagctccttttcttagaccttcctgcatcctctaaagaaaaacctactatatataacccaaaggaaatatataaacatatatatataaataaaaccatcaaggcccaattagcaaaaaagagactgaaaattaatgctaagtgtctaacttaaaaatttagaaaagaacaataggataaacccaaggaagcagaaatatagccagagatttatacctgaattctgctgttttgggtcgatgctttgacttctttagaaataatctttgctaggtgactatgagctttgatccttttctgtaaaactgactgttggtttctaggtttgagacagtctctaagtcagttttttcaataattccctcaccaagttattttttttagggaatggtaagataaatcatatttcaagtataactcttttccctcctggttttatgttgttttaaaactgacgtctaattttataatttcatgtctaacaatcttttggttcctgatgtttcttcttatgcagttggaaaaccaaagaaccaggtgatcactgcttgtcgggatgcaattcgaagcaataacatcaacacactgttcaaaatcatgcgagtggggacagcttcttcctaggtgaggaaaatacaggtcatgaagttcctggcaaagattttctgttaaaaacctatgctggtttgctttggatcacaccctggtgaaccccgggtgctaagaatgaaaataaccttggtgagttgtacaaattaaagacaaagaactacatgtgaagatagacttgctttctatttttaaatcagtagtagtactgttgctgaataatactaggtttttatggaataggatgaatgcttttgaagtattagggcttcagagtccaattttgcttatttatggtatataaatacatatttttttcttgaaattgcaattgagtttgtacttttcaaatagattatctactttttcattaaaatgtaaagatgttaaactttgtgttgattgattataaaatcaccaccaaatcagaattgcccatttgtattttgtagtagagaaaaacaaaaatgtgggctgggcacagggcttatgcctgtaatctagcactttgggaggccagggcgggcggatcataaggtcaggagatcgagaccatcctggctaacacggtgaaaccccgtctctactaaaaacacaaaaaattagctgggcatggtggcactcatctgtagtccaagctacttgggaggctgaggcaggagaattgcttgaacccgggtggcagaggttgcaatgagcctagattgcaccactgcactccagtctgggcgacagcaagactcccgtctaaaaaaaaaaaaaaaaaaaatatttgggctgagctcagtggctcacacctataatcctagcactttgggaggccaaggcgggtggatcccctgaggtcaggagtttgagaccagcctggccaacatgatgaaacctggtctctactaaaaatacaaaaaattagccaggtttggtggtggacacctacaatcccagctatgcaggaggctgaggcaggagaattgcttgaacccaggaggtggaggttgcagtgagcaagattgcaccactgcactccagcctgggtgacaagagcaaaactctgtctcaaaaaaaaaaaaaaatgtggatatttggatttgtgtgctttttaatcactgaaagatgggtgcaaacaacaaatttacattaaggaagagtcaatttagagtgattactttgttgggctaatgttagctgctgtaacaaatagacctcaaaatcataatgactcatttttcatttattatgtaaggatttctccatagttatgcagggacccaggttcctttaatcatgtggctctgtcatcccctaggacaaacttttctacctgagttcactaaaggactaagcctaaggaaaaaggtttgggtgactagtttcacattcagtacatacagtggagggaggtcttagggcagtggggctttattatctcacttggaacactatttgacaagggctgtcctagggccttgtggttatttacagccatgtaccagataatgaagtttaggtcaccataagattataatactgtatttttactgtacctttgtgtttagatatgtataattacacaaatacttagcattatgttacagtttcctacagtattcagtatagtaccatgctgtacagatttgtaggctgggaacaacaggctatactgtatagcctaggtgtggagtaggctataccatctaggtgtgtataagtgcacactgtacaatgttcacatgatgacaaagtagcctaacaatgcatttctcagactgtactgctgttgttagcagagcatgaccatatagctgagccggtagaagagagtaagagggaaacatgtcttcttcttttaaaagtgtggtctgaaagtagcacactatcatttccattcagaattccattgagtcacatgaccacatctgcaggggaggccgggagatggaatctagctgtgtgcctgtaggaacgctggtatttgtgccaatagctagcagtctcttccctaggaaaaatttcgccctaacgtagatttcaggactggtttaatgagtgaaacttcagttagttttaatatcttaatagctgtttaggggaagtggagcatttccctgaggttagtaaacattaattttattgattttgatgtggccactttacgatggcccctcctatatctgaaatttaagccttatggagtcctaattatgagaatatgctaatacttttgtttttcattttcaacctataaactcaagagataatccacatacactgtattattttcaatctccaaagtagtaaagtatcatcgtaaatctgcctcacacagaggttgctgtgagccgagatcatgccactgcactctagcctgggtgacagagggagactccatctccaaaacaaaaataaataaataaataaataaatgtgcctcacagaggaggaaactgaggcataaataacctccttttcaggtcacagagttagtgacctgtgtgacctgtctagtgactcaagaggaaacttgagtcctactgttgagtctttgttttaaccatagtctaatttataccatttgagattaaaatctctagttggtgctagttttaaattatataatgccattcatttttagggagtctaataacataatctcatcaaaggtcactctgttgttctttagctaaaaaacttccttcttagacctaaaaatactcatggccaggctagaaggcattgacctgcagcaagacatattaagttgttctgattcataggttattttcacagtaatttgatcctgttgatgttggtgtctgtttcacagatgaggctctgagctctaagacagagtgtcctgtacagggtcccacagctgggtaagccctggtgtgaaggaggtgttggaaacaagtagtcacggcctcttctactccaaacttcccaagcaagtaaagactggccgaagtgaaaacattcataaaacatgcaactaccttttttcccccaacttagaactcatcctgttcagcttaggagtgaggaaaaactggacaaggagagatgagtttatcagtaacttctctattttgttgccatatgtttctatcctgatagaatctgagtacttctagaagctacagcaaagctgtatttcactgctgaattacattgaagctttaagtgagcactgagctgtcatttaaaagctgactttgaggattttgatatctgagagaaagctttcagtaccataattcaggttctgaggatttttaagagtataatttgtattatttcccaccatgactgcctatccagtacctcaaagccccgctcaaatgctctctccttaggtgacctttcctctcccatgtctactccttaacccttattaaattctttacttaaatcttaatcccctgttaagcaagaatggtgtctgcatcttaaccagcgtcaccctcgccccagtgctgagccagtgccttgagcatagaatagcatctgccgctctgcttgggattgtctgtccttaatacgcctgtcagcagcttcagaaatcaaagaactaggaactttaaaactattatgcaaccctagaagtgttttacaagaaagattttcaacattgttattaatgtttcaaattttataattagcagttacagatctgccaatgcacagtcctgtcattatagaactaaattacctccaatttcatttggaaactcaagtacagtaagacacccattacagcctggtgtttcgcattttgcctcttttccatctggcccctgcccacactctatgctctagctctgaagtcatcttgtaatctgtacagtacagaatctgcttttcctaaaagtgatgtcacatggacagttcccaagtcgtttttaaattgtctttgtggactgattttgcatcagagagggaatcatcaggacacccatttccatgcaggctggagagccctcctctggcatcacttcactagatctcctcgacccttttcaacagggtttgtgcttcctcattgtttagtagtggttaagtatgtcatggtgttgaagcagtaatgcaccccaaaacttcttattcaagaaatactgccagaactttgggaggtcaaggcgggtgggtcacttgaggtcaggagtttgagaccagcctggccaacatggtgaaatcccatctctactaaaaatacaaaaattagccagtgtggtgttaggcacctgtaatcccagaattgcttgaacctgggaggcagaggttgcagtgagttgagatcatgccactgcactccagcctgggtgacagagactccgtctcaaaaaaaataaaaaataaaaaataaaaaatactggtctgggagaggtaacccaagctttgtttttttttttgtttttttttttttgtgtgtgtgtgtgtgagggggtgttctgtggggaagaaacccacattcagtggaattttgagaggcaatctttaaacagtagacaagcccagttcaaaactaacagattctttcttttggaaccctaactttccacattttaaagatgtggactttaaaattaaagatgtggacctaattttaaagattaaggactagtgttatttatagggtacttccttagacattttatttttcttcttattcaaagatgcaaatatgttcacaagttttgttaaaacgttcctaatttccagtatggttaacatataaagaagaagtagtgaagtagtctctgtaaggctgttctcttcctgtccaatgctggagcttgaagcccatagggcgggtagtcagaaaagatgtggagttggggagaacaagctgcaacccacaggcatgggctggagcccgtgaggatgctaaaatctgtccgttcttgttgcttctgaccttgatggtgtgggcattctgctgaaactgagacccttcacagaggagctgaaggaagatccatccaggggaaggtggagcggttgcaggcccaggcacaggtgtggttcacaccagcaaggtgtgccagctactcaagggctgctgctgcattgggccctgcagatctggcataggaatttgtggctcatcctaacctgagacatagggaagagagttctgggaaatgtagttcagtctagccaagttgatacatgacaaagctaccagtggctgtcataggatggtgggatttcaggtgatccttagatattacatgttattacctcacaatgagcatgtgttatttatatagtctgaaaaaacagaaagctattttttttgagacggattcttgttctgttgcccaggctggagtgcagtggtgcgatctcggctcactgcaacctctgcctccctcctgggttcaagcgattctcctgcctcagcctcccaagtacctgggattacaggcacgtgccagcacacccagctaatttttgtatttttagcagagatagggtttcaccatgttggccaggctggtctcccaactcctgacctcaggtaatctgccagcctcggggcctcccaaagtgctgggattacaggtgtgagccactatgccgggcccatagagctattttctttggggataaaaatgggagttataagaattggagactcactattaagaataaagagagaaaccatatattttacaggtgaacatcatagcttttatctgaaagaggtataaaaaagatgcccatgttctaattcttcttttgctacctaagagttgttgacattggccccaggccctaaaaagcaatcaagatgcaaaatgaagtactataaggaaaacaaacttcactatcactgtgtatctatcttcagtgcagaaacacaatcttttaagttacaccatccttcacaatctaagaggtgctgctgtagatgatgtaactgacagcaacatcagagttgggctcctagggattctctcccctcagacacccgagtccctttttgtagtgtataaaagatgattatgtgttgacagatcataaacacactgagataaaggagacactaaaaagcacattttaacacttgtgaggtattctaagattcagatttggctttccagaattggaaaattggccttggatggtgcctacagccatgagtctcaaactattttccaagcttggcacacatgacagtttcacctacccaagcacttttccctgggtcttcctgaagttatgccactgacaccctttcccctcaactcatgaaaacacatcagaaggcaagtgagtgagatgacctttagtcagctggaatatagaaaaggcaagctgtgacattaaccattagtaacagtattcgcaatcccacttgagtgttgctacactgtggttaaaaaattgtggtctccagcctggccaacatggtgaaaccctgtctctactaaaaatataaaaaaattagctgggtatggaggcaggtgcctgtaatcccagctacttaggaggctgaggcaggagaattgcttgaacccaggagacagaggtcacagtgagccgatatcatgccactgtactccagcctgggccacagagtgagactccatctcaaacgcaaaaaaaattgtggtctccaaaatagtatggtgtaaaatggttcgttaccatatgcataggggaagacaatgttagaactagttctagatatttctttttatctcatcatttaaaaattagtgttttataacagtaagttatagaaataatattactacatgtgtaaaatatataaatatccatatcaagggcatacctgctaaaacatttcttaactggctagggtgcagaattaaacctttttgaaactaaacctaaaagccaaagcgaaagtcattttcatttaaatgcaaacttcagaaaagaatgaatactcaaaagttttaggagatgaaagagaagagtagttaagaagtttaaaggcccagtgctttttctattaattagtaaaacccacactaaacactactgcaaaagctaaaaataaatgtaaaaaagagaaaggaaacagaagactctattgggatggaatgagaacagcatctttcatccacccatgcatacccacacacaggtaattatgatgtaactccctggaacagttcaagaaaaaaattaacaagatgcacagcctcttggcattctgatgtggttttagcattccgtctcttaaaataaaaagcaattagttatatagttgaccctacagtatttaggaaaacagaagcaacacgtgaggctaaaatcatttaattatacacaggccacaattgcaggatggaaaggcagtgggcacttggaagtgactacacatggcaataagcagcctatcttctttaccaaccagaagtttcttggggcatgtgatggtaggccagaccctttccaagggaataatactacactaagcctacactgtactgtgagagtcatggtggaacaaggccacaggcagtgggaggaaatgtgatgactcactgtgtcagaattctaaggcccagcatgatcaggatgtaaggctccataattttctaaaccagaaattatgagaagaacaaaattctgcaatcacttatgtttttttcttcttttttttttttgagacagagtttcactcttgttgcccaggctggagtgcagtggcacaatctcggctcactgcaacctccgcctcctgggttcaaccaattctcctgccccagcctcctgagtagctgggattacaggcatgtgccaccacgcccagctaattttgtatttttagtagagatggggtttctccatgtttgtcaggctggtctttaactcctgacctcaggtgatccgcctgccttggcctcccaagtgctgggattacaggcgtgagccaccatgcccggctgcaatcacgtatgagtttttctaaaaaaaccgaaacactggaaacatggatgcatcttaaagactttatgctaagtgaaaccagtcacaaaaggacaaatactgtatgattccacttacatgagaaatatgagtagtgaagttgatgatagagacaaaaggtatggctgttgctaggggaaggggaggtggggagttattgttcaatgggcacagaatttgggaagatggaaaacttctggagatggatgatggtgatggctggacaacaatgagaatgtacttaatccactgaattgcatatttaaaaatgggtaagctggtcagttttatgttataaatattttacctcaataaaaacaaattgaacttaaaaattcactgaagaagccaatatggaaaaaggactaaatgttaaaaaaaaaaaagccaactttttttttttaatcaagagataagtacttagctgcaagctcaaggtctcggttgaggacaatcattatgagtcctagtaaaagacaaccagttttaagaacactgtcaggcaagctaccatgtagttctccttgactccatgcttagctctttcagacttcccagtaattacgaagggtcacatttttgttcagctttgcccagtgctgtcattcataatagatgaatgaaaagtcccagaaacctgttctgtttgggaaggttttcttttgttccaggcttcggtggttaatatgcttgacaaatttcagagtctctctgtctctgtagaccaatgccaaagaattgctttctggattcactgttagcagctgaaaaagacaaatacagtgacacatcagaacacagaacttattctcaaatcttggatgattaaccatggaacagatggtttccatatcaagcacttaatctggggatagaggggtcctctgaatgaacacttactaggggtggctgtcaagccattttccaacaagccctattccagcatatacctagaaaggtacttacctattacatttatttcttactacattgtaagatttgtgggaatgcaccacatggctcttaatttggaatttctcaggagggtaaaataaatgcttactgagtatcctttagcatctttattccatcctgagtattttctactagaaattagaaccattgcctggcagagatttattagctaaagacactggtagaaggtcataaaaattgggtctttgaaaaatgaaagcattctcaataactaaaaatgatagtttgctatcagaagaaacttacctcttcatcttcacctttggcaatgtaagaagtaaaaccgccatattctggctcccagccttacaagagaaaaacaaacagcattcagaaagctcctattgaaagagtcgcaccatctacttaaatcactgatcccatgctgcttaacagtgggggatctgggagttcagcagtaactggttctatgacttatgagcttgaacttatcatctagtttatcatggattgccttcccctaaatgcctaatttcctgagacagctgaactgaaatgcagtcttatttcaataaactttgaatatgaaaattaagagagaattaaatgctaaatattcccagaagggcaattacataaaatctatagatctgggagcacacttaggggaaaattatggtgtggtccatctccccatttcctagtcacagatataaatcctattttgagctgggagactggaattcatgacccgtaaaatccctttgactttgagatcccatgatgtgagattctgaactaggcaaattacttatgaattggttcagctggaaagggtccctcagaagagactgcccctcctacggggaataatccaccgcttgctttcctccctcttaccttcacagccacagtacagaattaagtctagggcaaattcagccttgctatggtcatgaattaaagtgtagtgaccggtcttccaatgcctcagttccccttggcacatgggaacacttgattctaaggaaaaaaaaaaagatgagaaactttaaaaaataaccttgatagaactgttggattgcaagggaatcataattaggaatgatacagcaacacagggaaaccattcccacaaacctttgattgaagtgctattctaccaatccagccttataaaagattgttaggaattaccagctctattttggggtaaaaaagttgaattttgggccgggcatggtggctcatgcctgtaatcccaacactttgggaggctgaggtgggcagatcacctgaggtcgggagttcaagaccagcctgaccaacatggagaaaccccatctctactacaaatacaaaattagccaggcgtggtagtgcatgcctgtaatccagctacccgggaggcttaaggcaggagagttgcttgagcccgggtggcagaggttgtggtaagccgagattgtgccattacactccagcctgggcaacaagagtgaaactccatctcaaaaaaaaaaaaaaaaaaaagttgaattttgatttctctctataataataaatttcagatggaaaagaagtctagttgcaaaaaaataaaaaatacgacatgaatattattttatctaaccttaagagatttctcagcatgttattacctaaagtagaaacgaggaaaggcaaagatagacctgattactaaaatattttataaaatttaaaccatgctgaacaaaattaaaaaatgaactattacaatctgttaaacagaaggttagtactcctctgaggcaggcagatcacctgaggtcaggagttcaagaccagcctggccaatatggcaaaaccccgtttctactaaaaatacgaaaatattagctgagcatggtggcgtgtgcctgtaatcccagctacttaggaggctgaggcatgagaatcgcttgaacctgggaggcagaggttgcagtgagctgagatcacaccactgtactccagcctgggtgacagagcgagagtccacctcaaaaaaaaaaagaaggttaatactcctatatgtaactttttaaaattaactaataaaatgacaaaaagcccaaaggaaaaatacactgaggtaatgacaggcaactcatgaaaaaaaaaaatcaagtaaccaatagggaaaaatatacaaccacgcaccattagtcaatgataggcgaatgccatttccacctaaagaataagcaagttggaaaagaaaatataacagtttgctaggaagaatgaaaacatcatcatgtacaatgctggtgggagtgcagactgatacaagttttggggaggcaatttggcaactgccttaaaattttgagcagtctttgatgtatcacctgtacttctgagaagcattctgaagacacaatggatgtgtcgtttattatgacagtgaagaactggaaaaaatctaaatgctcaacacaggactggttaaggtcatctgatccaatagattgcaagcattaaaaagtatactagagaacggtgtttttcaaaacttaattgtggcatacattcttgaaataaaagcttctagaaatgcaatgttggaaagcagatacatgtaaaactgctttggtggccaggcgtggtggctcactcctgtaatcccagcactttgggaggccagggtgggcggatcatgaggtcaagagatggagaccatcctggctaacacggtgaaaccccgtctctactaaaaatacaaaacgttagccgggcgtggtggcatgcgcctgtagtcccagctactcgggaggctgaggcaggagaatcgcttgaacccggaagacggaggtagcagtgagccgagatcatgccactgcacttcagcctggcaacagagcgagactctgtctccaaaccaaaccaaaccaaaccaaaacaaaaaaagcaaaactgctttggtggaaggtttcctaagtgaggagggtgtgcaaacctgttctattgttataaaggatgtaaaaggatcagaaagaggtttatgaaatattaagtggaaaaaatacagaacaatatatatggtataatctcattaaaaatagatgtgtaaaaatataccccccatatgtgtatacatgtatatgtctacatagcaaaaaaacagtggaaggatatattccaaatgctaatatggccacttgtagattattattttcctttttcttgttttctaaacattctgaaattgacgtatttttattttttaaaatcatcttcaagttatcaggtctgtaatgttatctcactagatgtgccctagctatgccaatgtttagcactgctatcatatgcccagcaatttgatagcttttgccaagctttatagcttttcttcaagatggtaaacttcgtaaacagtgacttttctctttcacttttgtattccctactctgctttcacccaaggccccctgtatacagtaggtgctcaacaatggaataaagcatcttttggctgcccatatagattttatcctaagttgcaggttcccgtaaaaatgaaaccaaaaaaggaatagaactggacaagttttggccaggtgtgattggtcacgcttgtaatcactgcactttgggaggacaaggtaggaggattacttgagcctaggggtttgagaccagcctgggcaacatggcaagatcccatctttacaaaaaaaaaaaaatcaagaaaattagttgggtgtggtggcatatgcctgtgatcccagctacttgggatactgaggcagaaggatcgctcgagcctaggaggtcaaggctgcagtgagctgtgattgcaccactgcactccagcctgggtgacagtgcaagaccgtgtctcaaaacaaacaaacaaacaaacaaacagaagtggataagttttttaaaaaatccctttgagacagactccatggatactgactctggttcctcttagggtctaggcataaatgccagtatcaattaacatggaaaactaatctttcaaagaaaggctaccctgtgtattaagatagcacagaaaaagccacctgggtctggttttactaaatatctgcagtggccaaagtgactgttcagtcagttttggaaggccacagaatgagttatgttgctttcagttagcatctcaaaccactgattttgtttccacaagtatccaccccttgtctctgctctcctaactgcacagggttctcaagaaatttgagtggaagcagggaatggtaaactgggtgacagatgttctcactgacatagtagtaagtgctgaaacatctaagctgaatttgttgctactttttaatggtgccaatattttcacaggagtgttacctcttaaattcttaggctgttatattcagatctgagcttaaatggcgctcctcagagagacttttctaaatcatctattcgcctaagaggctactcagtcatttctttttttttttttttctttgagatgtagtctcgctctgttgcccaggctggagtgcaatggtgcaatctcgactcactgcaacctcctcctccccggttcaagtgattcttccacctcagcctcctgagtagcttggattacaggcgttcaccaccatgcctggcaaatttttttttttttttgtatttttagtagagacggggttttgccatgttggtcaggctggtctcgaactcctggcctcaggtgatcagactgcctccgcctccaaaagtgctgggattataggtgtaagccaccgcacctggcctactcagtcatttcttgtcatataaccctattacaatgttttgcatagcacttatcattacttgacgttttcttgttgttcatgtatacatttaatctctgtcttcttctactagaatgtaagctcccaaagaccagagaccttgtctgttttgtccttcagttcctgaaatagggcttagggcacagtagatgctcaataaatgtttgttgaatgaatacatgtttgaatggtgaatggttaatggtaagtaaggacaaatcctaacaacagcttacctttctttgtttcattttcctctggctctgggtctgtctgctcattgctctgttggctgttgttgctgatggccatctgattattctctggctcaggaggactatggctagtcccttcttcagtgatatcagtggtttctgcctcttttttatcattcatctcatcttcttccgaaggggccaagaaatgaagcttcaggcctgtgaagttggagagcagcaagaatagtgcctcagagcgaaataacttcatgcactccttcaatatctcaggaagcttactctcctcagctttctcataaaacctgaaaaacagcaatgtcaagttgttcatcaaagccacagatgtaaaatgactcacagaataaaagctgatcgttagctttgtacctctcttcctaaatcttggcacagcttactaaggcacaagttattacaatagtgagattttgttaggattttgttaggacatcctgctactggatgtccctgagaacaaaacatcattagggcaagtgtcctattattgggtgtgagccttggtgcatgattgtatattttttcctgttggttatttgattttctttcatgaactgcctgtcatcacctcagtctatttttcctttaggctttttgtcattttactagttataaaaaaatgttataggtgctgaatgtagaagcaaatatctcagatgacgggttctaccttttgttagggggacctcggctgctccattccacatgtccatgctccaaggcctcacagactttcgtgaatttctcaggctagaaaatgagcaaataaagaagcattcagcagatctccctattaccccgcactggtttggcaggtacagcagctctgccaaacatcaatctggctgattcctaaaaggtgcagttgactctcattcctttttttttttttttttttttttgagatggagtttcactcttgttgcccaggctggagtacaatggcgtgatctcggcccaccacaacctccacctcctgggttcaaacgattctcctgcctcagcctcccaagtagctgggattacagccatgcaccaccacgcctggctaattttgtatttttagtagagatggggtttctccatgttggctggtctcgaactcccgaccctcaggtgatctgtccaccttggattcccaaagggttgagattacagacatcagccactgcgcctggccgactctcactcctttcatacaagatcccctactcctcctgtggtaaagccagggtgaagactggatacatcattggcttgctttagccaagagacctgagtgccattgtggctcattctcttaagtagttatataccttacgtcaatctgctcaacctcccagactgctgcatttataaaatgaggatcataatacagaccataatacaactcacaagatgttttgaggataaaaaattaaactgcattacaatcaaggtcattaccgtgacaatctctgtataacaattccgattctctaggcccctaatttaataaccattctaaattcaaaaagttaggtacgacacaggaagctggttaatccattgaaatattctccacaagaggctttccatttatttgtttaatgcagtttcccaagcagtcctatcagttataaatgcatgaaaaaggaaagatcccatagcatggtttaggtaaactgaattgaatagggtattcagtttatttactataatacttctcaaaaccttaatatgctaatgtcagctataaaattgctagagagagacaggatgtagagtctcaaccttttttcatggaggaatagctcttgggaccatggctccatgggacccacagtcaactgtaaagtgccatgccagcaaaagttatcttattggccctcacaacaactctatgagaaagacaaggcaggtatgaatcccagtttaactgaagacaaaataaatacccagagtgatttagtgatctgcccaggttagtaaaaccacagagccagggcatgagaataagttttctgatttcttttttttttttttttgagacggagtctcgctctgtcacccaggctggagtgcaatggcgcaatctcagctcactgcaacctctgcatcccaggttcaagtgattctcctgtctcagcctcctgagtagctgggattacaggtgcatgccaccatgcccggctaatttttgttattttttctagtagagatggggtttcacaatgttggccaggctggtcttgaactcctgacctcagattatctggccacctcggcctcccaaagtactgggattacaggcatgagccactgtgcctggccagtcttctgatttctaatctctttccactataacaagctacctcatcactgtcaaatgttcaacaacagatattgatctattagtaatctatttttaaaagtaataagaagcaccatatttgttagatgaatagaaaggtaactacacacaactccttttcagggtggaagcttgtgtgtgtgtgtgtgtttaagactctagagaactggggaatatccaagggattcttaacccactaagcatactgctgatactaatgttagtgttatcatcatttctatgtttcacttgaagaagggaatgacaaaaacattctaatcaggaacaaaacaaaaactccccagtgatgcctattcacccatttgggaagcaaaattgcatgccaaacaaaatattcagaacaacatacgctaagcttaccttaagaaactccttcaggagaatttcagaactttcttcaaactcttcttgaatttgaacttggtaatccatgtccagataagtagggttgatccaatcatacaaaatctcatgcttacgaagaggcagcagatgcaaaatgtgagttaataattcctattgcttttgctcttacatcatttcacactaataaaatacatgcaaatcctcattttataagtttctcctattaaagtactggaaaactctgcttgagaaagacactctcaaaagtttacttaagaaaagtgtaggccgggtgcagtggctcacacctgtaatcccagcactttgggaggccaaggtgggtggatcatttgaggtcaggagtttgagatcagcctggccaacatggtgaaaccctttctctactaaaaatatgaaaattagccaggcgtggtggtgggcacctgtaagcccagctactcaggaggttgaggcaggagaatcgcttgaacccaggaggtggaggttgtagtgagccaagatcgcaccactgcactccagcctgggtgacggagcaagactctgtctcaaaaaaaaaaaaaaggaagaaaaaaaaaagaaaagtggaaaggggcaagctcaaggtccagtttcattaaatggaacagctaattttaaaatcagagaaacaaatgatatgctatagctcctaagataaggatatcagcaattcttcttacatcttgtgggatgtgagggctccgaggtatggggggttcaaagtagttgggaggccgagtcaatgatggaccatgaaaccagccacttatagacaaacgtgacttttcttcagacagcacttcagacacctgaaaggagaagcccagtagcacatcaacacgaagaatagggggattaccgccaatgcacattaatttcagggtcctccatgctaagcattaaaacaacatcagataacaagtctaacaggaagctgtcatgtttggataatgggtgattaaaaaacataatccttgctactctatttgtggcttacagtctttacctggtgaaaggacacaggagatacttcaaagaaaaccagtttgttccacgaagggataagagacttgacaatctgcttcggctgaaagtgttctgcaccaggaaagaacacatcaataaattatcattaacc

SEQ ID NO: 1143 - DNA, 52297 bp, Homo sapiens
gtctgggaaaccgccgacttccggccgcgcagcggtgggctgagctaaaatggctgaggagagagtcgcgacggtgagcgccgagattctctttagttgcccggccgcagggcaaggcaagctggcgggtggcttttgtcccatgcagcggttcctggagagaggcggagctgggtgccgagcgtctcagggtgggcggggcgacacggtcccctttttactgtcccgggaactggtcgcctggggcaagtctggatacttagcagcacaggtcctgttctaggactgtagtccctcttggggtgcgctggacggagaagggagacttttcaccagtaatggctcttaccgtagtgccatctttttctgtctcgggggtttggaaggtaatgactagcacttgtgtagacagttcctgttaatcccgtgaattgggaatttaacatgcctggaagcttgcagcgtcactgccttctgccagtggagcgggactgtgttttttctgtggtgattaagtttaggaaagtacggttttggaattcatctgaaggctgagttgggcgttcactccacagaactgctaatatagaggaacccgatgaattcaggatgacctagtcgctattttttgaggcatatatctataattggatctaatttcggtaaagtgccaagtgtgaagctttgtttaccttgctttagtgttgggtttgaaagcctgttctgtccatttgttagaatgattttaggtattcggaatttattgtctttcgaaaaacgccctggaaaacagtacaaatagcagcctttggctgttttacaacttagttttggctaagcagcaaggttagtgttattgttagagggccttttgtttgttttctactctcatttgcagagtagtcatattattctagtctaattagaaaactctgaagacagaaacttttttttttgagacggagtgtcgctgttgtcggcccgggctggagtgcaatggcgcgatctcggctcactgcaacctccgcctcccaggttccagcaattctcctgcctcagcctccggattagctgagaatacaggcgcctgccaccacgcccggccgaaacatttttattaagctaagaaatttaaaatagctaggccggacgcggtgcatcacgcctgtaatcccagcactttgggaggccgagacgggtggatcacttgaggtcatgagtttgagaccatcctggccaacatggtgaaaccccgtctctactaaaaatacaaaaattagcggggcatcgtggcgctcgcctgtaatcccaggtacctggaaggctgaggcaggagaatcgcttgaaccccggaggcggaggttgcagtgagccgagatcatgccattgcactccagcatgagcgacagagacagactccttctcaaaaaaaaagaaagaaaaaacagattttaaaataattaaataggccaggctcagtggctcacgcctgtaatcctagcaccttgggaggctgaggtgggtggatcgcctgaggtcaggagttcgagaccagcctggccaacgtagtgaaaccctgtccctactaaaaaaatacaaaaaattagctggacgtggtggcgggcgctggtaatcccagctactagggaggctgaggcaggagaatcgcttagaacccaggaggcagaggttgcagtgagccgagatcgtgccatttcactgcagcctgggcatccagagcaaaactccgtctcagaaaaaaaaaaaaagtaaatagcatggttaatgttactgggttttaaatattaaaaacataggaaagaaaatacttccactccagcctgggtgacagagcaagactccgtctcaaaaaaaaaaaaaaaaaaaaaaagaaaatacttctaagtaatcttaaagtgtaaaagataatgggtaacataacattgctacaaatatagcttatcctctagtgctcatcacaagtgtttgtgtaatagaatatgaacttgagtctgtgacggcagaattgtcatgtacatttgaatgtctaatactgttttaaagagaatagcttttgtttcgatatgacttagcaattaagcctgaagttaactgttttcattgttgtcaaatttattgctagtagtgttacgtttatagtaattttcatcttttcaagttaccaatgcatggaaatgtgaatttctgtccttttaggaagtggtattttatcttttttttttttttttttttgagacggagtctcactttgtcgccctgtctggagtgcagtggcgtgatctcagctcagtggaacctctgcctcccgggttcaagtgatttttctgcctcagcctcccgagtagctggggttacaggccctcaccaccatgcctggcttatttttgtggagatggggtttcaccacgttggccaggctggtcttgaactcctgaccttgtgatctgcacgcctcggtctcccaaagtgttgggattacaggcgtgagccatggccccctgccttattttttaatacaattaaaagaacccagtaatcctactcctagacctgtgtcccacagaaaaaagtgttaaacatgagcgtgtagtactagggcattcgttgtagtactatccgtagtggcaaaacgctggaagcaaattaaatgcccattaatagggtaattgatgacttcagatatttccatactgtggaatattatgcagtcattaaaaagaatgttacaactaattgcttttcctctcagaagcccctctctctcactagagaaagctgttctcctttctttcttctgcctattaaacctccattcctaaactcagaaagaaaaaaaaaaaaagagaatgttacgactaattgacttggagggacttccatggtgtacatttaaataaaaggtagatgtgaagtggggtatattatgtgatcttaatttcataacacaaaggaaaacatatagatccgtagataaggatatatggatatggaggagagaaaaggaaaagactcaaaactcacagaatttttgaagaaatgtatagctaaaaatctaagaaggctacagtcaaggccttgaggccagaagacaccccatcaaaactgagtaaaactagcccagtgtgggacgcagaaattctagtatgctaccaaaattacttacggattgctaccagttccttagaaggaaaactgaggactaatatttgtattttcagtatagtttagaattcttaaaaaatgagcaaacaggctgtacttggtggctcatgcctgtaatgccaggacttgtggaaactgaggtgagaggataacttgagtccagaggtttgagaccagtctgggcaacatgttggagccccatttctacaaaaaacacaaaaattagccagacgtggtggcacgcgcctgtcttcccagctactggggaggatcatctgagcctgggggaagttgaggctccagtgagccatgatcatgccactggactccagcaggggcagagtgagactttgtctgaaaaaaacaaaaaatgaatgagcaactaactctggctttcatgatttgtgcttataaatctttttatttatttatttatttatttatttatttatttatttatttattttgagacggagtcttgctctgtcgcccaggctggagcgcagtggcgcgatctcggctcactgcaacctccgcctcccgggttcacgccattctccagcctgagcctccggagtagctgggactacaggcgcctgccaccacgcccagctaattttttgtatttttagtagagacggggtttcaccgtgttagccaggatggtttcaatctcctgaccttgtgatccgcccgactcagcctcccaaagtgctgggattacaggcgagccactgtacccagcctataaattttttttataatgccctgattcccattatttgatgtatttggataaatatgtcatcctgtaaattgaaggattaaactgataagagcagaaaacagaaattagtacactagttgatctggctcagatatagtgcctatgtatcaggtgctccatgaatatttgttggatgaataaatgatcataaaactatataaaaatgaagaaataacagaataaaataatttgttctatataaatcctatgaatgagattgagtgggctaatagaatcctttccatctcaaaatgttctggaaagtcttgagtaaaagactcatcaaaaaaataattctgctttgtgcagaaagaagggttgctgacctttgaaggtgctttttgagtctttaacattctttagtagtatattccccaaagttaagaaattctagttagattttaaaaaattgagttaacatttaaaaaacagttttgttgaggtataatacacgtaccataaaatttactcaatttaagtacaaagtttgatcagttttagtaaatttatatagttgcacagctgtcatcagaggctgcttttaaaacatgtccatcactccagaagggttcctgtgtcaatggaattgctgggttatattgtttaagtatttgtttaaaaaaacagaaacaaatctgcctaacttctgcaggctatatacgagttaacatttccatgagcaatgcatgagggttgtgatttttccacatccctgtcaacacttggtttgtcagtttgtttttatttagctgttgtagtggatgggtagtgatggtgtatggtggttttaatttgtatttccttcatgaataatgatattgaagattttttatatgtttattttccacccgtatctctttggtgaaatgtctttataaatttttgtgaatttttaaatcaagatcattaaccaaatgagcccctcatttgggctcaagtgatccttccacctcaacctcccgagtagctgggaccacaggtgcaggccacgcttggctaatttttgtatattttgtagaggcggggttttgccatgttgcccaggctggtcttaaactcctgaactcaagcaattggcctgcctcacataagtattctcttttattttgaggattaatttttgttgttgtgaaatatatcctacctgtaaaagagtgcttaaaatgtcgtatgtgtgctttaaaggataatataatggaaacttgtgttcctactgcccaggttaggaaatgggttattaataactttgaaacctcctaaatgcctctctcctactgcattttccttcctccacatcagatgtagtgtttcttcaattttatattaatattttgtactttttatagttttaccatatatgtttatatatatccttaatatattagtttttaaaatttgttattaaccttcagtttattcattatttcaacactgtatagtatcttattgtagtaaagtatgtcaattaacttatccattccactagatggagatcgggattatttctggtttttagttattaaaaacaatgctgctgctgggtgcagtggcttacgcctgtaatcctagcactttgggaggccgaggctgcggatcatgaggtcaagagatcgagatcatcctggccaacatggtgcaactccgtctctactaaaaatacaaaaattagcaggatgcggtgctgcgcgcctgtagtccctgctactcgggaggctgaggcgggagaatcacttgaacccaggaggcggaggttgcagtgagccgagattgtgccactgcacttcagcttggcagagcgagacttcgtctcaaaaaaaaaaaaaaaaaaagctgctataaatatggccaagactaaggaaaggtaagtgaggtgcttagggttcacattttatggagtaagagtaagtaccttcttaaggtttataccctaggttcttcacatgcctcactttagtcctagccctgagcattattatgtaggtcttctgatgcaatatctaagagtttctctaaggtatacctagaaatagattgctaggtaatggagtaactttattacttacaggaaactatatggtggttgtaacaatttatgcttctgccaccagtcatggtggatatgaaattatgtcttaatgtgataatttacattgcaatttttttttttttttttttttttttttttgagacagagtcttgctctgtcacccaggctggagtgcagtggcgtgatcttggctcactgcaacctctgcctcctgggctcaagtgatccttccacctcagcctcccgagtagctgagaccacaggcgcaggccacacttggctaatttttgtatattctgtagaggcggggtttcgtcatgttacccaggctggtcttaaactcctgaactcaagcaatcggcctgcctcagcctaccgaagtgctgggattagaggtgtgagccaccacacctggctgtttgtttgttttgagcctgttcctcaggctggagtgcagtggtccaatcatggcttgctgcaactccgcttcctgggcttaagagatcctcccacctcagccttctgagtagctaggactaagggcacctgccactatgcctggctaatttctaaagttttttttatagaggcagagtctcgctgttttgcccaagctgttctcaaatttctaggctcgtgtgatcctcctgcctcagcctcccaaagtgctgggattataggtgtgagccaccacacctggctgatctatctgtcttaaactggagaattgcatttttttctacctcctttcttttttttaaaaaaactgaatttccatctgttacccctccctttctgctcctcttatttcatgccttggaagttatactttgccttcctttaatgagtaccaaagaaattaaaaaatacatgtttactgtaagtccaggcctaaatgttgctactacagggaccatcaaatgctttactaccatctattgccatctgcaaatgtatgccattgttgtttagttttgtagttcttaatgtattttaattaaacaccacaaattatgctttttgtttgttttattcagtcagtagatgcttagaatacttgcttattttaccaattcctttgcttattccactcctttgttctgggattatttttctttttcctaatatattttcattaaaagtttatttggtgagaatctaaaaactctcaaattctgaaagttttaaaaatttgcctttgttgttgaaaattagttttgatgggtgagagaatctagatcaggtgttagcaaacctttttttgtaaagggccagatagtaaatattgtgggctttgtgggccatagagtctctctgacaactactcagcaatgctgttgtaggacaaaagcaaccatagacattatgtaaacatgagtgtgggtatgttctcacaaattttgtttatagacactgaaatttgactcaattttcatgtgttaaaaattattattttttgaatttttttaaccatataaaaatgtaaaaatcattcgtagcttgtagaccaaataaacaggatggatttgacctgtgggccatagtttgctgacctctggtctaaattaacattcattttacttagtacctgacactggagtaattattcttatgatgtcttattgtgatattgtcttccatttttaattgttgaagagccagctgtcagtcttttttgtttttctttttcttcttcttttttttttgaaatggagttttgctcttatcgcccaagctggagtgcagtggtgtgatcttggcccactgcaacctctgccttctgggttcaagcgattttcctgcctcagcctcccaagtagctgggattacaggtgcctgccaccacacccagctaatttttgtatttttagtagagatggggcttcaccatgttggccaggctggtgttgaactcctaacctcaggtgatccacctgccttggcctcccaaagtgctgcaattacaggcatgaggcacggcgtctggcctttctttcctttttttttttttttgagacgtagtcttgctctgttgcccaggccggggggcgatggtacgatcttggctcattgcaacctctgcttcccaagttcaagccattctcctgcctcagcctcccaagtagctgggactataggcacgtgccaccatgccgagctaatttttgtatatttagtagagacggggtttcaccatgttgtccaggctggtcttgaactcctgacctcaagtgatcctctcgccttggcctctcaaataactgtcctttctttgttggtaatctggtgatatgttttcttgtttggctgcttttaagagctgcttcttgtctctggtgcagttcgctatgatgtatctaagtatgtatttattttcatttaacctggtcaggatttgttgagtatccagaaactaaggattggtgtttctcattacatctggaaaaatttgagccattatttttgcttatattgtggtatgtcataggaagttgagaaaagaaaaattcatttgatggttttctatgaggttatagtggaaaataactatctcccttttagaattgagtgctagacagtttctgtgtagatgatctcataagcttccttttatcaaacagcgatcacttttttggtttggctgctgagaagtatggcatcaagtataatactcatatgaggtgtttaagaactgagtatatttcttatgcacattttactatatactataattatacattaaaaatgcacattgtaaatattataaatatgtgttatacattgttaatagtttggatagcaaaagtatgacttgacatttgttttttaaaccatatttaaagtaactctatcacaatatggatttaatggattaattgcataattggtgagctactgattattcttgttatttggatgcttctttaagttagcaagtttatattgtggtgcttcaatatagactacttatttcatttcagagaactcaatttcctgtatctactgagtctcaaaaaccccggcagaaaaaaggtctgtatgcagtttcatggtatgtgtatgtttgcacagacagatttctcttttatttatttatttatttttttttttggaggcagagtctcactgtcacccaggctggagtgcagtagcacaatcttggctcactgcaacctttgcctctggggctcaagcaattctcctgcctcagcctcccgagtagctgggattacaggtgcacgccaccacacctggctaacttttgtgttttagtagagatgaggtttcactgtgtttgccaggctggtctcgaactcctgacctcaggtgatctgcccaccttggcctcccaaagtgttgggattacaggcgtgagccgccacgcctggccagatttctctctcttgttgattcttttatctattctatattatttcaaaatgagtgttgggaaaagaagtaatagtctaaatgttctgtcacatctagcttttatttaatagagttattagatattaggaggttggtttgacctggaaattatttaaatggggtttgattattatgtaagtgtgtactaattttctgcttctggaaaaaccactttgtgaagttccaggtatctttttgctttgttggtttctagtttaattctattgtgggtagagaacattctttatatggtttgttttatggcccacaatgtggcctgtgttggtgcatgtcccatgtacacttggaaataatgtgtattctgctcttgtaggatgtagcattctgtaaatgtcaattaggtcaagttggttgatagtgttctgtatatacttacaattacagatattcatattcttactgatgtagttactgattggaagggtgatagaagagtgttgaagtgtgcaaatgtaattgtggatttgtttctactttcagttctatcaatttttgatttgtgtattttgaagatctgttgttggatgcatatacatttaggattgtctgatttcttggtaaattgacccgtttgtctttatataatattcctcttcaatttctgataatattccttgtttgaagtctactttgcctgataatattttagttttagttatttatttagctattttagttttgctttggccagtctttgaatggtatcaacatataattttcgtagagtaaaattccctttttttagtacaaattctgagtttcgacaaatgaaactagccatgtaaccactagtagcaccataatcaagttataaaagtttaattactcccccaaaagtcacctttactttgtagtaaaccacttcttccattcccaattgcgggcagccattaatctgtttctttcttcctagttttgcctttcttggaatgccaaataaatggaatcatacattattattattttgagagagagggtctcgctctgtcacccaagctagagtgcagtggtgtgattatagctcactgcaacctgaaactcctgggttcaaatggttttccccagtagctgggtctacaggtgcatgccgccatgcctggctaatttttatgtattttttttgtagaaatgggggtctggctctgttgcccaggctggttttgaactcctggcttcaagtgatactccatcttcggcctcctgaagtactggcattacaggcatgagctattgcacctgggttatgtaaatttttcagtggcttttaaacctcatataatgtttgtttgttggtttgtttttgaggcggaggctcgctctgtcacccaggctggagtgcagtggtgcagtctcagctcactgcaacctccacctcctgggttcaagtgattctgctgtctcagcctcccaagtagctgggattatcggcatgaaccaccatgcctggctaatttttttatttttagtacagatggggtttcaccacgttggccaggctggtcttgaactcctgacctcaagtgatccacctgctttggccccccaaagtactgggattacaggcatgagccactgcatccagcccaatatagggaggtattaagaaaagagaagaactatcatccttaagtattaacgggactttaacaaattaaaaaagtagtactttgaataaaaagctgtcacattttactgtgaaatccttagactttttttatacctctagttcaggttttttcagctttggcatgaatgatattttgagcaagataaatctttgttggagttgtcctgtatattgtaggatggttaacaacatccctggcttctacctggtagatgacagtagcacttaattgtaacaaccaaaagtgtctccagatgttgccagttattccttctggggcaaaattgttcccacttgagaaccactgctctggttaagtagtgtaatacttggaaatagaaggcagaaagttggtaagtgcataaagaattcacacagaagttggattagcaagctgagagacgttatttgaacaagtagcaattggaggcattttgactgagaatggatgttgtgcctctccctcactctttcctcctcagcttgagaggtccatattctctcaaagtttgactctttagttttgagggtgatgactgccaactgtggaagggataaacagatttctgtttggtatttttgtccaaatatatcaggactttttcaagaacaggcaatgaaattattgatcagaactacttggtggttctgagaaaataatatgctacatgaggctactgaagtcctcttccttttgccccatgatgtaaccttaggtgactttcttctggctttcagttgaagatcttacccatcattgaggtgagcgaactgatttactgcttgagtctattttcttccttaaaggagtcttcattgaaaactttacccattttggggtggccatagctgaggatgagttttgtccacaacctgagacaacatactcactatgtaaaaaacctgatctcagcttgatatctggttttagactaattgtttaatagaataatttattattgtaaaatatatataaaatttaccatttttaagtgtgtaagtcagtggcattaagtacatttacaaagttgtgcagccatcaccactgtccatttctagaagtgtttcatcattccaaacagaaacactgtacccattaaacaataaatctccacatccccttgcctccccagatcctggtaatctccattctattttctgtatctatgaatttgactattctaggtttttcatgtaaggtgaatcatacaatatttgcccttttctgcctggcttattccactcagcattttcaagattcattcatgttgtagcatgtgtcagaatttcattcctttttaaggctgaataatattctagtgtatgtatatatcacattttgtttatctgtctgttgatgggcatttgggttgttttccttagagtctttatatgtcagtaattcttaaagaatttaaaagttgtagaaactaggaattttgtagatattctagaaatatgtcatttcctgtactgtatataataatttattctacagactaattactgtgtatatatttggttctcagacgtgattttgattttgtagatgctgtacatgctcttcacttcattaatcttttccttttgctaattttggttcttgtgtatacagaattatagagttacaaggtaatttagttgttacctaattcaccctaaagtctacatgaaaccactgtcacagtctttgataagtagttaccaaatctcactatttctactgtgatagtgaatgactttcattgattagctttctgaaagaatagtttatcttacttgtcttggtatcctcacctctgagtctatttgtctattgtaatctggcttttgctccaccgctccactgattaaatggatgagctaagcatttttttttttttccactgcaacctctgcctcccgggttcaagtgattctcttgcctcagcttcccgtgtagctggtattacaggtgcccaccaccatgcctggctaattttttgtctttttagtagaaacggggtttcactatgttggccagactggtatcgagctcctgacttcatgatccaccccaaagcctcccaaagttctgggattacaggtgtgagccaccgtgcttggcccaattctgtttaatttttgaggaacaatgttaacttctaatttaaatggaaggtagtatatatctaatttttccctattatttttaatttcaatgctagtaaatctttaaatctgaaatacacactcttgaattttgacagatatgtatactcatgtacatatttatattcctgtaatcatcagatcaaattaaacatttttatcacttagaaagtttcctcatgcctttttccagtaagtcttctgcttcacttcgccagatgcaaccaccattctgatttctgcctgtataaattgattttgaactttcctataataagttgtgcttgaacttcacacaaagggagccatacagtatctactatttagcttttggcagctttcatacaacatgttgttttggagattcatccgtgttgttatatgtatcagtagttcttttatttaaaaaatgctgtttagtattcagttgcatgaatataccaccgtttgtccattctcctgttaatgagtatttgcaatgtttccagtttttgagtactgtgaaagtttctatgaacatttatttatttagagatggagtctcgctttattgcccaggctggagtgcagtggtgcgatctcagctcactgtaacctccgcctcctgggttcaatcgattcttcagcttcagcctcctgagtagctgggactataggtgtgtgccaccatgcccggctaatttttctatttttagtagagacgggatttcaccatattagccaggctggtcttgaattccttacctcatgatccgcccgcctcagcctcccatagtgctgggattacaggcatgagccactgcacccggcctgaacatttatttactggttttttttgtgtgtgcatgtgtgtgcaagttttcacttgaataagtgcctagggagtggaattgcttggtcatatgtgaactgtttgttttaactttataataaactgccgaagtattttccaaagtggttgtacagttttacccgaccgccagcaacgtgtgaggattctgtttggctacattcttgccaacatttgttactatcagtctttttcatattagacttgctggtgggtatattgtgttttattgtgattttaatttgcattacactaatgactagtgatgttgaacaccttttcatatacttattggtcatatcttttgtgtagtgtctgctcaagttttttgcctatttttaaatttcttttttccttattattgatttgtgagacttcttaatatattctgaatgtacgtcctttgtctgttatatatgtggtaagtatttccccccagcctgtgttttactactttcattttattaaggtatcttttgatgatcaaaagttttaattttgatgaaggccaatttactattatttttcttttgttattaatgccttctctgtcttgtctaggaaatcttgatccttaccccagactgagttgtgtgtcctctcccttttctgcattaatattgcagaaattaattttttggttttagaaaatgtctaatttggctcaatcagtaatttttgatatctttctattgaaatatatatacagaaaagtacatacataaatcataattgtactgtgcagtgaatttttacaaagtaaacatatccatgtaatcaccatctagattaaggtatagaatattatcagtgccctccaggccgcctccttattccctaccagtcattaaccacccctcccaaaggtagtaacttgtatttaacttctatcttctacatcagttttgcctgcttttgaatttaatgtaaatggaatcatgcagtgtgtactttttaatatctaacttcgttgctcagaattatgtttgtgagattcatttatgttgttgcatgtagtagtggttggttgttttcttccttgttatatatattccattgtggggctctacctaagtctattcattttatacttgatgaacatttgggatatttttattgtgatgtattatgaataatgccaccatgaagagtcttgtacatgttttttggtacacatacatacttaggagtaggattttcagggtcaccaggaaggatatatttaggctcagtgaatactagcaagcaatttttaaaatgcggtcaatataatccccatgtgtaaaataaaggtgtacaaacgcacacacacacacttgctcatatgcttatatgtgcatagaaattccttgaaaatactcaagaaatgcttcacctctggtaagggataggaatggaatgggtcttttgtttagtatcctatgtgccctttgaattttgttttactgtaagtatgtatttttaagaaaaccaactagttatttttaaaaatcatttgaaagtcttcctactttgatatatgaaaaacactggttttaaaaaaaataatagaaaagctttaaaatcattattatttttttgagacggagtcttgctctgtcgccaggctggagtgcagtggtgcgatttccgctcaccacaacctttgcctcccggattcaagcaattctcctgcctcagcctcccaagtagctgggactacaggtgtgtgccaccaggcccagctaatttttttttttttttgtatttttaatagagatggggtttcaccatgttggccaggatggtctcaatctcttgacctcgtgatctgcctgcctcggcctcccaaagtgctgggattacaggcgtgagccactgtgcctggccgctttaaaatcattaatgttgcgttgctcagttatgtctaattgacagcccaaacatttacattgtaatattagaaaatcctttatgattgggcagaaacttggtttaatgtgtcaccttggagacctgggttatagtcctgcctcttccattaactacttgttgaatgtggacaatttacttaacctttagggccttaatttcctcctttataatgtgagaatgttctctgaattgcataactcactggccttacgtgactattcagtggaataataagagagaaaaactttgagatacatgcacacacacccttaagaaggatataattgttaaattttgctttgaggaaataaaataatctaagctataaagtaaaaccataattagctaatcttttatatgacttttttcttcctcatttcaagctaatgagaagcaaacaaactggatagcagcaatataattaaaaaattataggccagcttctagcatgtattcttgagtcaatactgactcagcccagtctcttcctcttccttcatcatcatttatgtacctgaacagagtagatgtttctcttgatcctgggcctgttcgccctcagatccattccttgccttctcttctctttttggtatagtgaggagctgactctttttttttttttttttttttttgagacggagtctcgctctgtcgcccaggctggagtgcagtggcgggatctcggctcactgcaagctccgccttccgggttcacgccattctcctgcctcagcctcccaagtagctgggactacaggcgcccgccactacgcccggctaattttttttgtatttttagtagagacggggtttcacctttttttagccgggatggtctcgatctcctgacctcgtgatccgcccgcctcggcctcccaaagtgctgggattacaggcgtgagccatcgcgcccggccgaggagctgactcttgcagcctccttttcttcccaggcttccgtgtcagcagtttctggctggattagcaagtggaggaactggcaggagattagaaggcaagaggaaagagaagacagggcttccctccccgaccttcaggcctcagagtcgtagtggttttttgctcatgcagacttctgatttgtctcaccattccctgttgggcctctcatttcttccattgcctgttctctgcattaaagtccttgtgtttcaaatcctcaagtggctttttgttaggctttgactgatacagggctcaaaatgatagtaatgaaaatgtcttacatttatattcttttcaagatttgttatctcttttgataccccaaatatcctattgaggtagaaaagtgttataattcctgtttggcatgaggaaattaacatttattgaatgactattttcagattctttggattttcgggtgaaaattttaggggggataaatggaggcccagagaagtgaaataacttgccctaggccccatagaaggctggtattgaatcaagattgaaattctgcatgtgaaaacttttacgtgctacatgtctgctagtcctggaagaaatcctttctttgatgagtattttttttaaaggctttacttgcaatatatttacaaaagccttagttatttagtaaatttttcaatgaaaaatctgaaccataataattttctgcttagtacttatatagctagcatactatccctagcattaatcaaagtgtcatgtaaaggtttgatttttgagcctaagcagaatttgaaattcttctaagagaatttagcacctagggcaaactacaggggagaattcttgaggtgtcatgtttattcacttctggaattgtttaaaatatgtcaggtgcatccttaaagggagaaagaagggggaagagatgttacaaaagagtagaatggggcaagagaagtggcaagggagtattgttgctaggttgccagccttctgcccccactgtcttggtgatggtggaggggtagtgtggcagctgggatatgaatgaggtcttttttataactcactaaaagccattaccttgtcttcatctcgtcagctggctacctgacctctgtggtaacataggctcctgaaatgtagcattggagatgatcactgtgctttattgcaaaataggggagactctgctctgcatttacatgcttatgttttgtggaggatctttcaactagtaattctcataatacctgtgaaagcatataagaaccagtatctccatttttagggggagttggagtgagcaatgatttggaataccagaaattcaacttatatatttacaggtaaaattctaattgtaaattcaggattcatagattctagggatttctgaggtatccagaattccttcatctttgatgataagtagataataatggtaataaaaataacagcaacaggcccagcacagtgacccacacctgtaatcccagcactttgggagactgaggcaggtggatcacttgaggtcaggagttcaagaccagcctggcggacatggcaaaaccccatttctactaaaaatgcaaaaattagctgagcatagtggcatgtgcctgtaatcccagctactcagtaggctgagtcataagaatcatttgaatctgggaggtggagattgcggtgagctaagatcgcgccactgcactccggcctttatgacagaactcgactccatctcaaaaaaacaaaacaaaacaaaacaaaacaaaaacaaaatgcaaaaaaacagcaacaataataggtaacatttctttaaggcctactatgtaccaggcactatttgaacctctttatatattaggtaatacgatacaactctatgagaatgagtattttatttcctgacccttctatttaaaagtaaaaccccccacccggcactgtttctctttcctgctttatttttctccatagaaaaatatcactcataagtgtaacatactttattatctgtcctgtgtggtagtagcccctgccctcaattataaactccatgaaatcagggagtcagttttgttcactgctgtattcccagtgcctagaacagtgcctggaatcatggtaggtacccagcgaatattggttgaatgaatgagtcttggttttacagatgaggaaactataaatttcccaggtcacacatttggtaataggacagttgtgtacactgaaatgttctctaaaatatttgatggaacgaaaattagcttttggacagctacatctccaagagtgtgaaatgaccttcagcactggatttggtggattttcctttttctaatccctagagttccatttaatgagcgtttgggttcttgagctaccttacaaattgaacacttttttctccagctttcactcaagaaacacaaaacatggcttgtcctttttttttttttttttttttttgagactgggtctcactctgtcacccaggttggagtgcagtgcacaatcatggttcattgcaacctctgcctcccaggctcaagcaatcctcctaactcagcctcctgagtagctgggactacaggcttgtgcctccactcctggctaatttttttgtattttttgtagagatggggtttgtccaggctggccttgaagtgctggactcaagtgatccgtccacctgggcctcccaaagtgctggggttacaggcgtaaaccactatagctagccctgattgtcttttattgtgagattttaataacagctaagacttgaaaattaacattttataaattttcttttagactacttagtgatatactaagtatctaaggtttgtaatacttagtataaactcaaaagggttcagtgcctcattctcttttactctttccctttagtagataggtgacagaggactgggtcatgcagttgagacttggtccaagatgacttagtaagctacttgtcccagaactatttatttatttacttatttttgagatggagtctcgctctgtcgcccaggctggagtgcagtggtgtgatcttggctcactgcaacccccgtctcctgggttcaagcgattcttttgcctcagcctcccgagtagctgggattataggtgcccgccaccactcccggctaattttttgtatttttagtagagacttggtttcattgtgttagccaggattgtttcgatctcctgacctcatgatccacctgcgtggacctcccaaaatgctaggattacaggcgtgagtcaccacccccggaccctggaactatttatgacggtgcactttatgcacttaacacactcacatgtctttaagcttggtgactcgtgtggctttttcgaaggagatttgattctggaagtggttaagtaggatgtgaatggctaaggtctggtcattggtgaagcctaggggaagaaaagaaaggaaacacaagtcttagaagaatttcagatcggccccaacgactagaagggtggttctactaagaaaatgtgtgtagtcagaaaatgaagagtcagttgcttaaaattttactttttttcttgttcctggcatgtaaagtcatatccatactttctgttataatttcttcttacaaattccattgataatccctattcttggatagcaatgagcagcattacttcttttttatttttttaaaaaaattaaattttttgttgaaatgagggtcctgctgtattgcccaggctggtatcaaatttctgggctcaactgatcctcctgcctcagcctcccaaagcgctgggattacagttgtgagccagtgtgtctggttgtaccttttaatttttgtgttcaggcaacattaactctgagtcacagtaagctttttttttcttcctgtcatattatggacatagaagttttttggttttctttagattgtttctccttaggttgcagaacatcaagaaatggattacagtcattttcctctcttccccatgctcttccctttcttttccttttttcttttctttttttttttttggagacagaatcttgctctttggccgaggctggagtacagtgtcatgatcttggctcactgtaacctccccgcaccaggttcaagtgattctggtgcccaagcctccctagtagctgggatgtcaggatgcgccaccacaccctgctaatttttgtatttttttgtagagatggggtttcaccatgttgtccaggctgacctcaaactcctggactcaaatgatctgccctcctcggtctcccaaagtgctgggattataggcatgagccaccacatctggcctcttttccatttttaaaaaggactgtctccaacatattaaaattcacaaaaaataatataaacacacatgtactcactggctaggcttaataaaaaacatttagtcatgtttactttaaagctttttatttttttgagaaataggcattaaagagttgaagtctcctttctgtcttttcataattctgttcttccctcttccttccttgagatcttcactattcttgggttaatttggatctttctactccttgttaccacagaaaagtaattcttaatgaatttgaccatattttaaacttctgatttcagtgggcaggtaactcattttatggtttctgtattgtgagccattttcaatgactcaactagatttttttcatcgttgacttctcatttctgggcaacagcataatgttctcatttgagctatttctaaagattgtgtttaactatttaaaatatttgtggtactctgatcatcagatgtgatttttttttttttttgagacggagtctcactctttcaccaggctggagtgcagtggcgcgatctcggctcactgtaacctccttctcccaggttcaagtgatgctcctgcctcagcctcccaagtagctgggactattggtgcgggttaccacacccggctaattttttgtatttttagtagagacagggtttcaccatgtttgctaggatggtctcgatcttctgacctcgtgatctgcctgccttggcctcccaaagtgctgggattacaggcgtgagccactgcacctggccagaagtgatattaactatcttatatgtatatttctgttgcgggaagtcaggggccccaaacggagggaccggctggagctgtggcagaggaacgtaaattgtgattatttcatggacacttaccagttcccaaataatattcttataatttcttacacctgtctttaatctcttaatcctgttatcttcgtaagctgaggatgtacctcacctcagggccactatgataattgtgttaactgtacaaattgattgtaaaacgtgtgtttgaacaatatgaaatcagtgcaccttgaacagaataacagcaattttagggaacaagggaagacaaccataaggtctgactgcctgtggggttgggcaaaatagagccatatttttcttctttgcagagagcctataaacggacatgcaagtagggaagatatcgctaaattcttttcctagcaaggaattttaataatactctggagaaggaatgcattccttggaggaggtctatagggcatgtctgtcttatgctgttgacataaggactgaaatacaccctggtctcctgcagtaccctcaggcttattagggtggggaaaaaaccccaccctggtaaatttgaggtcagatcagttttctgctctcaaaccctgttttctgttgtttaagatgtttatcaagacaatttgtgcaccgctgaacatagactcttatcagtaattttgcttttgccttttgccttgtgatctttgttggacccttatcaggagtttctgattttgcccttgtcctgtttcctcagaagcatgtgatctttgttctcctttttgccctttgaggcatgtgatctttgtgacctactcactgttcttaggccccctccccttttgaaatccttaataaacacttgcttattttgcagctcaggtgggcatcacggtcctaccgatatatgtgaggcccagctgtgaaattcctctcttcgtactcttatttcttagccggctgacgcttatagaaaatagaaagaacctacattgaaatattgggggcaggttcccctgatatatttccttagtgacattcctgcaatctcctttagaaagtctttctgttcaccttctataaccagggaaggagagattgagaagagacgaaggatgattttatgtttttcagtcccagtcattatttgatgagaaactgatattacaagctttaaaaactcaagatatgtattcaacatgtagtagtagaacaagtatcttagtttaatagtctataaatttttgatgcactataatatattattgtagtcagtagcatcaaaattttaatgtgatattgcagtatgtttatggttagtttagacatgaggacagtgctaaaggagaaaatctaatgactgtgttgtttgttttgtcaaaatatgctgcctagctccagagtttcctattttggagaagcagaactggttgattcatcttcattatatccggaaagattatgaagcctgcaaggtaagagattgccataataataaaaatgagaggcaggatgttgggtaggcaactaacagtgcctgctaaacagagtgtggcagtttatatctcagtgataaaacatgaattccttcttccccatacttcatacactggttatcttttgctatggtagtgatgtttaacatacaacctcaatatttcagtggcccccaacaaacaaatattaattgctcatgggctttcagatcagctgtgggttggctgggtttgactgcaggctgtgggtcaggtttaggtgtgttccatgtgtcttctcatgtcaagagcaaacaactctcttggacatgttggtcttctggtggaggcagatgttcaactcagcatattaacttttttatctttggatagatgaaaaatggtattttgtcgagtttttttttttttttttttttttttgagatggagtctcactgtcacctaggctggagtgcagtggcatgatcttggctcattgcagcctttgtctcccaggttcaagcaattcttctgcctcagcctccccagtagatgggactacagatgagtgtcaccatgcccagctaattttttgtatttttagtagagatggggtttcaccatattggccaggctggtctcgaactcctgaccttgtgatctgcccgccttggcctcccaaagtgctgggattacaggcgtgagccaccgtgcccagccctgagttttattttttaatttctctcttactgcaaggttgatcatcatgtgtatatttaaaaaccatttgtatttccctttctctgtatctttggtgacataccatatgtgttacaaacttgcaggcagacagtggtagtactaacatgcagaatgtatccttggtgtcatcttttttggtatccagagctttgtgacccatctaaggtttttaatttatacccatggcatttatacctatggcaatgcacagaactaattcatactggtatgacaaagattcataccagtttttttttttctttttttaagtggagttttgctcttattgcccaggctagagtgcagtggcgcaatctcggctcactgcaacccccgctttccagtttcaagcaattctcctgcctcagcctcccaagtcgctgggattacaggtgcccgccaccatgcccagctaatttttttttttttttttgtatttctagtagaggtggagtttcaccatgttggtcaggctggtctcaaactgctgacctcgtaatccacctgcctcagcctcccaaagtgctgggattacaggcgtgagccaccgcacccggcccataccagttttttttgacaccgctgatccgaaggcagataccagtatgaatctttttttttttgagatggagttttgctcttgtcgccaagggtggagtgcaatggcgtgacctcggctcaccacaacctccgcctcctgggttcaagcgattgtcctgcctcagcctcctgagtagctgggattacaggcatgtgccaccacgcctggctaattttttgtgtttttagtagagatggggtttttccatgttggtcaggctggtctcaaactcccgacctcaggtgatctgcccgcttcggccacccaaagtgctgggattacatgcgtgagccaccgcgcctggccaccagtatgaatcttgaaaggttctctttctttttcatctgtgataatacttggaaatcttatcacacttttcttagcttgcctagttagattttagacaggggttggcaaactttttctgtaatgggccaacaatattttagggtttgtaggccacatacagtctctacatcatatttgttatcttattttttataaccctttagaaataaaaaaaccactgttagcttgagagctgtacaaaaatatacagggcctgtaagccctgtagtttgcaaatccctgttctagaagaagtaatcacaacaagggagttgaaattttaagaaactgaatgaactaatactttactaggcattattaatactctaggtttttttacatatgattcttgtccacgtctgctttttcattactatttgttttcttttttttttcagacagagtctcactctgttgcccaggctggagtgcagtggcgctatcttggctcactgcaacctccgcctcctgggttcaagcgattctccttcctcagcctcctgagtagctgggattacagacacgcaccactactgcccggctaatttttgtatttttagtagagatggggtttcaccatattggttaggctgatcttgaactcctgacctcataatctgcctgccttggtctcccaaagttttgggattacaagcatgagccaccgcacctggcctgtccatgtccactttttcttaaagacacctgaagaaacttaaccactgctcagaagcatttttctccctctttcaggctgttatcaaagaacagcttcaagagactcagggattgtgtgaatatgctatctatgtccaaggtaagacacatacttcttgtcttcttgctagagaaatacacttttcctaggttcttgaaaaagatcaggcaattgaagaaacaagttcaagtacagtcatgcaccacttaacaatggagatatgttctaagaaatgtgttgttaggcaattttgtcattgtgtgaacattacatggagtgtacttacacaaacatagatggatgatatagtgtactatacacatgatatagtctgttgctcccaggctacaaacctgtatgagcaggtgttataccgaatactgtaggcagttgtaaaacagtggtaagtgtatctaaacatagaaaaggtactgtaaaaatatggtataaaagataaaaaatagtatacctgtatagagtacttaccatggatggactggaagttgctctgggtgagttagtggtgagtgaatgtgaaggtctaggacattattgtatactaatgtagactttatgttgtatactaatgtagactttataaacactgtacacttagcctacactaaatttatttaaaaatattttttctacaatgataaattaactttagcttactataactttttactttataaactttaaaactttttggctcttttggggtaatacttaaaacacacaacaacattgtacatttgtacaaaaatagtttctttaggtccttattctataagcttttttctttttctttcttttttttttttggtagagagacagagtctcactttgttgcccaggctggtcttgaactcctgggctcaagcagttctcctgcctcagcctctcaaagtgctgggattataggcatgagctacgacacctggccctttatgctattcttaaaactttttatttttttacttttaaacttttttgttaaaaactacgatacacacactactacagtggtggtactaacatgtggaatgtgtccttgctgtcttttttggcattcagagctttgtgacccatctaaggtctttgtgacacacacacacacacacacacacacacacacacacgcacacgcacgcacgcactggtctaggcctacactgagtcaagattataaatatcactgtcttccacctccttatggaaggtcttcagtggcaataacatacatggagctgtcatctcctataacaataggaataccttctggaatacctcctgaaggatctgcctgaggcagttattcttttttttagtaagtggaaggagtacactctaaaataaagattaaaatgtatagcgtagtaaatacataaaccagtaatgtagtcatttattatcaagtattaagttctatatatatgtaattgtatatgctgtacttctatgtgactggcagcacagtaggtttgtttataccagcatcactacagataggtaagtaatgcattgcactgttttgattgctatgacgtcactgggcaataggaatttttcctcttcattataatcttaagtgatcatcatcatttatacagctgtcgaccaaaatgtcattacaggtgcatgagtttaaatgttccagaaaggttttattcagtattaatctttttatggaatctgaatataattactgtgttggatttgacttcagaaatgactagtaatgttaaaaaattgctatgattacccattttttagtttctggctagtgttttttggaatggatgcttaggattcctgcctaatgcagtgatttcagggccaaaagatgcttttggaaggattgcttgtaatcaagctaaaagagatgaagaagagcttgaggatttctgtaaggtgaatcaggatgaggggaagaagcctggaaataaacaagataaagcagagcataaattcagctcattagaaaccaaagataaggaccactcacttactttttttttttttttttttttttgagacagagtcttgctctgttgcccaggctggagtgcagtggtgcgatcccagctcactgcaacctctgccttccaggttcaagcgatcctcctgcctcagcccccctattagctgggattacaggcacatgccaccatgtccagctagtttttgtatttttagtagagacaaggttttgccatattggccaggctggtctcgaactcctgacctcaggtgatccacctgccttggcctaccaaagtgctgggattacaggcatgaaccactgcacctggcccactgacttaaattttcctctttagtggcataagtagcattcttagtttttccaggaactttctttttgactcttgggtgtaaataaatggttttgtttaccattcattgcatttgtagtcttcagattaacatataattttctgacataattgttaagatattgacaaatttaggacatcatggcaaaaaatgctcttattcccagtgtcacaagtatcagactttcagtgcctgataaattcttctggaaacataggcctaggaaaaacctctggttctaattggttgttacactgacaactgaagtcttaaatgttactttatcctttgccagaatctccatgttgaatttgaggtattgattccatttgccccatttgggggttcgctctgaaaactatcagttggaagtaaattatgataaatgaagcatctgatggggaagccccaaaatgttgttaatgtgaagagtttgtgtgataatttgcaaaggaactgattatctatgtgatggatcctgggagtagagagagaagtaggtaggtttgagctaccttgctaaaagacagttgagcttgtcagcagttttggttgttgtttcagcctgtccaaagccatatctgattgttttaaggatacagttgtccaaaggatttacttgatgtggtttcccagttttctcttctccaatttttctgaccccaggctccattcttcccagaacatggttttacttttttttgtattttctgtttcttggcagcattgatatttcgcctagaaggaaatatccaagaatccctagaactcttccagacatgtgcagttcttagtcctcagagtgctgataacctcaagcaggtggccagatctttgtgagtattggcaacctggaggccctagggcactcacagagaacagtgtaaaatgcattcctaggtccagcctgctgctggcagctgcatcagcctgatacacaagtgggggaatggtttaataggtacagtgggattcactctgaagagcatggattaagtttgaaatttgagaaaatgagataactagtgttaaggaactaagcattttaaacactgtgcattctagtttgatgggggaccaatattgtttatcatgtaaatagagacaccttgtaccctaagtcttctaaacttattggcaatccttggaatttttctcatctactcttctaacacttagtatttgtcacacagtaagtttttagtaaggacagagagttcctgacttctgatggttcaacttacataatttttcaactttacaatgatgtaaaattgttatgtattcagtagaaactgtacttcaagtatccatacagccattccgtttttcattttcagtatagtattcagtaaattacatgagatattcagcattttattataaagttggcattgtgttagatggttttgcctaactgtcagcaaatgtagttaagaaagtggagataggaactccatggaacagagtaagtgttctgagcatgcttaagataggctaggctatctatgatgtctggtagagtagatgtattacatgcatttttgaattacagtgttttcaatttacaatgggtttactgggatgtaaccccatcataagttgaggagcatctctatttgttgagtgaatgtcctaaagattcctagatggaaagaatctcaagtgtttataaactactaggtactcccttttcagtcctttgttccatggagttcctatctcccctttcttagccacattgccattcatacctgtgttgtttttgcatagagcttggttttccctgtttctctctaaactcaggatccaatatcaaggaaagagacttagtcttggaaggaaaggatgtgtccctaatgggtgatgataaatgatggtagttactgcttaacatggtatatcattaggcttatttcttttttggtctgcatttatagtacattgtagaagaaaaattccacaagactctcactaaaattggtatagaatgagaccaaggccttggaacagctgccagtgcaatccctactaagagagcttctgctgttagtgtatagcagcttcactgaccaaaccagcacaaccacctcatagagaaaaggcttctagaattctctgctggatgaaatatgattaaaatgtgggactagtagggttagtcttctaagaattttgaggtaataattatggaaaatatatcttttacagatttcttttgggaaaacataaagctgccattgaagtatataatgaagcagctaaactcaaccagaaagattgggtaagtagagaactttcagttctttcttattagtaaacttgctaatggttccatttatcatctggctgtcttatttctgaattcttacattccaaaaatgtcttgattttaacctcatacttaattcatgatttgtataagtataggatcaaaaaccatgtttcctcataactttgcaggcattgctgcatgattttctagcagtttgctgacgagcagtctcttaccagtctgattcttgttgatgacccctagaagctttgggtatttttttcgtcattggaattccacagtatcagcaataggcatctagttgtgtttcatgtctttttcccgtccccatctgtgtgacattcaattgactctttcattctgaagacccttgcctttctttgggtcagggcctttgagtagttctttatttttcccctccccttctctttgtgtcaattgaggattgtgtgtaaatgcaacagaaaatttgactaaacattggctttacaaattcgtttttgtttttttttttaattctcatgaaacaagatgtccaggtaagtagttgctggcattgatttggtggtcctaggatgtcaagactgagagtttttcctcatggttacaagaagactgctgcatccagcatcatatctgcattctagggaggcagaaagagaaagcaacaaggagaaaaggacagagcctatactgggaaagcacaactttcccagaagtcccccacagacttccacttatgtcatatcagctccccttctataaggaaggctggttaaatgtcgtttttaatctggtcacactgccactctaaacaaaattagggttcttttagtaaggaaaaagagaagagtaggtagcaggtaggcaagtagataactagcagcatctgccacactgttttccattctctatgagagatgttctctaactattctctacaactcttaacttgcctctcattttctacctctgtgtccttttctttgtgtgtggtgcgggggggtacagaggctcactctgttgcccaggctggagtgcagtggcgtgatctcggctcactgcaacctctttcttccaggttcaagtgattctcctgtctcagcctcctgagtagctgggattacaggcgcctgccaccatgcccggctaatttttgtatttttggtagagacggggtttcaccatgttggctaggctggtctccaactcctgacctcaggtgattcacctgccttgtcctcccaaagtgttgggattataggtgtgagacaccacgcctgaccctccttgtcattttattatatgttcaggacatgtattcagtcttatcttccatatcatcatttttgtttttagctatttgtattctgttatataccctatccatccaatattttttatttcatttccttttattgtatttttaatttccaaaaatcttgtcttttcttcaatgtctctgattcttgaagttcttttctgcttctcagaattatctttttcttcctctctgcattttggttcttctattttatgctgttggtatttttcaagtatttggtgattctcagagagacattcatatctgtgagtgaagaactagatttattagtacagagaattagcatggatttcctttgcagttcttacggggcactattatttttgaagtgtgttcaatttgttagtcgcttttcttctgtacatcggaagattgagttgagtctttatgccatggagtatgttatagctaacagccagagtgaaactacagatgaagaaaaattcatgtacttttcattcagtcggtttttcaaaaaatgagtatgtctgctatatgccaagcactgatctatgccctggagatgcaaagatggactgttggattataagatactcaactagaataggaaatgaaggaagaagagcaaggtttggaagaaggtgatggtaagaaatcagagttaaatcctgtctttcagaggattttggatatgataagttttaggttctgaggggatatctaaattgagatgtgtccagtaggattggatatagaaatctgaaactcaagtgttttggagtagagatgtgaattctggagtcagcaacataaaggtggtaattgaaaccattagattggttgacattaccctgcaatgagctgaggatgggaccctggaaaaaaagagttttttactttttttttgtctgtttgagacggcacaggaaaagttactgctttaatgcagggaggaagccctgcattctctatgggggccaggatcatgggggtggccagtgccacaaatggtcaccatacaggccagggaggagccagggcccaccaataatccctggaacatccctggatgctagcagttttttactttctaaatttttttttttttttttaagagacaaggttgcctaggctggagtatagtggggtgatcatagcttactgtaacctccaactcctgggctcaagtgatcctcctgcctctgcctcctgagtagctggggctacaggtgcaagccaccatgcctggctaaatttattttgtggaaatgaggtctcatgttacccaggctggtctcaagctcctgtcctcaagtgatcctcctgctttagcttcccagagtgctgggattacaggtgtgagccatcaaaaagcaattttgaaggactgagcagaagaagagaacccatagagggagatagggaagaggtaaagcaggagagctcagggtcacagggggaatggaacgtatttcttaatctatccagttggttgaaagagctcatttggtattactgactcacttgggataaccatcccattgttactagtagatgtgatcattcacaaaacagccattctttttttttttttttgttgagacagagtctcattctgtcacctaggctagagtgcagtggctcaatcttggctcactgcaacctctgcctcctgggttcaagcgattctcctcccccagcctcctgagtagctgggatttacaggcacccgccaccatgcccagctaatttttgtatttttagtagagatgaggtttcaccatgttggtcaggctggtctcgagctcctgacgttgtgatccgcccaccttggcctcccaaagtgctgagactacaggtgtgagccaccaccttttttttttttaactttaaaatttttctttaaaattttccccttcatggcatttttattttctttttagaatattttaatgattttgaattttacttttattaatagcccttacctaccctacatatttcataagtacctgtagaaaaccttatagtagctggagcatggtggctcatacctgtaataccagcactttaaaaggatgctgagtggggaggatcacttgagcccaggagtctgagaccagcctgggcaacatagagacccagtttctaggaaaaaaaaataaaaattagtggtcgtgtgcacctgtagtcctagctattctagaggctgaggtaggaggatcacgttagcccaggaggttgaggctgcagtgatgcggtgaactgtgattgtgtcactgcacttcagcatggaaagcagagcaagaccctgtctcaaaaaaaaaaaaaaaaaagaaacaaccttgtagccctactttcttggactcatcagggtattccacagtcttgctgcaacaggggaatagtaattcctcctgccattatcttagttgacttttggaacagttctgttaagtagggagaatttcccccattgacaagtgaggaagctaaggctttggaagatggaagttgctacagtgaggtagttgctgagccagaactggaattcagacctgtgatctaggatgatctaagattcctcgtcttaagactgtgatcttttccactgtaccaactgcctttgcaggatgtctgctgggttcccttacctcctgaaagataggatttgactctgatttgttctgttgccctttccaaatttcttttgcagttagtttgttaaaggtatattgctgccttctcaactatctatgtcaaagattttaaaaggtcagaggttagccttcaggacatctatttacttacctaccttaacaattcctactgtagagcaggacatttaaaggacaagaaaggctttatttctgccttgtctctctccatgcatgcattcttatagcatgacaaagttggcagtatacaagttttggaagcaggcctgagttcaaatcccaatgttctataatatggacatgatttgtgattgaataaaaaaaatttttaaatgtgcggcatttgtgagataattggaaattttaacgtaattgaatatctaatatcaagcagtcactactttttttcgagtgtgacgatgtgggtagtttaagaaaaaggccttatcttttagaaataaatacggaaacatttgtggataaaacgttgggctgttatttgcttacaaaagttgtgggagtagatggggtgtggattggatggttgttgggacaggatgattagtacctaattctgtctgcacttacgtatgattgaaattctccctaggatgtagaactaaaaaagaaaaaaaaaatcccaatactctctgtcttaagttaggtaatctactcaacctctctgagcttcaatttccttatctgtaaaattggaaagattataactatgttgcaggtttgctgaaaattaaagtaacatatatgaaaacatctggcataaagcctgatgttagtaggtgctcaaccaatggttgctgttttgttgtttttactatttttggagacttggaaaacattaaatcagttgttatctctgagcctgggggtccatgtttcctcagacagggacacatctccactactaatagggtagttcttactatgtttcccaagagcattttccttacccttgctttctccttttccaaagctaccttaaataaagggaggtttattataaaggaatttgagagtccataaaacagtatcaagagatgcaggttggtcttttagtgaagcagaactggaacgcttcagcatccaaggtagctactctgccttttctgcttcatcttttctttctgtagatcaaaggttggcaaactttttttgtaaagggccagttaataaatattttaatttgtatagcttcatacagactctgttgcaacgacttaactctgcagttctaatgcaaaagagccatacaaaaacaatagttgtgtctgtgttccaatgaatctgtacttataaaaaagggcagggaatggatttggcccatggaccatagttttcccatgtcagctctagacttctgcagatggctccaattacatgtattccatcacagcagactccaggtggcgctgtcagtcctcaagttcacatcacctagtaaatttagtacttgtaactaactagctctcttccaattccagattcctagggaaaggacttcagttgtgtcaggtgtcactatccaactgtgttgccttaagggcggaaatgtgtggctagcagccctctcagcaggggctgtgggtagtctctcctgagaagaaggagcaaagggtatgggtgatgggcaactcttaaagaaaaaaggtatggggatgggctgggtatgtgccccagggttccccatagatccaggaagatcacctgtttattctgcttttatttcttataatctgtatttttttatgttgaggaacttatttttaacaattaatttgagtatgaactctaataaaaagctgactgtaatgcatagtttaaagtttaaaccttgccgagcaataacaatctctagatgtctgttgtttcactctaatacttactgtggaattacacctgagttgttttccttcttttttatgagcctaggagatcagccataacctaggagtttgctacatatacctgaagcagttcaacaaggtaatttatagaagtggtgatagatttcactgagggtgcacttgttgcagaagttgttacattgctcatttggtattatccctagtgcttgcagaggtttttggaactgaaaattgaaagtacctttatacatttttttctgttttaattctcacttgtcattattcatctgttgttttctgcttgtaataagaacatggaaagttctagaaatatgagggaatggcagtttttctcctttcttctttttctctacctccagttaaatttcccagtttagaaacagatgcttaataaaacatacatatcaaaaagtggacccttaagtcttaaaggtgtgatcatgaccatgtgagctatctccatgccctgacggcaacttagtttttagggtcattgaaaataaattttaaattttaagtggatctgatttctgagttttcagttttaattttatagttattttccatgatgagaaattatatttcactgtgattaagctatagactcctatatcagagaagacaagttgagcttacctcaaatttggtactcaggtaagaaaaagtatatatcataattgaggagtagacaaaattactgagagctctaaaacttagtgatgagagcgttgggtagtttccttcatagagctcacagttagtgattgtgaagttttattctcctttctccgatgccaccaggactgagaatctgaattggttagtacccatttgacaatgtttagtttgtgtcaatttgcagactggtgtaactagtatcccacactggtgtgaaaaaaaatatgcacattagcagttggggtgtaaaagtaacttttctcctgagataacaatatatatacataaaatacatttagtgggccccttaggttttgtagatggatctatagttttatatacttggttaggagatttttctcttcagagacaatttcaaacaggcacatttctattcacaggattattctgagtcaggggaaaagaaggatttgtctttggttggatctgtgctgagaagaaatatatttagattttactgtacagctaacaggctaggcaaatacaatacctggcatttatataaatgcttgttgaatctgtgaatgactaaacaaagcccttttgtttactaggagaaggtaagctcctccagagcaaggagttggttttataaactcaaatatatttagcatctagaacagcaagcagttgggtgaataaatgagaacaatctatttattcatttatcatcacattgatggggaaacctggcccaccatagggaaggttgtgcacttggtcagtgttacagctgggatttagtttagtgtagtactctacactgtactatgatggcccttttgacttatgaagtatgagtcataggtgtgaatatcaggcagaaaacattcagaaagattaatcgtcttgtataaattcttccaagtggctccagaagcagatatcccatgttgccagctgtcttttcaacaaggacagttttggtatgttttggtctttgggtagtgggggctgtttgctgaaatgtgatgttcctatgtcaatacagcagaaagtgtctttacattagccatataaaggtatagttcgttcagtggtagtgatttggttttctttattttgttaaacttgtcaggcacaagaccagttgcacaatgccctgaatcttaataggcacgatctgacttatataatgctggggaagatccacttgctggagggagacttggacaaggccattgaagtctacaagaaagcagtggagtaagtgtatctgtttcctttaaaacagtgagaaactaaaaaaattgagtggatatgtgaactcccaagcctaaaagagtgaatatgtttgattaattacttactgtatgagttaaaggttaagctgaagtttaagagctcccagtagcttcaataaggtagactgtgtttctttcttacctataaggatgactgctgctttaggttagctgggcagctctattctacaaggtcagccagggatccaggtttcttccttattaactcaccattccttaggctgttgtctttacctgcatggttgatgctgaatgtaacatccacatccaggctgtggtggaaggagatggtttgggaagctaagcatggaataagcatctggctatatatatatatatatatagagagagagagagagagagagagagacatgatcttactccatcactcaggctggagtgcagtggagaacacagctcactgcagcctcaacctcttgggctaaagcaatcttcctacctcagcctcccaagtagttgggactacaggcatgtgccaccatgcccagctaatttaaaaaaaaaaactgtttttgtgttgacagggtcttgctgtgttgcccaggctggtcttaaacttctgggctcaagcgatcctcctgcctcagccttccaaagtgctggaattacaggtgtgagccactgcacctggccttggtaataagttttaaatgacccagaaattgcacacatcgttcctgcttacattccatggttcaaaactacatgatagttacaagggaagtgggcagacatgcactcaagaagaaggaaataacagatttaagagttggccgacagtctgccattttggtatcatatgttaataacagatcttctgttttcagagatattattagggacagaaatctcctgattcagtaaaaaacaaaacaaaacaaaacaaaacatttggccttattagcatgagaccagtatcttttttcccccttccccattttcccttccccttccccgttttccccttccctttccccgttttcccttcccccttttctcttccccctttccctttcccccttcccccttcccccttcctcttccccttcctccttccctcttcccccatcccccttcccccatccccctttccccatccccctttccccatccccctttccccatccccctttccccatccccctttccccatccccctttccccatccccctttccccatcccccttccccctttccccttccccctttccccttcctcctttcccttccccctttccccttttcccatctcccttcccctttcccctccctctctcccttccttcctttttctctcttttctttccatcctttccctccctcccattcccatctttctttgtttctttcttttcttcctttcttccttcctttctttccttcctttcatttatttcaacagtctcgctctgtcgcccaggggtgagtgcagtggcgcgatctcgcctcactgcaacctctgcctcctgggttcaagcgattctcatgcctcagcctcctgagtagctgggactgcacgagcacgccaccacccctggctaatgtttgtatttttagcagagacagggtttcaccatgttggtcaggctggtctcgaattcctggcctcaagtgatctgcttgccttggtctcccatagtgctgggattgcaggcgtgaaccactgcgcccagccttgtgttgttacttttaaatgggatagctgtagcaaaatgccttgtctcatttgtttggtcccttaatagaatgtctggtctgtggttcaaggcttattattcctaataattagattctgaactaaacttagatttctattaatttgttaatcatctttgtcttctaccatggtagtaaattttctggttatatcagtcacagcactgctttctgaattttcttcaaccatattttgtgtctaaaacagaaaaatcccttggtttgttaagctacagaacagacttttgtcatcaagaggctgtatatttgggcaagtagtaaggagccatgtaacatgttcagtgcctctgtggtgctaggtagtagccctgatccctgacccctgccttctagaggttagctctttgagaatagcatacataaatcccaaggggaacattcttccagtaactgatcaaggactttggtcactaaatttcctaagggagaaatgtggacagctaaaatctgaagccttactgagaagatagagaccattgttcatgacctacagctttgaagagagtagtcatgttgtagtggggaagccaatattgctagaattacagaagttacctggctttggggagggaagtgatcaaagtggatgtttattatggcagaaagtgaaaggcggattcccagttgaattgagaaagctctgtttggtcagctcaggcctcccctggctggggctttgcatcttctggttcaggtcttcctataggtaaccagtgccctatatcattccttagaagcagaagacattgttcatagccctttggtgttttactgttgaaactgtctgatgatcctatggtcagatcatctcaactcagtgttgccttggttttgtgacaaagacaaatactagtgagggattgagcaggcaatccctgatgtgagtattttacttacatcagtgtttactcccaaaggtcagtagcaccttctttcctaggattggtatgtatcttccttcttttgtttagtttggctacttggtatagctctttgtttaagtggagagaacagcattaggggccttgggatcctaaattacatagaaaattatgctgcctggcattgtgagcacaatgaggatagaaaaaaaattccacaagagaggactggtgaaactgtgtgtgttctaggctgacttggtttataaagcattgttctttaattttatcagtgtgaccaagacagtcatgcaaaacattctataggttctttcttaggacttttaccctaagaaaggaatctgaattctaagcctcatttttcttgctgagcagttctccttatcaccagggttgagatgacctacttttgatggcaattcccaaattgccttcaggtatttccacggggaggaagaggctcagtggggtctgtcaagtattgcacgagggcatattactgtgcatgtgtcttcgtgtttctcatctacatcttgtttccctctgagcatctctatgttgcaggttctcaccagaaaatacagagcttcttacaactttaggattactctacttacaggtaatgaaaactctgtactcattcatgcactgatgttagaaatggttttgggtttgtgtgtatggtggttttcctgcattctgatatttattttattaaaggtcatataaagttcatgaactacactctctctattcgatactctttgctaaaggaattaattttctgcatttaaattggaagcaattctattttagcctagtgcaattataattcttatctaggctgggtgtggtctcatgcctgtaatcccagcaatttgggaggctgaggctggtggatcacttgagctcaggagttggagaccagcctgggtaacatagtgagaccctgtctctacaaaaaataaaaaaattagccaggcatggtggcatgcttctgtagtcccagctacttgggaggctgtgatgggaagattgcttgaactcggaaggcagaggttgcagtgagctgagattgagtcactgcactccatcctgggtgacagagccagatcctgtctcagaaaaaaaaaaaaattcttatgctatccaggaaagagcatatatgagaaataactctggtcttggaggctgttattttgttgtgaggagagaaacagatacaagtgagcacttagggctttggggcaaagccatttcttttgatctttcttcccagccagagtcttattggaaagagagaaggcaaagtatacttttatctagaataagaagttttctgtcccctcaacattcctgaatgtgaatgggattcttttagctccattgattctctggctgaggacccagggcccaggtatccaaggggcttttccctcttccccaatatacacatttgccaagttccttggtcagctgattctgcctccagccctgcctctgtggtggcctttatgtctatttcatttttctttaaaaggaatcaggagcttaaccctgggtcttcctgggctttggcttgggaggttggctccacgggagatgaggatacccagctcatttcctgcaaagaggcattaatgtggaacagtactagtgtggcagagatggttcttatcaaatagatactttgaccttatcaggtgacaaattaacaaaaatagaaggaaaaccatgactggggatttttagttttctttctttattatctggtaactgtagctgctttttttttttttttttttttttttaaagtcaagagaactcaaaaaagccagagcatttctgttctgggtgaggttggccagactgtttttttttttttttttttggagacggagtttcactctttttgcctaggctagagtgcaatggcgtgatctcggctcactgcaacctctgcctcctgggttcaagcgattctcctgcctcagcctcccaagtagctgggattacaggcatgtgccaccatgcctgggtaattttgtatttttagtagagatggggtttctccatgttggtcaggctggtctcgaactcctgacctcaggtgatccacccaccttagcctcccaaagtgctgggattataggcattagccaccacgcctggtctggccagactcttttaactgccgtctccttgctgatgtaaattgtcttgtttgctttttttccaagctcggcatttaccagaaggcatttgaacatcttggcaatgcactgacttatgaccctaccaactacaaggtattacaggctgtgaaggctctggccttcatatagacggtcccactgctcctagaggtgatctgaccctggaaagcaaaggaatagcttcttaaatttggatacctgagaaatagaaaaaatataaataaaaggtggctcttcttatttgaaaatagtgtcaagtatgctctacttatcttctaaaagtgcacatttgttataatagacgtgtaacccctgcagaaggcagatcatagtgctagtaaagcttatgtgttacttaggaaattagcaatgcctccacaactattgtcaaaaataaatctgcggcccggcgcggtggctcacgcctgtaatcccagcactttgggaggctgaggtgggcagatcacgaggtcaggagatcgagaccatcctggctaacacagtgaaaccccgtctctactaaaaatacaaaaaaattagccgggcgtggtggcgggcgcctgtagtcccagctcctcgggaggctgaggcaggagaatggcgtgaacccgggaggcagagcttgcagtgagctgagatcacgcgccactgcactccagcctgggtgacagagcgagactctgtctcaaaaaaaaaaaaaataaaaaataaaaaaaataaatctgctgggcatggtggcttatgcctgtaatcccagcactttggaatgctgaggcaggaggatcacttgaggccaggagttcaagaccaggctgggccacatagtgagacccccatttctacaaaaaaaattatccaggcatggtggcacacacctgtagtcctagccactcggaaggtggaagagggaagatcacttgagcccaggagtttgagtctacagtgggctatgatggcaccactatactccagcctgggtgacagagaccctgtctctaaaaagaaacaataattatgttgaaatgacttctagagtcctaatgatttgatactacaactttttttctagatgtgactttgggaatgagaaggaatagcatcaaatggatgaacatcattgaggagatgcagcaagacaagctgtttattaaaggatacaaactgaattctgatttaggaagtaacattagactgtcagctcccaccttgatacctttccttagagaaatgaaagggctgggctgatgaagcctaaagctgactcgccctctgttctacggtagaaagaaatttaccttaagtagccacgtacaggtgtatttcaggtatctagaacacttggtataccaaataggggctgcagagaacagattaaaggaagtttttacttaaagggctctggtattcattctgaaatactgactttcctggctagaagtaggaaacagatgggtaaagcaagtaacattttatctttttttttttttttttttttttttttttttgtgctgtgccagagagccacagtgtagagtgcaaggacattcctcaggaacatttgtcccaataggttggatatatttatgtccctggaagaaattttccagtcccatctatgctgatgggcctgctgagtatagactcaggaaagctgccccactgctacagccttttgggaatgactgaatgactttctctgtgccatgttttcaggccatcttggcagcaggcagcatgatgcagacccacggggactttgatgttgccctcaccaaatacagagttgtggcttgtgctgttccagaaagtcctccactctggaataacattggaatgtgtttctttggcaagaagaaatatgtggcggtgagtgtcccctcatgttctttgtttgtatttctacatgtggttattgggtctgtttagcttgcccttctcattgagtgccccttctctctcataggccatcagctgcctgaaacgagccaactacttggcaccctttgattggaagattctgtataatttgggccttgtccatttgaccatgcagcagtatgcatcagcttttcattttctcagtgcggccatcaacttccagccaaagatgggggagctctacatgctcttggcaggtaagaaacatttatgtggaaaactctctctgccatctgtaatgagggaaaaatggattagaatcatagaagatcagtggctgtctcataggagccattcccttagagatcctgtaggaatctggattactgtcctggagcttgaagaaatagaaaaagatgacaaaggaacttggttgtttctaacttgggggagtttgactcagagaccaacaggttaaataaagatcatccctagttcaccttttaccagttttttcctcttgccttgacaattcatttatgtatatattgagtccaactaagttccagacagcaagtgttaagagcttgggttttaggtagggtcctgcctctactacttattatatgtacctagggctgatgtgaggattgcatgattaagctctcaattaataatactggttttgttgaaatactgatttttgaaaactgttggttttactgtggttatataattggtctattattatcaatattgttgttactataattggcccctaggtgatacttccaagtcaagctaccttatgttgaaacccttatctcttctgagcatgttatatagaatgccattctcttcctgaaactccattttatgccatgcaaatactaaaattgatcataaaaataagttaaaattaatcaaacactttaacaattatgcacaaccattttaaagtactgactagtctttctaggaatttttttctccatatacatttacttactaaatgtaagacccaaagcagatttccatgtcctcatttggcagtcgtcttccagtggctttttgttcattactgtgggttcttatttaaaagagaaagcttgcaaaagcaattgtggttatttgagggttgcctgaatacaaagataactttaaaaaaaaaacataggttttattattattcagatatggtatgggcaacagatcagaagacatctgccactggaaagatagtctgttacaattcctgagaaggagggcatgctacaccgtgcagggccacatggggaagcaccaggtcaatcaggaggtagagggagcaaggggtaaatgtgggcacaattctttattgtagttttcatgggtagaaatgccctccccggggcaagaccgggaaagcaggttaaccaggttggggattggccagtttgaataatttcagtgggctctgggctatagggctgtctctaggtgtctggtacctgaccctcgggtgactaggactagggaatattggcccagtgtcagggcccagtaaaggaggcagttaagaatatgaacactgggttggtcggtctgcatacagaaggtactcttgtaggggttatatctaggaattagctgactgtgggagggacagtctccccagggtcagtaaggccccagatgtcaaaacatcagaataaaaaggctaaagtggggtgtgatggtacatacctgtagtgctggctacttgggaggctaaggcaggaagtttgcttaagcccaggagttgggagtacagcctgggcaacacagtgagactccattcctctctctttttttaaaaattttattttaggttcaggggtacatgtgcatcctgttacacaggcacgtgtgtcatggggattagttgtacagattatttcatcacccaggtactaagcctagtacccaatagttatttttttctggccctccccctcctccagtaagctccagtgtctgtttccctctgtgtctccatgtgttctcatcatttagctcttatagtgagaacatgcaggatttggttttctatcctttattaatttgctaaggatggtggcctccagctccatctatgttgctgcaaaggacacgatcttgttcttttgtatggctgtgtcgtattccatggtgtacatttacattttgtttatccagtctaccattgatgggcatttaggttgatttcacatctttgctattgtgaatagtgctgcattgaacacacacatgcatgtgtctttatggcagaacgatttacattcctttgggcatatacccagtaatgggattgctgggtcgaagggtagttgtatttttagctctttggggaattgccagattgctttccacaatggttgaactaatttacactcccatcaacagtgtataagcattcccttttctctgcagcctcaccaggatgttatattttgagtttttaataatagccattttgactggtgtgagatggttatctcactgtggtttcaatttgcatttctctaatcagtgatagagtttttcatatgcttgttggctgcatacatgacttcttttgaagtgtctgtttatgtcctttgcccattttaatgggattgtattcttcttgtaaatttgcttaagttccttatagatcctggatattagacctgcatggtttgcaaatattttctcccattttgtacattgtctgtttactgtgttgatagtttctttagatagctgggttctaatggaacacagaaatgtaaacagccataatgtaagagataacagcgatgctaactttacaaagtagagatggcattcaaactggatcctgaacaacaagctaaaatggaatagcacagaatggctgaggagccactgtgaagaaaggcatgcagccatgaaactgcagtgtcccttgctgttagtgggggttagtgttagagaatatgatgggagatgaatcaggaaagatattctggggtcagattatggaggtcatgcgtacagtgcaaggactttatcttagaggccatgtttgtccagctgtcttcctagatctcctcttaggtgcctggtaggagtgagtgcatagctggtggggaggtggaatgggcagggcttccagagcagctgtttttgttttatatattaggtgtcaaggaaatactgattttaaaaagtggggggagtgttttactgctaaatgaaagtgtaaagatcatggttatagatgtggggggccagtgaggattcctaagtaggatggtaatgtggtcagatttgtaaggcagtgagatacctggcagcgctgtggaaggtggaatggaggcaggtggggactttgacactggggaataaatggaaagcctaaaactacttgggcctgaacaagggcagtgtcagaaaagaaactgcaaaaaaaggatgcatagaacctggcaactgattgactgtagaagagatggttgaagatagcaccaggtatctaagctgacttagtaaactctggtgccatgagctgacagggtgaagtttactttgggggtagtctttaatactccttttgtcttctaagctgagctctccagctgcagtgctttctttgttgcagtggctctgaccaatctggaagatatagaaaatgccaagagagcctacgcagaagcagtccacctggataagtatgcactttgttgagaatggtactggcgggggttggactctccaaagccatgaggtggtgccatacatagcattggtgctgcctgtgtcagcccagctgttcctctatggcattagtacatagcagacctcagtgtggagggatgtgtctcctaagtatgtggtggctcagcaggaattgacactctgagaaaatgtttccagtcctaaactgagtaatcaggaggctagagaatgtcagaactggcagtgggcttgggttgctgatagctatgggctagctggaatatcagatgggactctgggctgtttaattcaagataaaacttgactcttccaggatttactccgctggcatcttctagacagcagggtagagatccctttttcaaccctggcctaggtagtctctgttgagggctgagatgccagatttggtcccaataccagctttgcttgttaggccattaactccttgattcttctccacaggtctgcttagcacgtatgtacctaccttgctgcataatggagaaatctctacttaaccagttttgttttgtttttgtgtaatgagaaggatctctaaatgaccatttgttgcagagcccccagctccatagaatctctgtctgccacaggtgtaaccctttagtaaacctgaactatgctgtgctgctgtacaaccagggcgagaagaagaacgccctggcccaatatcaggagatggagaagaaagtcagcctactcaaggacaatagctctctggaatttgactctgaggtatgtcttttattagctcccaagagtcataagtaagctctcaggagacttttaaaaatcaagcccagatcatccaaatccaaggtattacacgttcatggctgttctggctttgatgttcctagcagcatgagttcatcaattaataacagcctgagaaaaactttcctagaataataataaaaggaaattcaggcttactgagttgttattgctaattcaactcatcaaagttgaggtctgtgtctgtctgtagcttccttctatttcactttttttttttttttttttttgagacggaatctcgctctgttgcccaggctggagtgcaatggcgcaatctcagttcactgcaacctccgcctcctgggttcaagcaattctcctgcctcagccttccaagtagctgggactacaggcgcgtgccaccacgcccagctaatttttgtatttttagtagagacggggtttcaccatgttggccaggatggtcttgatctcttgacctcgtgatccacgtgcccagccctatttcacttgttgtaggaaatgcactgtttggcccggtaatgcaccaggcttgaattgttgggttttgagatcctatgtgaaccaccatgccatccagtaaaggcaatctgtaatctctactgtttgataagtacttcctgcctcaactgctagtacgaccagacactatttcagctaaaaccccagctcgaagaccaaagaagtgggttggcttgtctctgacagtcacgcttttgattcttttacttcctttgtggacacaagatggtggagatggctcagaagttgggagctgctctccaggttggggaggcactggtctggaccaaaccagttaaagatcccaaatcaaagcaccagaccacttcaaccagcaaacctgccagtttccagcagcctctgggctctaatcaagctctaggacaggcaatgtcttcagcagctgcatacaggacgctcccctcaggtaggaccatacagagctccatgaagacctggcaggtacaagccacatgtgtctgtcagcagagattatagctttcagtgaggttctcttcagactcatatgtccaacgtagtattggccacaaggggagaaaaaaaacacagggtggctaaattggcacttgtttccttaaggcgagctatgtagtaggtaacagctactcacagacttagttggatggtctatacactggtctttccaattttagcaatatgttattaagtatatcctgttatgcaatgtttaatttttactgctttatcagaagttgacacgtaaatatttttcagtgactcattgaaggcaaacttgactgttgctttatttctcagttatagtcttcccttatagttaatgggtcagtcccactggttccagaaaatatggggtttcctcttgaactctaacagcaaaaaagaatgatttcttctgaaattgtggaacatgaggattcaagtttttattttgttactaggtgctggaggaacatcccagttcacaaagcccccatctcttcctctggagccagagcctgcggtggaatcaagtccaactgaaacatcagaacaaataagagagaaataagaatagaatgaatgaccccaaaatagggttttcttgggcgaggatgtgctggattaggaaaggtgacatgacacaggcagagcagagtggcacccaccacagaatacagtgtgtgttattacgaggagccagcagttgagcctaaggtccttctacctacctggtattggcatttgaggtcggaaaccctctactgccccataagccaggaaaagtgaaaagagaacacagttcctttaagaactggcagcaaggcttgaggccttatgtatgtagctgagtcagcaaggtacatgatgctgtctgctttcaaaaggacttttctctcctagctgactgactccttccttagttcaaggaacagctgagacagacctctgctgagtagctctgtgatgacaaagccttggtttaactgaggtgatcctcaggttgtgaggtttattagtccccaaggcaaacacaaatattagattaataatccaactttaatagtatacatttaaaagaaaaaaaacaaaagccctggaagttgaggccaagcctgctgagtattgcagctgcatttgcccaaagggaatccagaacaagtccctccctgtattttgttcttgagaggggtcagtctagaagctagatcctatcaggatgaggagcagcagcccagggcttgtctggatcagcaccaacgattttaaagaaaaaaggaagagtttcttagatgagtaattgttattgaagatagtcagtgataaccactgaccagatgctatcaatacactatgtgtcctttttagaataaagattacatatcatcattcctttggggaaaattgttattcaggtataaaaacaagagatcataataaaaacctaaaagaacctatg

SEQ ID NO: 1144 - DNA, 42511 bp, Homo sapiens
gtttccggcgcggcccagcgagctcggcaacctcggcgcagcgagcgcgggcggccagccagggccagggggcggtggcggccaaggtccgaccgggtgccagctgttcccagcccccgcctcgggcccgccgccggcgccgccatgggcaagaagcacaagaagcacaaggccgagtggcgctcgtcctacgagggtgaggcggcggcgctttgtgacgcgcggcgggcggggtcccgggcacgggggaggagttccgggcacgcggacgggggtcctgggcaccgggcgaggtcctggccacgagggaggggttctgggcacgcgggagggggtcctgggatttcgggcagggaaccgggcacacgtgaggggtcctgggtaggcgcttacgttcctggtagagggttctgggttcgaggctgcaagcccactcaccccggtcctggagactagggaagcatctgtgctggcttttgtgtggagctcagggagaagctgggctgccctttctcccgcctttccctccctctcccttgctcccgcagcagctccatgggtgtcagcgggcagcacgggcgcctgcaggaagtcaggcgagggtgaaccgaagtgctgggggtttctaggagggagatcgggctccggggttccaggtccctcttaatccatcttcttgaacgagtaatgtgaacaacatcccacagggcctctggtgaggacaccgtggctcgaaagggacctgaagctccctgcggaggggaagggagaacaaggaggcagtgacatgccgccactgtggtcttcccttccgtctttccctgctggttggcagccccgctgtactccttagggaggcctttccctcttagcaccttcacgtctcacctggctgcgtggcgtttgcacctgagcacgcgggtagaactcggtctgtgtctgtgcagattatgccgacaagcccctggagaagcctctaaagctagtcctgaaggtcggaggaagtgaagtgactgaactctcaggatccggccacgactccagttactatgatgacaggtcagaccatgagcgagagaggcacaaagaaaagaaaaagaagaagaagaagaagtccgagaaggagaagcatctggacgatgaggaaagaaggaagcgaaaggtaaaggagcagcggcggtggcccggacgctgcccacgaggagcccgtggggagcctggtcccaggacccaggcagagtgcgcctgcgtggctggaggaggggagggggtgttccgttggtagcaaaacgcgaaccgctgaggcccgcagactcagttccaggatcctgggtgtgctgttcctcagcagaccctgccagggtctctgtgaggagggagcctggcatgaggaggatctcggagggggtttcccttagttctgtccctcccctgagaactgcgaggggattgggcagacctgtccggatcccgcctactcctgcctttctcactcccttgactctgccgcccaggaagagaagaagcggaagcgagagagggagcactgtgacacggagggagaggctgacgactttgatcctgggaagaaggtggaggtggagccgcccccagatcggccagtccgagcgtgccggacacagccaggcaagggtgcacttttagagactctcctggtgttcacagctcatcgttgtaaatgaggggtcggcaccgtgtcctgttgctttggggagaagcatgggagggaggagagctggtatttccagggcctcatcccaggtgtcctctggcctgaggtttcctccggtgtctctgaatgtctagagcaaggcgtggccagttaccactggtgcccttcagttttgttttttaacttgttagctaaggatggcttatatgttttttaagcgttcataaaaagaaacaaaaaggcatctccacagagaccaatcgtatgtgacccgcaaagcctagactgttttttgtctggcctttatgtaaaaagtttgccagccctgggtcttgaagtttggttttgtttgcacttaagacagtattggaacagtagccccatctgggtcagactggtaagagagatgcatgtcagtgaaaacgcaggtaattccccttgggaagaagggacctcgaggcccaaatggtgggtctgaagttgctgaaagtgaccataggctgagacaaaggaagctggaggcctttagtagaatctctgtcgtgggcaccatctgcgaaggatggcatttggctggaatttccagttgacaaggacttgccctctgagttctctttgtccccagccttcctgtgcacaactcacagtgatgaggcatttgtacctaagacaaggggtgtctcttcccagcaactctcagcatccagtggttcctggattatagggaaacagacggctgggctttgggacatgggacatcagggagtggggaggctagtgctgcgatcattcaggccgtcagaaactgtctgaggcctgctggctccactgaaggaaagttctggaaagctggtggccttctgagctcctgtggtcatttggctcttcaggcactttctttttttaatttatttttgaaacatggtcttgctgtgtcgcctaggctggagtgcagtgtcgtgattcactcctgggctcagataaccctgggctcaagcgatcctcccacctcagcctcccaagttgctgggactacaggcacgcaccaccacgccggccatttatttactttttgttgaattttaagggacctcaagtgaaataataatcggtgaattcaggatcaacctttatgtccagagcgtttgttccgtcgtccatttcttgtctagagtagtggtatgagctgaaaacattgctaagtgatcaccacatattgttgatgtaagggctaccggttattacaagagatttttatgactcctgctgtgggggtgccctttctacccggctgagcttggtgggagccaaggctgagtcggatgtatctttatatccccagttctcggtggaacttaaaatgctgtgagacaccagacagacagatactgtgaacttggagctctctaatgaagggataccaaagtcttgtattcaatttttttttccttaaattgtcagccgaaaatgagagcacacctattcagcaactcctggaacacttcctccgccagcttcagaggtaaaccggggcgtttctgaagagctagtgtctgggggggtgtggtgtcatcttttctgaggccttattccccacgccagcctcgtcagctgtgaaacagaccctgcaccttctcttggtgactcccagtccacttcggggtgcgtaggaagagttcatgaactcattagtggctcactctgaagtcagagtagagtgagggaagtcaaggctagagctgggacattgatggccgccaggatgcgttgggggaatttttattatatctgaaatacctatcacaataaattaaaagacgctcgtaacttttttatttttaagaaacaaaattcggtcagttgtatccaatttttggattgtaagagattttgtatcatttagaaatctagatttttccgctttaagatgtctttgctttcagaaaagatccccatggattttttgcttttcctgtcacggatgcaattgctcctggatattcaatgataataaaacatcccatggattttggcaccatgaaagacaaaattgtagctaatgaatacaagtcagttacggaatttaaggtaagttactttcattgcccgaagtaatcgtggcatagttctgtgtattcatgtcttgtgaagacttcattcaccttagatcatttctagtttttgagctttcacaggtgtttctgtgttcggatgatgttttacagacacagcattaaggaaatgattggtcgtgaacgttttctctgtgctttggtctagaaactaggtcaggttgcacgctgttagaagtctgtttcttttctttctaagttactgcgctggcgtaaataggacatgttgtttcaagcagtgaggtgtccggtgtggcacggcttgagactagacatttttaaaaacatacttctttttaattcttagttttgtcttacactaattgagcatttagtttttttagcatagtaagtttttctgtctcctgagtactttgctcttagctctgtttcttgctactggctgtgagaattagcaactgctcattggttttgcaacccaggggaagaaagcaaaacaaatgcttgataaagttggcattagtgtagtttagaaaggcattagatttctctcttaggttccattcccctggggaaagcttgacttttctattttatgcttactgaagggtttgctgactcacagaaacacaacagaacagacttaaaggagagtgggagaaaaggaaactcgatgagaggatcaggcagcgcctgagggtagatgttaagagcactccatgcccgaaagccctctgtattccctgcttcgggccccagtctggccattcctagcaacaaagtgagaaggggagcagcattcactccgtggagtgtccgcagtggagtcttcaggggaggggctccacagcctcgggccgggccctagggctgctggctctggaaccgggacttggggagggtccagatggcacgttctcagttagggtggccggcctccggggtcatgctccagcctgacgttggtactcacctttgagaggcctgtgctgaggaaactggcctctcataataaaatactgatgcttccgtattttcaccataaattacaaaataaggttgtccttttgtggggcaaagtctttttctagtagtttgagggaaccatttggtgacagaattttaaattcgattctgtggagaaattctagagatagaggctatcactgtgccgcacgcctgccttcatcccttgacttgcacttgaaagaatcgggtcgttgcttctcgttcctgtttatgttctggagaaatgcaagaagcgcaggaaacgctttttcctcacacagcatttgtatgtgatgcttagaaagaagttacaggcttggccaactgtttgctgtaatatttttcatgcaagaccaatgtgcaactaagaaaacttctcttaagttcttaaacgttatgtttagatcagagagcccagttgaattgttttctactcgattgtagctttttccttttggtctcttggtagtcatctagagctttgctgttgtctgtggcatttcaaacctgataagtctttcctgttttcttttcaggcagatttcaagctgatgtgtgataatgcaatgacatacaataggccagataccgtgtactacaagttggcgaagaagatccttcacgcaggctttaagatgatgagcaaagtaagaaactcactggcagcagcgagctacggaaagcaggggctctgccccccgtcgcttgtgcccgaagggagcctcacagtgaacacgtgctccatccacccgccaccctcatggtgttgccccctttgctctagggtagacgtccccggccgccctctctgctcatgacctagctgtaacatctcattgagggttggtggaaagttccgcatctcttgatcttaagcctgggtgtcaggtgtcagtcttgctggatggcagccagcattgcgggcttgttttgcgtgactgcctcactgaatccagacgggacatccttgtcttccttggccatcctgagtggcttcccagatctgtgccgtgagccaggctgcatgcatcccacgtaggagaaggtaaaggggaggtgcggcacctgccgcgctctggcggtgggtcaagcccccacaaccacctcccgctgctccgccgtggaaagttagctcttaggccaggtgaggctgtgaccatccccatcccatcccatcgtcacggcaccctggctgtgagggagaggtaaatccctgctgctctgtcctttctgattctaggagcggctgttagctttgaagcgcagcatgtcgtttatgcaggacatggatttttctcagcaggcagctcttttgggcaatgaagatacagctgttgaggaacctgtccctgaagttgtaccagtacaagtagaaactgccaagaaatccaaaaagccgagtagagaagttatcaggtaaaggttctgtggaaaccacatttgcttttggagttgagcaccatagccaggaaagcaggtgccttgtaggggagagtgagtgagtgagagaacggatgtcatgtcacatagacattcttggtgtagcttattctggcaggaggagtgtggccagacagcccctcctgcccaccggccacgtgcactctctgacccaggtgtggtacccaagcccgtccgatcacccctgcccccaactgctagtgactggtggtctctgtctctacacgccgttaagatcattggcccctccctcccctgcacagcgcctgccggcagccaaggctgtgcccttgtcccagactgtgccgcacaagcgggctgactttgggcagccagcattggcagggggcttctttgttgctgtggggcagatgcacactcctgaactgctcgcttctgtgtctgtgtagacgctggagtggagcaggtgcaggcctgtggtcaggaaggtgtggatgctgcgggggaagcaggtgaggactgcaggccacagctccctgtagctctgctccctcccacagggagcagccgacttggctggtccttcagggaaccttcttcctttttttctaaaccccagagtggttttcatgggggctctttgtctcatggtggctgagcattgagattgtatcaaagtccgtatcacacgtcattcctgtagacgctcctccacctatgtgaggtggctgcctgataggaccaaacaaagcgagagtatcgccaggggccttagaggcaccaagagcacttaacatagcctgcagcgggcagaagcgcctggcacagagcctgcttcatcacgtgtcacttgctgagtgcaggccccagagagcgcagtctcaggacatccaccctcatggccgtgtgtctgacagcactgtggctcgcggtcttcccagtatcctgagaggactggcctgttgccatcctggggacagatcagatttgaaggatggtttctgctgaagtgtattgcttttgtgccatcttgtgggaagtcagggaccgtctggagttggtactgaacgtccttgaggcaattgtgatggtcacggccctccattgtttgtttccttctcacatgtgtatgggactcacgtggatttaacaggtggggcggcagcggtgctgggctcggtgcttctgctctgagcagctccctccaaccgtcaaaagggagagtggtcttgagaccagcccctcaggtcctgcagccttggcttaggagacagggtgcgctgcgtggccagagtgtgttgcttggcaacggacgacagtcccctaaggcggtctccccacgtgcgttgcatttcccaccccgctgccgtgtgaacactcactgcgtggttggctggtggctgtgtccggcctcagcccccgactcgagtgtgctgctggccttcaggggtcggggtttcatggccgccctttgccgcctcatggtgactgagcatcgagggggaattgaagttggtgctggtcagcatgctcagctgcggtggggttgtgtcctggcagacccaccccaggttggttttgggtgtctctggtgctgcagcttcacccttgcctgtgggatccaggccctttagatggatccccagctgtcagtctgcaggcaggagagcgtgccgagctcaggcagtcaccttcacctagtgtcacagcagtgcgcatcggtaatgggctcacgcaggtgcctgagtggagcccctccctgcggagctcatggggctgtgactcctgtgtagggttgccaggttgtcactgtaggtcaggcaagggcagggccgctctcatgggcagggcttgtcctgggcctgcacctggccctaggccactcagacccatgcccaggcaagtgcccagggtgggaaggagcccactcgcttgcttctagaaccttccacactccttgggtgctacagcctgtgcccctcagctgttggagaactgcttcaggtggaacctgggaccacttgctgacgtccttgtgtgttctttgtgccacccagtggccacagcagagggggctgctgtccacccagcccagcagcaccagaccacacccgagcagccccgcctatcctgccttgctgtgaaccctgcgtagtcaggggtggcttttccagtcacttttctgatggggcctttaataactaaccagtgtgggcatctgttactttgttgcttttgttgctaaagcactttaactgagtttgcactgcgttgaaaaataggaagtctgtctacttggcttacacttaccctttattttaataaaagtgtcttaatttgtcatttggttagggtgaaaagggatgctttgagacctaaaaggagttaagtatgctctgccagctctgtgtctgagggcagggtcggtagaagctgggttaggtgccgacgcatggggagcaggtgtgcggtggggacgctgcctccaggtgacttggttgtccccacctcacagctgcatgtttgagcctgaagggaatgcctgcagcttgacggacagtaccgcagaggagcacgtgctggcgctggtggagcacgcagctgacgaagctcgggacaggatcaaccggttcctcccaggcggcaaggtagtgctctgtggccaccgagagagggtgccacgtggccccagactctctgtgtgcctctccttctgggttggtgctgtgtgatctagcacagccaccgggatccagaggtcagcgtggggccctgacgggaggtccggatcagacacacataaggctggtctcttcagtcggggtccaggtgcctctggcagggctgccgctggtgtttcatgcatcgtggaggccacgtggtcactgacctcatttccttgatggaggccctgctgcaggctaatcctttctcttggagtgaatgctgacttctgtgtctctgtcactgggtgttgacgtgaggcaccgcccttgttattccagtgggggtgctggtgttggatccgacagatggtccataataggccaccgactgtgttcacgtggctcctgccacagatggtctttgtggtggtggggcccactcagctgaccacgctctcctttctggcaggagacgttctagacccagtgtcttcagtggaaacagagcacaggctgtctgcagtctcaggcttcctagcagccctgataagagaagtagagcaatgcaggtgacattaatccttgcaggtttcatttcacctctatatccaacattttatctcaacatgtagtctgtagaaaacgttaatttgagctttatgggtttttttcatattaagtcttcaaaatgcacatgggatgggatgtaaagaacgctgaagtgggggcatttcagaggtgtctgctgctttttgcctgtgcctgctgggaagttgcagtgctctgtgtggcttgcgtgttgcgaggttgcggtctgcgtggctcacgtgttgggaggtcgtggtctgcgtggctcacgtgttgggaagttgcagtggtctgtatggcttgcgtgttgggaggttgcagtctgtgtggcccgtgtgttgggaggttgtggtctgcgtggcttgtgtgttgggaggttgtggttcacgtggcttgcatgttgggaagttgctgtggtctgcgtggcttatgtgttgggaggttgtggtttgtgtggcttgtgtgttgggaggttgcagtctgcgtggctcgtgtgttgggaagttgctgtggtctctggcttatgtgttgggaagttgctgtggtttgcgtggctcgtgtgttgggaggttgcagtttgcgtggcttgcgtgttgggaagttgctgtggtctgtgtggcttatgtgttgggaggttgtgggtttgtgtggctcaagtgttgggaggttgtggtctgcgtggctcacgtgtggggcggttgcttggctcgcctgttgggagtttgtggtttgcatggcttgtgtgttggaaagttgctgtggtctgtgtggcttatctgttgggaggttgtggtttttgtggcttgcgtgttggggggttgtggtctgtgtggctcacgtgttgggaggttgtggtctgcgtggctcacgtgttgggcagttgtctgcttggctcacgtgttgggaagttgtggtctgcgtggctcatgtgttgggaagttgtttatgtggcttgtgtgctggaggttgtggcctgcgtggctcacgtgttgggcggttgtctgcttggctcatgtgttgggaagttgtggtctgcgtggcttgtgtgttgggaagttgtttatgtggcttgtgtgctggaggttgtggtctacgtggcttgcactgtagttcttttggacagccttgttctgcagtctgtgtttcagccctggaattgccacattctccaagaagccctggtttcttgactagagagccttgtgtagaagccaggacctgggttctgggtgaagccctctgcagatagagctgggagatgcctgttgtgtgtgtctgcaccacatacatggacactgtgcagagggattctgttggcacctgtgtttacatgggttgaaaactgtttttacacggaaacttccagttccctcgtgccccgtgggttccgcccacttcttccctttcagttttgtatctgcgccgtgaggacttgtctcctaatcttcgtatcaactccgtgtcccattgagctgaccttccgcctctcccccagggccctggccatcctgtgggctctgagactttgcatggatccgcggtggggagctgcccccacacaaacgtccggctcttctcaggccaggtggctgccctgacatggcatgatgtccagcgcatggacgtcacccttgcactggagcccagccaaccgctgcatgacagccctcttcccccttgaaccccaagtctgcacacaccagtgcctcctcttcctggatcctcctgatggcctgtacacagaactggggtgtgggtggtgggtttttaaatgaaaaccagtccacacatgcttgagggctggagccgcctgccgtcagggcagtgccatgctgacctgctgaccgttccattttgtcaaggctcatgagcaattttaaatgtttactcgtgggtgaaggtttttgtttcagctgtaccccctatagcagggccatggggagcctaagaggttctccttggcacctgtgcgcgctctgctgttgccggtgagtctgaaattccagggaatgccgtgaggggccctctggcgtttgttcttggacaaatgtgctttcacccccattaagccctgcttgttggtcttcatttcatttgtgctgcgctgcccctcctgagggacagacgctcaggcagtgcttccttccagatgggctatctgaagaggaacggggacgggagcctgctctacagcgtggtcaacacggccgagccggacgctgatggtgggtgcccgctcagggctggctttatgctctccgtacactgctttttgggcctccgttgatattctgtaatgaaaagctgagccatggccatggggcagcatgagaggctgcccggcttcccgaccttgctcgcaccccaacgtgacacgtgcgctgagtggaggtgtggacggccatctcgcggggcgggggtgctggtcagacctcggtcagggctccttgggagcagcgggactcgagccatgttcctgaaaagctgccgagaggcctttaaggccaaacctcactagcatcaggaagggttcacatcccgagctcagtcttcagcaaagaccagagtgctggcccaccctgctccttgaatctggaaagcagtcttagaagagctgttagatgatgacgtcaggacagtgttgaaggatggtgcacactaggcctgtccagcccgtcaggggcactttgttggcctggaagtaattaagaggcttgtcctttgaacgaaagtgtgatcacttgggtttgaaacgcactcgcgggctcgcgtgaggaacgtgcagcctggcacgggttgcctctagattcctgcttccctcgctctcaccctcatgcctgctggtggtctttcacccagctccaccatgccagcgtggttttctccagtgtgtgaaggatagaaacgggctgatctatataatcttcagcttattttcctaaagaggatggaccgttgatccatatttagcttatgagagtgttgagaccgaggcagcggttgggaactgaggaactcctgctctgatcccatgagtggtgtgtgggtggtgacttgagcatggcagacatgctgtcagatgcacgcgctccaggtacacgccaccgtttcgctgttagaacacgcaggacaagatttcttcttggagttgttgagtgatccatttgaaaatgttctcaaagtattgctggtgtggtggccaaagatgtggtattttttattgtgttgactttggggtgataaagaaatgaaattgaaatgcagttagttttgagaatggtagttggcttttgcaaatttgttttcaggtgatcattataaaatccccccacctgcaccaatcacatccactgtgatgtggagaaagggctcatggcactgcactggggcaccgcgttggggtcacacctgccactcacggcccgccatgtccgtgttgcagaggaggagacccacccggtggacttgagctcgctctccagtaagctactcccaggcttcaccacgctgggcttcaaagacgagagaagaaacaaaggtaaatccatagtcccgtcccaggagccagccggagcagggaaggtggcaggggtttagtggagtgatggcaaatgctgctgattcgtacttcagagtttcctcactgtacctggattcatgttttcacatgggtaagattgagatcagttacagtgacaggaatgaaactcgtgttggatggggacacacacagcgggcaccttggttgcatcactggacttcaccttggtcagtgttttggggtccttgtgtttctgtccctgtcgcattacagaacatcccttcaggggtcagaatgtgtggcccctgggccttgggtctggcctgtgtgttctctccatctgcactgctgcctcctggctgcgctgctgctgggacctcctgcatggccccaccctccacttctccacctctgctgggtccctcccatgcagacagctgcatggacactgctcctgccggccctttctgcctcagccactcacaccatctgctaatgggacagctcactcttccctccaaaccatggccttggctcaagagcttccttgtttctggaatgttctttcctccagctccaggtgttgaaattctgcctggtctgggtctcctgttgaaggacgccctccactgggaaggatcctcttgccttcaccacttgtcttcaccagcccctgctcccctcttcctcttggggctgttgtggttgttgatactttttttttgttgtgtttgacacacatcttcttctcaccctctaacacagttctcaaccacagcacttttgtccctggagatgttggcagtgtccagaggcgtgttgatggtcccactggggttgggggtgctgctggcaccagatggtagggagatgccaggggtgctgctccacaccctatgggacactgcacagtacacctggcctgtgtcccccacagcgagagctggccctgggcaggcgtggtccctgcggtgtgtgttggttgggatcctccacagtgacagacggtgcgctctgcccacgtttccacacagctcttttgcttgtggagctcacccctttgcagagagctcatttccctgcggtctttggcctgcagaagtaaaatgaggggtggtgaattacacccctgctggttacacatggaaaactcaggagtgagaattttgtggagagcaagagaggtgagactggggtgctggctgccagccaggcggtccctcagcccctggagaagcggggtggggcctgcacaccgagtccttccagtgagtccagtgatgctctctcctcttcctcccagtcacctttctctccagtgccactactgcgctttcgatgcagaataattcagtatttggcgacttgaagtcggacgagatggagctgctctactcagcctacggagatgagacaggcgtgcagtgtgcgctgaggcaagtgtcggccccggggagcccttggctgctgtgcagcttgagctgtgccctggtgtgggacgtggagtcccacatgtgtgcgggtggggagagagccatcttgcagccgtccatatggcagcctgggtcttcccgttgctttcagtcatccacacaggtctgccacaggccagtcctgaaatctgggtaactcagtcagaaggtggtgatcagggcgtagcttgtgaaggggttgggggtgtgttgagcacactggatcgtattgaattgtgtttcctaagtgaccgtgctagctcaggctgcagtgacaaagcaccacagactggggtcttattcctgggggctggcatttgccatgaaggtgtgggcagggctggttcctcccgagccctctctcctgggcctgcaggtgccgtctttccgtcttttccctgtgccttcccggggccatcctgcgtgtgtctgtgtcctcggctctcctggagaccctaccgttctcaaggaccctggtcatattggatcagggccaccctaatggcctcatgtcactgcagttacctctaaaggccgttaaagtccccagctccaagtataatcacattccaaggcactggggtcgggatttcaacttacgaactctgagcgggagatacaattcaggccatggcaggctaaagtataatactaaaatcacaaatgtagcagcctgcttttccgtagaatgttgctgtgtgtattttttgttttctgtggcaaaataaaagtgggtcactcttgtaaaatttggcagtttttaatggagaaagcaacttaattttgctagcctttaagaaatggcatcttgacatatcaggtcttcattttattccaacaagaatgcagaatatgttttaaaaataaacaagaatccccttagtgcttcataaaataagtgaaaacctgaccctgatttttgtagcaaaaaatgaagtaaacgtggaaaatgaagaggaaattctagtaggagacgatggggtcataagtcagaaattaaagagttgtttgctccccaccctcccgccagccctcacctcacccctgctgtggggcctctgcccagcctgggccaaggccgtggctcccctggtgccatcctgtccgcagtcggctccctgtccacggcgtgtggctccttcaggacatcagtcacctgttgtccatgtggcacatcagtggactgtgcacaccccccgccttccccagctgtctgtccctagaacgcatcaggttccatgttgccgtgaagaaagatcattctgaccccgcctgccttgtggctgcaggggcaacactcagaagcacatctcctagggcctggcatgaggctacgtggtcccatgccagcctcagcgcacagacacccagatcctctgcccctgagtgctgcttccgtgcacgctgcgagtgccgagcttggcctgtcccgggctgtgggtgttttaacaaagacacggagtctccctgttgcctcctgtgaccgtggttcagcttctgaccagcagccatccttgttcctctctgtgaaggtctttggagtctggggagcccttctgaggcgcttgcttggtgctttgattctaagactatgcatttttgttcctggcctactttttagattgtattatattttattttttaagctgtttcatgtatatggccaagaatcaggatggtactaaaaggagtgccttggaagtgtcggcccacccctgccccacgcgcccattcctcaccggcaggcactgcccactggtgtgcttctgtccacacccacttgtgtttttaaacgcataacgagtggaaagataggagtattcttttacagatgataacatagcacacgtgtgtttctaggctgtgtgcatgtgtattcatgcttttctccctctccccactgagatctttttaacctttttgggtcatggaccactttgaaaatctaatgaaaactatcagccactccccacaaaatacccgctctgggagggtcacggggaccgaggagctgcgctggcacggcaggcttctgtgatcagggctgccgcgagggccaggcgacaagggctcctttcagcgtaccttctcccgcggcccctctagcctgcaggagtttgtgaaggatgctgggagctacagcaagaaagtggtggacgacctcctggaccagatcacaggcggagaccactctaggacgctcttccagctgaagcaggtgggctgcactcgcaccggggttggggggcaggtgcccttggggtgctgctggcgggaagagcctgcagcctgaccaggctttcggggacgaggagctgtcgcagggactctgctgccggctcctcgtcaggatctgcgtgcttctctgcacgggcaggtgtcccccggagaccgtgactgtgtgctcaccactcccagcgcactcgtaactctctatttccatcttcatctttcatctctgtcactttccttcatcctgaagagtttaaaaaaatatttcctgtagttcagatttactgacagtgatctctcagcattggcttctctgaaagtctttatttcatcttcatttttgaaattcattttccctgtgtatggaattttagatgaccttttttcccatctactgtaaaataggtttgacttgcattgttgctataaaaaagcatctgggccaagcatggtggctcacacttgtaatcccagcactttgggaggccgaggcgggcagatccaaggtcaggaggtcgagaccatcctggctaacacggtgaaaccccgtctctactaaaaaatagaaaaaattagctgggcgtggtggcaggtgcttgtagtcccagctactcgggaggctgaggcaggagaatggcatgaacccgggaggcagagcttgcagtgagccgagatcatgccactgcactccagcttgggccacagagccagaccccatctccaaaaaaaaaaaaaaagcgtctgaagtcattgtcatctttgtttcccacatgtgacgtgtcttttcggccagatctgacctgaagtctgcttttgtacagaccacaagccaggaatgtcttttacatctttaaaagggtgtttacagaaaagaaaaggaagaagaagatgcttcgggcagcgtgtggctcacagagcctcggctgctcactcccgggccctcggcaggacgggatctggccggtgctctaggagcttttgaacttttatctttctttatcagtgattttcagcattgtattttccaggtgccttggtgggcttttctttgtgttctacttagcatttgttgtttcttggatctgtctgtagttttcatcatatttggaagatttttagccattactcaaatgtcattttccaccactgcctcttcctcctcctgctggactgtggcactctgaggacagctcgtgttatctcacatggcaccgacactgtgctgccgcaccaggctgctgcagattagtttctgatgctgttggctaagttcactcacctgttctctggccacacctgaacctgttatcccagatcagttttcactgatgatgtcgtcccgcgctgctcatcacttgggctccatttgctgcttttgtgtatcttctctcatgttgtgtgtatgtttttccttacatccttgagccacgttcgtatttattgctgctgcttttgaagtcctcagtcactgagtctgtcgcctctgccgtttccggttctgtttctgtttgacactttgctgcacttggagctgtgggccattgtgcacgtgcctggtggacagtcctgaccctcgctgtctgataaaaaagcactggccacatggccgctgggaaatttgaatgtggccagtctgaatttagatgtgatgtgtgagctacaaactagatcttaaaaaactaatgcaaaaaacgtaaaaatatgagtaacgatttcttatggcccacatgttggaataaaaacatcttcaataaatttgtctaagtaaaatgcattagttaattgaatgttaagagtaattttaatgtggcagctagaattttaagagctgggtatggtggcatgcacctgtcatcagctccacaggaggctaaggtgggaggatcacttgaggccgggaggtcgaggctgcagtgcgattgcaccaccgcactctaggcaatagagcaagaccctgtctcaaaaaaaagataaaaaaacatttagaacgaggcgtgtgctcgcgttatgtctgctgggcaaggctgatctgggttctttctctctttcagagaatactgatgatcattttggcagttgttacttgtggataatggccggatcctaccaggcttgtctggggtgggtccagggcagccttattctagggttcgtgtagccttaatgctaaggagtggcccttcggggagccctgtcttttcagcgtggtctctgctgtgggtggagttcggatgagtctctgtccttcccaggctctgagaacgtttggctcatggctcccaaggaggggtcagtcccttgacctgacggtttcatctgtgcttgttacagatgaactggggtccacatgcctggtgcagtaaacccagacacccatgccgaggttttgtcatagaaaggacgtgtgtatttgcagggcgccaagcaaggtgggccaggaggctcatgtataaatcctggcctcccccactggctacaggcaaggcttgtaaagcgggggtagatctcaggaaagcagaactgaaaggcagagtcgtgcataaggacacagaggttacatgtcggcttggcctagaagggcggtatctgcaagcagggccttataggttataggtggattcaaaggttttctgatttgcagctggttaaggaggagaagctttgtttaaaaatttggggtgaagagaaaagaatgttagcttaggcttgtgggtgtggcttcctccaggcccgtcaggaagaaattcagaacaaagaacggggtcagagctcagtcttcagtttctccttatctgagcccttcatgccagtagattagtttgttggggaggtcctaggtggagggtccaggtttctgaaagacaactcagggatatacattaagatgttatctttactttctttctttttttttctttttgagacatagagtctcactctgtcacccaggctggagtgcagtggcgtgattgtggctcactgcaacctctgcctccctgattctagcgattctcctgcctcagcctcccgagtagctgggattacaggcatgcgccaccacacctggctaatttttgtatttttagtagaggcggagtttcgccatgttggccaggctggtctttaactcctgacctcaaatgatgcatccatctcagcctcccagagtggtaggatgttgtcttttctttctacagggaacagtgctgggaggttgtctttactttctacagggaacaaacatctgtctccaccttccttgactgttgttttaggatactgttaccttcttgcttatcaagtcgctgatttacttctcagagttatctaagtaactggaatttcccttgaaggaactcaagattttccttgatttccatgcttggagggctcgcaggcccctgaagagagggttgcagccaggcgggagtccccaagcagatttctgcagctctgaggagcagccccctctgcagagcctgccccaccagctcgtggttctgactctgagctctggtcaccctcccgtgtcgtggcctgcaggctccttccaggcaggaagctggcccccccaacacagcgttagaatcaggcattgctgtggggtagggaaagtgaccccctcacagcccggaaatgggaaggctctgtggtttcctctctgggttccagttagattcctttcgggaaagtgaacttggatatggagttgagtgaccccgagtgcacccccgcagtaaatgatgctcaggactaaagtgactgaaggcttttggggaaacagatgcgaacaaaacagcagtattcattttctaattaaaagcttgtgaaaatcgatgtcattgaatctgagaaacattatttcgaacaaagatcacacatgatagagtgcatatactacagcatcgctccaccggagcacaggacgggtgtgccacggaggccgacagttgtggaaggagacaatgcacggcccggcccacctgctgcaggcaccgccaggaggtgtctgcctccttcgctcctgcgcccacggcaggcccacctgccacaggcactgccaggaggtgtctgcctcctttgctcctgcacacacctgcccctgcaggactcgagctggtctcaggcaactggtcatattccaggtggaacccacgagacccttcttatcctaagcttcccataggatctaggcacatcttttttcttttgttttaagccacccaaggctgccgaaacagcatcggcgtcctctctctgtccgctccatctcgccctgtggagcgctgtccccggcacacaatcctggcgctgaggagggggctgggcgtggttgggtcagtgactggtgatgaagaaggtttggaggacccccagccttaatccattaagatggtgtgactggggagcagaattcgcagaagcgcacaagccatttttacgtgtgtgtaatgtcagcgaattgtccgtttctatgaaatcactctggaaaaactagtttctgtcctcatttacttttcagagaagaaatgttcccatgaagcctccagatgaagccaaggtaagtttttgaacatggaagggcaagccaaatattattctcacagggaaagttgtatccagcctttgaggtggggaggtctgtgtgtatgacggcgtttagaaatggagtccgtttctgatcagtaagatcaatagtgtttctcctcctcttttcatgacttgaggtgagtggtgtgaagccgcagtacattcttccaaatccagaaatgggtagtttcagagcagttggccccgctgggtgctgtccttgtgggacacccttgcaagggttgggcaggatgggccttctcaggacctgcttggtgagtagcaggtgttgtcccaagcacagtgggctctggggccagtgctggcagggcagtgctgtgagcccagactgctgcacctgccgattggcaggtgtgtgtctctgacagtcagcaggcatgggcttgggctttggtccagggtccctgggaacctggagagaccccttaacatctgtttgagggcagaggccgagctgcagggagctgatgagagagtatgtgttagggtggctgtagtctagccctgaggacacgccttgctgggaaaggaaagggaacgttgtgtgctctgtgaagtgcctgagaaatagtcctggaccctaaaattctgtgtgtcttcctgttgcataatgtccctccccaatttctttagccccaaaaagttaacaaaggattgttagtttgcgttgttggtctcagtaggtttttctttgacatggatttgcatatccattcatgagctccaacctgacagtcccttgaacagcagcctcagtgaacagggcttggtcttgtcacttactgaggggtgggttcacgtttagcaaataattagagtgatttcaatagcgagtgtgaagtaacatttcgtttttcgtttgatgtttgaattgctcttgatgtgtgtctgtctccacaggttggggacaccctaggagacagcagcagctctgttctggagttcatgtcgatgaagtcctatcccgacgtttctgtggatatctccatgctcagctctctgggtgagttgtaacaggcactttcccacagcacctggtgaaggtgtgatagaggaagaaaacacacggcctccacctcctctcccttcctgactagacagggatgccaggaaaatcttttgttacggtatttggtctttgtcccaggtttttggaccatagctcctaaaatccttggaatctcctgagtgttgtgtcttttttaagctaatgagaagtggttgcagcccctgggtaacctcaggatggggtctggccgatccccagtggctgtggatttcatcagtgttgcctaccgcctccatgaaatcccaaaaggtggggttccctagggagcctcattgctggacgcctggaggctctgggaagaaggcagccccttcccacgggtcccctctgcatcgctcccacctggggcccatccgtaccctgggtgacaccccgcagaataaatgggtaaatgtcagcctagtgtgtggacagaagagtcaaactctgcagggtatttagagaggtttcttctgagtgaaatacgaagaccgtggctgtgacacagtcccaggaggtcccaagaacatttgccgaggaggactggtctgcagcttgttttgatatgttttagggagacagaggacatcagtcagtacatgtcagttgtaacagtggttcgtgttggaaaggcgggacaacttgaagcgaggaatgtcgggtcgttggtggattcagagatttcctgattggcatttggttgaaagggttaagctctgaagagctgaagtcagaaagaaatgtgcatggttaacataagcagttgtagaagccaaggttcttgtcacatagatgaattcagccttcaggtagcaggcttcaaaaagagtagagtagatggcaaacatcactcatgaggccctcaaaggtaccagattgttagttaaatctctgttgggtcaggaagagacttggaaggggcaggagattctctacagaatgtagatttttcccacaagatacagctttgcagggctatttcaaaatatgtcaaagggatatattttgagataaaatactcagtttctttcagggcctgccatctatcacgtgatgctgtactaaagtcggatcggaatttggtgtcttattaccacggagtctgctttgtcaaccttcagatttctgttttaaagttaatgctggtcagctgtgcctgaattccaaaagaggggataatgaggcaagtccagtcccgcttcacatcatggcctgacctcattttccaggttgactttggagtgcccttggccaagagtgggaatccgttcagtccatggggcttagaattttatttttcatttacagatgtttccctgacttctgtgagtcactctaggaaattcatagagctcaagtctggtcttctgggaaccccatttgatagctggttagtcggaagcacagaccacagcctggggctttcagttggcatcagccggtggggccatcctggagactgtgccctcacctgggaggctgccggtgcagcgcccccgagctgttctgacctccagcagcatttgtggtgcctggatccatgggtcccactgctttgcgtggtgacgttccacctgtctctgctggctctgttcaggcacttatggccgtgatttattataggggaagggtgccaacagcagcagagggacaagagtgacatccaaggaaacccagcgtgaggcccagatccactcccagcagaggcacatgggacacgcttaattcccaggagtgagctgtgacaacacacgtgaaatgcccaccagggaagcccgtcagaggcttggtgctcggggtcacagggcacccccttgccaggcaggtaccaaagtccagaccccggagggaaggtgaactttagcataaaccactctgctcctgttgttggagctgtgaacaatccctagcactgggggggaccccagatgccagccgtggctggccttgccttccaggggaccctggccccaggccgctgtgacagcacttttctgcacagcagctgtttttctcagcacttctaagattttgtccttattactacttctcagcagcttggtgctgatgggctttggtgctgatgtgctgtggtgtgttagtctgtcctcacactgttataaagaaccacctgagactggtcattggtgaaggaaagaggtttaattgactcacagttcctcaggctgtttgggaggcatggctgggaggcatcaggaaacttccaatcatggcggaagatgaaggagaaacatgcatgtcttcacatggcggagcaggagagaacgcaaagggggaagtgctttgaaacaaccagatctcatgagaagtcactcactatcatgagaacagagaacagcaagggggaaatccatccccatgatccaatcaccttccaccaggaccctcccctaacattgggaattacaattcaacatgagatttgggcaggaatacagagccaaactgtatcattctgcccctgactcctctcgaatcttttgtccttttcacatttcaaaacacaatcatgccttcctaacagtcccctaaagtcttaactcattccagcattaactcagaagtccacagtccaaagtcttatctgagacaaggcaagttacttctgcctgtgagcctgtaaaatccaaaacaagttagttaattccaagatacaaatcgggtacagacattgggtaaatagacctatcccaagagggagaaatcagccaaaacaaaggggcagcaggctacaaatctgaaacccagcagggcagtcattacatcttgaggccccgaaagaatcttctttgattccttgtctcacatccaggctacactgatgcaagggatgggctcccacggccttgggcagccccgcccttgtggctctgcagggtacagcctctgtggctgctttccctggctggtgttgagtgcctgcagcttttccagatggcatggtgcaagctgtcggatctaccattctgaggtctggaggacggtggcccttttctcacagctccactaggcagtgccccagtgggtactctgtgtggggtgagggctccaacctcacatttcccctctgcactgccctagcagaggttctccatgaagggcctgcccctgcagcagacttctgcctggacaccctggcttttccatacatcctctgaaatctaggtggaggctgccaaacctcagctcttgccttctgcctacccacatacccaacaccatgtggaagcttccagggcttggggcttgcaccctctgaagcatcgacccttttagccctgtaccttggccccttttagccatggctgggacacagagcaccatggcacatgtcccagtgcttcacagagtagtggggcccttttccctcctagacccccaggcctgtgatggcagtgtctgggcaaaggtctttgaaatgtccctgaggtattaacatttggctcctctttacttacgcaaatgtctgcagccttcttgaattcctccccagaaaatgggtttttcttttctaccacatggcaggggtacaaattttccaaacttttactctctgcttcccttttaaatataagttccagtttcaggtcatttttctgtttgtgcaagtgagcataggcttttagaagcagccaagtcacctcttgaatgctttagtgcttagaaatttcttccaccaggtgccctaaatcatctctctcaagttcaaagttccacagatttctagagcagggtcacagtgctgtcagtctctcctaaagaatagcaagagtgacctttgcccccattcccaatggggtcctcgtctccatctgagaccacctcagcctggatttcactgtccatatcactatcagcatttgaatcatagccatgcaggaagtctctaggtagttccaaactttccctcatcttcctgtctttaagttctcccagctgttctagcctctgctcattacccagttctacagggcatgtctgtagtcactgttactacactttgtctactgattccctgatatcagctttgagtctctcctagtttggggctgtgttttcctgctccttcgtgtgtgttggaatcatttactggataccaggtggagtttgtagttgatgccgttgggtgataggtctgcttacacacctttgaggcctggcggcctttgttctgagtttgagaagtggcttagactctgtgggaccttccccaggcattgtcagggtaagcccagagtcaccccggggagggtgaagctggtcccctggctggtggggctcaggtgaccacagacctgtgtgcaggttcttggcatgtctggtgcacagttcaggagtgggctgggagctcatcctttccacctctcagctggacgtgctgggtccccgatggctgtggcctggaacctgctccacagtgaactgggcgggtaccagggtctgccggcctcttgcaccctccatccagctgtctggcctttgtgtgttgaggacaggagcccacaccaggcccatcctgggttgtggccacatccctccacggtgtctgtgcgtgccatgacgtggtctgtgcggtgctaggtcttgtctgatgctttgcttgagcaaaggacgctgggtgtctgccttcccttcactcactgctaagggtaatgtctgtcctccaggcctgtccacctgtctgctgtgagctcgtccactcagtttccagagcaattattgtcctgagcagagaggcctgtctggatgggcagtgtgctcctgcccttagggtagacgggccggctgagctcagccgacgtggggtcatgtcctgtttacacagggaaggtgaagaaggagctggaccctgacgacagccatttgaacttggatgagacgacgaagctcctgcaggacctgcacgaagcacaggcggagcgcggcggctctcggccgtcgtccaacctcagctccctgtccaacgcctccgagagggaccagcaccacctgggtgagatgcccccacccacgccgcatccccagagaccccagcacagtcagtgtgacgtctagacgaggtagtgggcagcattgtagttgtgggaaggctggaggctgcatgggcagcggtgctgttgtggaggtcggtttccacagatgtccttgggtcgcggcctcggtgcagagccggagcggagctgggatgctggcctggccgcacgctgggttacaggctttctgccagataccgtccccagttctgtccacccctgtgccctctgtggaccctggttccagtgtttctgctggggagagagcatggcttccttggccatgtgtcctggagtggttttggtgggtggggttttgttcccacttgtaaacactggatcactctgtcggcagagtgaatcttggcagttcttcagctgcagaggtttagctgcaaccatctgcaaaaaggccggtattttcgattccattgaccttgtgatcagggtgttaacagtgcatggagcaggctttggagggccgtaggtcaaagtctgaggcccccgatatcccagtatgactttgggaactgccctgaggtctgggctgtgtctgagggactcctggccaaggagcgttctctccttcagaagcagcatccgtgctgtgtgctgggtcagggcgacccctggctccagggtctctacacacagctctccttggcagggagtgagaggtgcccctgtgtcctgggagtccctgagccctggcggtaggtcaggaagcagaccttgggctccaggagccccacgtgtgctgcgggtctgtcctgtgtgttgaagtcctgtgttctgaaaattgcaggaagcccttctcgcctgagtgtcggggagcagccagacgtcacccacgacccctatgagtttcttcagtctccagagcctgcggcctctgccaagacctaactctagaccaccttcagctcttttattttatttttttagttttattttgcacgtgtagagtttttgtcatcagacaaggactttgatcctgtcccctttggcatgcgggaagcagccgcggggaggtaatgaattgtctgtggtatcatgtcagcagagtctccaagccccacgaaccctgaggagtggagtcatacgcgaaggccatatggccatcgtgtcagcagagagagtctctgtacacagccccgtgaaccctgaggagtggagtcatacacgaagggcgtgtggccatcgtgtcagcagagagagtctctgtacacagccccgtgaaccctgaggagtggagtcatacgcgaagggtgtgtggccaggctgcagagctgcgtgccgtttgtgtccgagcatcacgtgtggctccagcccttgtttctgccagtgtagacacctctgtctgccccactgtcctggggtcgctcttgggaggcacaggcatgggtgtgtctggcctcattctgtatcagtccagtgtgttcctgtcatagtttgtgtctcccaggcaggccatggtaggggcctcgcaggggccattggggagcacagggccaggctggggtgaggagagctcccctgttttctgtttaattgatgagcctgggaaaggagtgtgttctgcctgcccgttacagtggagcgttccgtgtccataaaacgttttctaactgggtgtttactgagtgcccatttatgttagtatttgcaaaataccataaacacagcttccagtcacaagacacagagcgccaaagtgcacccaactgctcccagcacgcgagggtgctgtgtcctaccagctggtggtggtcctctggcccagctgtcgtgcccacagtgacatcaggtgcacctgtgcgcccaccagcacctcctgcagggtgccctgctctgtgaccatggaaacttgaaagtgaagaagccacaccttccagaggccaggcatggatgggagctcagtcgtcctgggggcagcggcatttgtgactctgaagaggccccgggggcagtatgcagtgcctgggccctcacaccacgggaccacagggctgaccctcgcaggccattgacgctgggtgagcagggtggccggtgctctgtgtggcatgggtgagcattctcaggtccttcctgggccctggtggaagtgggagcaaagccattgcctctggacagagcatgaagaagccacagtagctgactcacaggaagagtttgtgaacagggctcagacgaggggcagagcctgggctgcaccctccgtgctggctgggaagcagactccacgcttgtctgcacagctgcacctgccatcctgtccctggatgccaccaagtgcaccgttccagtggctgcctgcaggctctgctccccacccccaactctgggaggacgcccttgctgcagggaggctgggaaaggcagcatctgcagtcccaagctcagtggggctgtgtaccgcacccagcttccactggggctccagaggccaggattcccttaacaggacagacacttcccacagccgggtccccagggtacagccttggagagcttgggctcaggaacaacgtggctcctgacagcaggttgctgtggagtcaggtgtcctcccaccatccgatctctgaacacctcgctccacatccactgtgagtggaggagccctcgccacatgctggggccccgtcttaaactttgcagccccaggaccatgagccaaataagcctcgtgtctttcaggttacccagtctcaggcattcttttacagcagcacaaagcagcctgcatcgagatgacacagctgtgccctcatggtgcggcaggcgtgggcggccgtccctctgggctcgtagcgctctgaagcagtttctgggtggaggtcaggtgcagcccacaggcagtgctgagctgcgggaggcagccaccctgcccggcttcctggtggcctggcccttgttcctgcacccctcactccccgaggtccccgagactggctatccctctgggcggcattgttggtccacagggtcccagcagagaggggcactgggcagcagccaccacgtggcttcagtcttagtgagtgtgcaatgaggggacatcttgaagaggcctatgggtgacctacaggccgagaggctcccctcgggtcaggagatgggagtgggctggagagtccagggctcctcccgctgccccttgggctgcgcagatacggggccaccctggtcagctgatcctgcaggacttagagggccctagtggtggctggagctgtccaggtaggtcatgcgtggcctccccgggattccggcagcctctgctcttgctagcagcccgtgagcccctccaccctcttttgtgggtacaccacctttgggtgtccccaagcccgcatgccagggcacagagcagccacggtggagggagcaggggctggggccttccctgagctcagcttctctctggtccctggatgcttcctttgtggtcacacagtgactgctgctgtggcagccatctcacgttgaggccagaggaggggcagaggggaacaggctgccacgcctgtgtctgacaggacacaagagctttccagggaggccccacagacatggccgtgtctcagcctggggagcggctgggtgtgcagctccagctctccctgtgcaggcagggaacagctaccggtaccccctaccctgctccccgcttgatgtgggcagaacctgggtaggggagggggagatagctgggagcagagggcggcagtgacagggaccacttgcagattgtggggcgtgagggccagcagctgtgcatcgccggccagggccctgcaagcctgtgcttgtctgagccaggaagcaggagggtggtgggacctgctgtgtgggaggtggcatcctctgggcttggcttgggccacacttccaacctctgtccagcccctcccaccctttggtggttctggggcctgcagaatccaagatccgctcaccccgtggtgccctcagggctttgttgcaggtggggaaactgaggcagatgcccagtcgcccagaactaccctaggtcctctgagtgtggctgagcctcccccaccatctgttaaccttgggcacttgtcaacttttaggtgcctgacccctccccgagctcacagcttcctgttctgaattgggaggcagaggaggggcaaaggggtctcctccaagacctcagtctggatagggagtgcgtgcatgggctgcaggtgtgggggtgtgcaggttcggatggggtgcaggtgtgggggtgtgcaggttcggatggggtgcaggtgtgtgtgcaggtgtgtatggggtgcgggtgtgggggtgtgcaggtgtgtatgggggtgaagctatggggtctatgcaggtgcgtatgaaggtgcatgtatgggggtgtgcagatgtgtatgaggtacaggtattgggtgtgtgagtgtgtatggggtgcaggtgggtgtgtgggtgtgcgagtgcatgatgtgtttggtgtgaggggtcggggtgtgggtgtgctgtggtttttgtctccaccaaaatttaagcgtcataaccgaatggccagtgtgatggtgttaggagtggtgaggccgtgaaggggatgaaggtccttgcagaccaggcctcagtcagcagagacctctcaccctcccagcgcctccacgtgagaacacagtgtctgtcccctccgtaggatgcagcagaaaggtaccaccttggaagctgagcgcccccctcgccagacaccagacctgctggctcctgaatcttggacttccagcctccagaatggggagaaataagtttctgttctttaaaattactccgtctcaggtattttgttacagcagcacatggggactgagactgggtgtgcaggtggtggaggagggtgtgcaggtgtgtttgagggtgtttgcctcaatctttagacagcatcagggccacaatacctgcaggtgtcaggacgttaactgcagacattggtgaataaaagccagttgtcctgagtttggcaagaaaacctttggaagaggcctcacaagccactccaggctacaagacggggcgtttgtcctgggggacctgccgtcacccttagtggtccagcagcaccgtctcagcctctctggccagagcagctgccccgcaggggcccccgagtcctggagagctctgtcaggtaggcttccctgccccttccccccatgtcgtcctgggcacccgccccagcccagctgttcctcttacttgtgtacctcgtgtgtgcccctgacagacaagatgtccatgggcagcagacctctggccactgcaggctccaggcaccagagtgagacccagcaggcttcagccggcaagagggcccctgactgtggacgactccctcacggtggtggtcttggagggacccctgctaacagaaagggtgcatccctgtccagcttcccgtcctcacccccaaagtcagcgtcagcagctggcccgcatcggaggcattcagataggagtccttggggaccccccccaaccgacacgaactggaaatgccttgagtactgagggaggagggctgcagggacaggagggaggatgtccttaaacacacttgctggcccttctcaggagaaacccttccttgtcatgggtcgtggtgaagctgtgctccgagttaagccagtgaccgaattcctgagctcagaggatggccagtgaaacaacttgctaaaatgctgagactccctgcactcgcgagactacgaaaacacgtgctgaagtcagtgagagccacggtggccaaagtctttgctcagaaccagctgcgcaggtccctcccccggttcctcctaggctgagtactctggggtcgcagtcttcctggacgtcgcctgttggttgttgtaggggttttaggtgtttttttttagggttgtcttgctgcattttgttgcggaccacaacgcgttgcaatcctagtcagctcaggggcttttcaggtatttgacttaagagctgagtagctgggcaggctgataagaacagacaaagcgagctcttttgcaggctagtaaactttcatcttagactactttggttcaggtgagggcggctaagcaggtgggaaggcagggagggggaggccgacaagcaggcattggggcccatccaagcaggggcctagtacgtcctgtttttttgtagtttgctgacctaaaccggatcaagccaccttgtcttggaaatggaccactgcatgcattatttcacctccacccgagtccatctcacgctttcctccctcctcatgcccccttgtcccctcatcctcccaactgccatggctttgtgaggcgccctgggttccatggctaccgtgtcgaccagggcagcccacccacttctcactttggtctggagttagcgagagcgacgctgcttttctcttgctcttcagcctggacctgtgatgtgataggcgtgagaaggaactgtgggttctggcggtaaggaaagtggggccttactttcccatgttcccaaaaggcagatgcaatccctgcactcctgaaggagtcaagcagtaaaggcaacacagcaagactgtccgggactcaggctgtgaggatttgtcttatgaggggcctcagaaaaggccgtttccactgtggggagtagaggaatggaaggtttcaccagggtggggtggcttccagagggtccccatggaaaaagcgtggctgagcaggcccagagggggacgaggacacgtttggggggctggaggagagtgaggatatgctcaggggtgccagagtgtcataagggcagggacggtgaggacagactcagggaccacagtgtcataaaggaaggacagggatgaagaggacagacctgtgggaccatggtgtcataaagacaggatggggacttggaccaggatagattcagggaccacggtgtcataaagacaggacggggacctggacagacttgggggaccacggtgtcataaagacaggatggggaccaggacagactctaggggcctggtgtcataaagacagggttgggacctggacagactctaggggcctggtgtcataaagacaggatggggaccaggacagactctggggatctggtgtcataaagacagggatgggaccaggacagactctgggggcctggtgtcataaagacaggcctgggacaggaccgggacagacccgggggaccacggtgtcataaagataggacggggaccaggacagactctaggggcctggtgtcataaagacatgacagggacctggacagactcaggggaccacggtgtcataaagacaggcctgggacaggaccgggacagacccgggggaccacggtgtcataaagataggacggggaccaggacagactctaggggcctggtgtcataaagacaggacagggacctggacagactcaggggaccacggtgtcataaagacaggacggggaccaggacagactctgggggcctggtgtcataaagacaggatggggacctggacagactcaggggaccacggtgtcataaagacaggatggggaccgggacagactcgggggaccacggtgtcataaagacaggacggggaccgagacagactcaggggaccatggtgtcataaagacagggatgggacctggacagactctaggggcctggtgtcataaagacagggatgggaccgggacagactctgggggcctggtgtcgtaaagacaggatggggaccaggacagactcgggggaccacggagtcataaagataggacggggaccaggacagactctaggggcctggtgtcataaagacagggatgggaccgggacagactctgggggcctggtgtcatatacacagatggaaacaggaaagactgaggaggtcatggcatcttaaagacctgatagggtgggatgggcacctgtggtctctggggtctgtggcaggggctggttctcatgtgtggtggtgcagagaaggatggagtcccagtctgagaagggggctgtctccacatccacagatgggggcagacaggaggcgcctggggtccaccacacaggattgcgctgcaggccccggtgctgggcagccagttccccgggcatcggtccggttgtcataacacaggggggcccatccagccttagtcgtgctaaggggacctgaacccaacattacaagtcttcagtgtcatgactcacagatgctcctttcacttgaattgtgtgtgggagtgtgtgtgcattgtgtggtgtgtgtgggagtgtgagcattgtgtgttgtgtgtggtattctgtgggggttgtatgtgtgcggtatgtggtgtgtgtggtttgtgtgctgtgtgtggtatgcggtgtgtagtgcaaatgggtgtgctcggtggtgtgtggtttggtgtgtgtgtggtgtgtggtttggtgtatgtgtggtattttgggggtgtggtatgtgtgcagtatgtggtgtgatgtttggtgtgtgtggtgtgcagtgtgtagtgcaagtgtgtgtgctctgtgtgtggtttgtgtggtgtgctgtgtgtggtgtgtattctgtgtgcgtgatgtgtattgtgtgtattgtgtggtccctgtgtggtatggggagagtgatgcgtttgtggttggtgtctggtacttgtcacgtggtgcacgtgcagtgtgtggtgtgtttggtgtgtgtgttttgcttctgttgcatatgtgtggcgtgaggtgtgtgcgtgtggtttgtgtggtgtgtggtgcatgtgtggtgtgcatggagttgtgtggtgtgtgatctgttttgtgtattgtgtggtgtgtgggtggtgtgtgttgtggattgtgtggtctcgtgtgtttcgtgtggtgtggtgtgtaatctgtatgatgtgtgttgtgtggtttctgttttgtggtttgtgttgtgtgtctgtggtatgtgttgtgggtggtctgtgttgtatgatatatgtggtatgtattgtgtggtgtgtggcgtgtggtgtatggtgtgtgtggtgtcttgtgtgtgtgttgtgttttgtgtgttgtggtttctgtttggtgtgtgttgtgtgttttatgtggtatgcggtgtgtggtcagtgtggtctgtgttgtgtggtgtgtggtgtgtgtggtacgtggtctgtgtggtatatggtgtgtgatgtggattgtgtggtgtggtatatgaacgtgcttacaggccacggtggtatcgaggctgagcgtgggcctgaggggaaggagctgtcctggagtcttctctggctgatgtgacgtccgtgtcccctgctcgctgtcctccatggggtccatgccccttgcttgctgtcctccgcggggtctgtgcccctcgctcactgtctgtcctctgtggggtctgtccccccggctcgctgtcctcggtggggtctatccccactgctcactgtcctctgtggggtctgtgcccctcgctcgctgtctgtcctctgtggggtctgtgccccccggctcactgtcctctgtggggtctgtccccactgctcactgtcctctgtggtgtctgtaaccctcgctcgctgtcctctgtggggtctgtccccgctgctcactgtcctctgtggggtctgtccccccggctcactgtcctccgtggggtctgtccccccggctggctgtcctctgtggggtctgtgccccccagctcactgtcctcggtggggtctgtccccgctgctcactgtcctctgtgcggtctgtccccccggcttgctgtcctccatggggtctgtcttgccggctcgctgtcctctgtggggtctgtgaccccagcttgctgtcctctgtggggtctgtccccgctgctcactgtcctctgtggggtctgtgccccctggctcgctgtcctctatggggtctgtgccccctggctcgctgtcctctgtggggtctgtctccccggctctctgtcctctgtggggtctgtgccccctgactcgctgtcctctgtggggtctgtgccccctggctcgctgtcctctgtgggatctgtctccctggctcgctgtcctccatggtgtctctccccccggctcgctgtcctctgtggggtctgtccccgctgctcactgttctccatggggtctgtctccccggctctctgttctctgtagggtctgtgtcccccggctcgctgtcctccatggggtctgtccccgcggctcgctgtcctccgtggggtctgtccccgcggctcgctgtcctctgtggggtctgtccccctggcttgctgtcctctgtgggttctgtccccctggctcactgtcctctgtggggtctgtccccctggctcgctgtcctccgtggggtctgtgccccccggctcactgtccttggtggggtctatccccactgctcactgtcctctgggcagtctgaccccctggcttgctatcctccatggggtctgtccccccggctcgctgtcctctgtgtggtctgtgccccccggctcgctgtcctctgtggggtctgtccccgctcctcactgtcctccgtggggtctgtgccctccggctcgctgtcctcggtggggtctgtcccggctgctcactgtcctctgtgcggtctgtccccccggcttgctgtcctccatgggatctgtgcccccagctcactgtcctctgtggggtctgtgaccctggctcgctgtcctctgtggggtctgtgccactcgctcgctgtcctctgtgggatctgtgacccctggctcactgttctctgtgggatctgtctccccggctcgctgtcctccatggtgtctctccccccggctcgctgtcctctgtggggtctgtcccagctgctcactgtcctccgtggggtctgtctccccggctctctgtcctctgtagggtctgtgccccccggctcactgtcctccgtggggtctgtctccctggctctctgtcctacatgggttctgtccccacggctcgctgtcctctgtgggttctgtccccctggcttgctgtcctccgtggggtctgtggcccctggctcactgtccttggtggggtctatccacactgctcaatgtcctctgggcagtctgaccccctggcttgctatcctccatggggtctgtccccccggctcgctgtcctctgtgtggtctgtgccccccggctcgctgtcctctgtggggtctgtccccgctcctcactgtcctccgtggggtctgtgccccccggctcgctgtcctcggtggggtctgtcccggctgctcactgtcctctgtgcggtctgtccccctggcttgctgtcctccatgggatctgtgcccccagctcactgtcctctgtggggtctgtccccctggcttgctgtcctctgtggggtctgtccccctggcttgctgtcctctgtggggtctgtccccctggcttgctgtcctctgtggggtctgtccccgctgctcactgtcctctgtggggtctgtgcccccagctggctgtcctcggtggggtctgtccccgctgctcactgtcctctgtgcggtctgtccccccggcttgctgtcctccatgggatctgtctccccagctcactgtcctctgtggggtctgtctccctggctcactgtcctacatggggtctgtccccgtggctcgctgtcctctgtggggtctgtccccctggcttgctgtcctctgtggggtctgtccccgtggcttgctgtccactgtggggtctgtcccccgggcttgctgtcctctgtggggtctgtccccgctgctcactgtcctctgtgggatctgtctccccagctcgctgtcctctgtggggtctgtgctcctcgctcgctgtcctctgtggggtctgtgccccctggctcactgtcctctgtggggtctgtccccgctgctcactgtcctctgtggggtctgtccccctggctcgctgtcctccgtggggtctgtacccccgactcgctgtcctctgcggggtctgtgcccgactcgctgtcctcggtggggtctatccctgctgctcactgtcctctgtggggtctgtgcccgctgctcactgtcctccgtggggtccgtgccccccggctcgctgtcctctgtggagtctctgccccctggctcgctgtcctctgtggggtctgtctccctggctcgctgtcctccgtggggtctgtccccgctgctaattgtcctccgtggggcctgtgtcccctggctcgctgtcctccatggggtctgtccacctggctcgctgtcctccgtggggtctgtgcccgctgctcgctgtcctccatggggtctgtccccctggctcgctgtcctccgtggggtctttccctgctgcttgctgtcctgcgtggggtctgtcccctcggctcgctgtcctccgcggggtctgtccccgctgctcactgtcctccgtggggtctgtccccgctgctcgctgtcctccgtgtggtctgtacccccggctcgctgtcctccgtggggtctgtccccgctgcttgctgtcctccgtggggtctcttcccccggctcgctgtcctccatggggtctgtcccccggtttgctgtcctctgtggggtctgtccccgctgctcgctgtcctccgtgtggtctgtccccccggctcgctgtcctccgtggggtctgtcccccttgctcactgtcctctgtggagtctgtacctccagcttactgtcctccgtggcgtctgtccccgctgctcattgtcctccgtggggtctgtccccctggctcactgtcctctgtggagtctgtccccgctgctcgttgtcctctgtggggtctgtctccctggcttgctcacattttctctaatttggatgtattactttttccaatcatcctttccagctcttggtgcacagtttcgacctgaagtcttcagtcttctcaaagttcttcagtgttttcttttttctctcacagactctccacctttctgttctgaaatcctgacagatgaacgtgttgtctccaggctcaaggctcaaggccgctgagcgattcccctcttctcctctctaagatctgtggtccttcctggatttgatattccaggttttaccaatgtgacttggcgacatcatttctgtttgttggcactttcatttgggttttgtttttaactgggaattgtgtttttaatgtacagggttgtctttctgtgtttctatttccttccttggtaactttgacttttctttctttcttttttttttttttgagatggagtctccctctgttgcccaggctggaatgcagtggtgcaatcttggctcactgcagcctcgacctcccaggttcaaacgattctcatgcctcagcctcccgagtagctgggattagaggcatgtgccaccatgccctgctaatctttgtatttttagtagagacagggtttcgccgtgttgcccaggctggtctggaactcctgacctcaggtgataggcacgcctcggcttcccacagtgctgggattacaggcgtgagcccccgcgcccggccaaagaaccatggtcctgtttcataactgtgagtctctcgggtctcccagagacattcttgtgtgactcaagccccagggtcctgtggccccgcatccgcctggtgtcacatttagaggaccagggaggagccaccaaaggcagcgcagagccactgtatcatggacgttcacgactgcaagaacgaagaattgttaactatttctcaatgtctctcttctcaaagaaatacatttaatatcaacttcattttctgaaggttttttcccaaagagacaacaaggactttgagcgaggcataacgtggcgaagcttcctaaccctcctctgtagagaccgcccagcccctcaagatcaaccccccaccccgtagcggccgttgagtgtctttcactgccgctctgtgacaccacgtccctcccacccctgccgccctccccacctgactggccaggagcagccgcagcgtgttcagaacctcccagccactgtccacccgggcggagaccccagccccgcgtggctggacgggcttccctgtcctgtggaaggggagacacacaggaccctgtgaagtgagctctcgggtcctgctcctctgggaagctcagagaagcctctcagggaggatctggcaggtttcagtgttgcaccagtgagtaacggctcacgagctcttcaggcattgcctcagtttctcacaggcgcagccctctgctcagtgtggcctctttctgacgtgggttttcttcttgcacctggggagtcctgggtgggcctgtgtattcgtgaacgggttgtgggacctgtcgctgtgtgggggctgtcgagcactccccagaacgtaacaaatcctcaggggaactgatgggcggtcgcgcgggcactgggtcctccacaccctggagagccgttttccgttgccactcggctctggccggggtcacattctgcagcatgtctgttcattcccctgggcggggccctgcaccgactccagcccagcccctgctccctctgcggggaacgtggccccaggcagtgctgggccattggctgtcagtgctggtcctggcggctgcattcccagtccccttggtctctgtgacagtgggcggggccggccctcccaggatctgacggcgcaggtcctccccttctgtgtcctgcagatggacacccgctccgggagccagtgttccgtcaccccagaagccatactcaataatgaaaagctggtcttgccgccccgcatctccagagtgaacggctggtcgttacccctgcactacttccaggtggtgacctgggctgtcttcgtgggcctttcctcggccaccttcgggatcttcattcccttcctgcctcacgcgtggaaatacattgcctacgtggtatccttttcatcgtggcatggtctaagcgggaggggttcctggaggaacttgcgatggacctggctgtggggtctgggccatggctgc

SEQ ID NO: 1145 - DNA, 9709 bp, Homo sapiens
gcggcgagggaaagtagtccggcgacgggagcgagcgcgcgcgcgcccggcggcaaacccaattcctgtgcagggtggggacgagagattcgcgggcccgtaggtgtggagcggggcgcggagggatccgtgggagccgcagtgcggcggcgcgcgggccgggtggggcggggccgagcgaggcggggcgcgcgcggcggccgttgagggaccgttggggcgggaggcggcggcggcggcggcgcgcgctgcgggcagtgagtgtggaggcgcggacgcgcggcggagctggaactgctgcagctgctgccgccgccggaggaaccttgatccccgtgctccggacaccccgggcctcgccatggtgagtgaggctggggggtcgccgaggctgcgggctctgaggcgggcttaacggggcaggacccctgagggggcgacagagcccagagtggggggcgtccgggcccggcgagagcctcgggacccttttctacccgcgttgtcgggggctgttgaacccagagcgggacgtctggatcaccagaggtttccagaagcgactttagcaccaaatgggatgtttaagtccacaaatgggtatctgagcccctaaaggggacatttgaaccccggatggaggatcgggaccctcagtgggacccctcaaaaggattttggacccaggatggggcgttgggtttcaggatggaggtgtttggaccccaggggacgaaataagaaagatgggctggggaggggagctattcgggccctgatgaaggcgtttggtcctgagaggatgcggggaacgggggacgaagggaggctgggctgctcctggatggggtggtggagggtagctgggcccgggcggggaggggcgacccctgggctcctgtggagcagaggagagggtcaaggatgggcggtcacttctacagatgagactcccgagggtgggggagggtgggggagggtggtctccagagcccagcactgcagaggaggaggagggtgaggtgcaagcttatgggaggaagagcctggggtgggtggcagcggagattagaagatactcttgaaggcttccgggacggagaaggatcagggtcgtggaggtggtgaaaagggatggtgagagtggggctcgccagtagtcgggggacagggacccttggggttaatttggaagtagctagaaaaggttccgaggttactagtgggttaagactgttgctctagaaagacagaatttttttaacggggtgggagtgttgtgtttgggtccaagagaagatggatttccaaggtgaggggtgggggaggacttgggcttgggtggttgggaggtgaggtggaaggagaaaatgaatggcagtcaggggggcctaggtttgggggtggatgtgggtagcaccctgccagtctccagggacaggccaggacaaagacggctcagtgtggatggggagtgggctgcagggcccggaggaagcttttctaccgtcctccttcctcaggaagaacgcggctgggtggaagacaccggggcagtgggagcaggtgggcggagctgttcgggcccctattgcgcactgaagcctcatgaaatggggatgggagatcaaagtttggggtgcctcgaatgagccagctttttcaagcctagaagcctcactctgtcgctgcccttttcaggccaagagcactgccttttcccagcaggagcgccggttttctcatgatccccagccccacgcaccatgctgcacctcgtcacttgtgccaaatgacagtgcagtacagtgtggcgtcagtgacaatcagatgcctattcccgtgccctcggggtgggggctgcagagcttgatcagagagtgcctctggggagaccccttgatcggcctgagggccacttgttccattcagggccctcgctgagcgtgtctgttaattcacagggctttgagagaaaaccagcagactagttctttcctactccctgccacccacaacacccacagccccaccaggctgagcctgggaaccgtgtgcagccatcctccctggcaaggctggggagaacaggcagccgctgctgtgtatcagatctcatacttgctgacacagacctgatggctcctcttgccgctaccccattttcccccagcagaacctggctaaaaggggccctgaagcactagcaggccccctacctccagaataggacccaagctttggccacaactagtttctctttctgtttgtaatcagcaaggtagaggtgggacaagtcactggtaactggccttggactttggcctgagctctgtggctcctccttggcccgggtgaggggccctggccttggtttctgatctcatctaacactgctctctggcattggctgggggctggggcaaggcagagaaatcacaccctcttccctcccccacctcatggttttttttcttgtccagccccttgctggagcctaagatgagggataaggaagcaggagaccagctgagttattttggaaacagtttttgttgaaagtttagtcttcaggtctagaaagggaagaaaccttgagcaaggatcaatgatatcttcttaggcggtcggttttctgggcggcaaccttgcttgagatctgtacctttccttgaccaagcagggaagtgggtctccaacatgggagggagagcatctgacaggccctccatgcagagccacgcctatttgcagcaaccctgtgacagaactgaacatggcagtgcctcatctgcatcttccagtcttttggtggagactggcaaacggtggccttcagagccgctcggggcagtctgcagcctgtcacagcctcctcgcccccacccccagccccttacagtgctgcccaaaggtccggggagctggacttcttgcagggcggaacagtgggctgggaaggccctgacctggctcgctttttccattctaggccaggggaaagaatgaaaagcagatgggatggcagccacctccccacactgctgccctcctctctgttctttccctgaccctccctgggcattgcctggtctcggtaaccagaagcccatcctcccttctcactttccctaagcctcttcctcaggtgtcaggacctaagggatggctccaggcttttttgtccatggtgggaggtggggggcaggtggatcaagaggctcatgggcctggggctaccaggttggcatttagaagcccaaccaccctgtcttttttgaaggcaatgcagaagaatcttcatttggcctccccacctcccctttacactttggacttttccagaatgtgcatgtgtgccgttttctcccttcctctttccccctccctaagccctctcccctctgtgatcatcattttgattacccctcccattctgcctatttggggcttgcaagttcttcttccgttaggttttttttttttttttctaacttttttagatcagtgattgttaatatttgggacggggatgggggtaggggaggcaggcagtggtttgttcctagcttctggaacctctccgtagaatactgcaaattcacataatagtctgcttctatttctgaggctctcagactcgagactagaacatgctatagacttggagcccctttccctgattgtgaaaggaaggggaacagacccaccatggtcccgggatggtggtgccttcttcacagcatcaacaaaaaccagggaaaatgtgtcttttggctgctaaagctaaatgttgggattcagcctccccaaccccccagccccgctcctgccccataggatcactatgcctggctgatgcccagcacaccagtgcaggagaagccagtccccgcatctcctccccacccccaaaccccgcatgcagcaagggctgcctgccacccactggccagtccccagagtgcccaagctggaaagggttaaaaactgcagtgcaagccagcttcagtcctctgctgctgcccgctgcagccctctccctgacgtttgtcccttctgcccaaaagaaacaaaacagaatggccctgtgccctcactgtgcgcagggggtggagcgcctgcctccagcctgaccagagttctttaggtgcttgagcaactcgggccgccggttaggagaatttttgccacttgggtggactctgcctgagccaaccgcctccaaataggtgacacagaaactagcagagatagccccagacatcgtccctctgccctacccaaggactggcctgcttcagtttggagccttctagagcttcttgatgaggcctccagggcaatcgttcccttcactcggcctctggggctctcactgatgagatgcaaacctgtgccaggcctcaccagcgctgctggtttggggctggggcaggcttttctcccgcccctgtggctcccacatgctgagttgagattggaagcccgtgggtctgggcagcttcatcgggccgtgcgtccagcaggcctgagtgtccagcccaccctggtacccagctttctgaatcaccagactttatcatcaggcgctggctctgcctcagaccctgactctggcatgctcctccctggcccggcgggaatggcacgtggagctggcctcactggggccgagggtctgggctgagtgaggaagatgcgtccgtgctgtccggcctggtgactgactttccccttcatgcttttacaggctgaccagctgactgaggagcagattgcaggtgagtctgctatccccctcatcttagctcaggaaagcctccacatccccagccaaatcttagccactgaggagtgacatctgatgggtgaacctgtgtatcccttgtgtcacctaacactatgccttgtgcctagaatgctgataaatgtgtgtaagagcacaccagtgccccaatgacacgaagccccatggccctgagacaggcctttaccagacaccaaaggctgtgttcctctcctgggcctgggtcatctaggggcttgatatcagtggctgcaggacgagcccaactctctctcccagcttcagccaggttggcttagaaggtgagctccctgcctccctgtggggcctgcagagctcctgtcccactttaggagccgcccaggagctggctcgtcactcccacctctgcgcttgcctgcgctttgcacttcctttcgcatgtgcctgcgcctgcctgttctgctggcggaagtgcctccccagtgctttgcatgggcagctccttcccgtcccttagctcagatgtcccctcggggaggccttccctgacccccatctcaagtacacagccttcctttactctccttcacatcactttattttcttcataacctttctcgctgtctgaaattattttcttatgtcttcacctgttgtatctcctgttactagatgtgagttccattgagtttgggacttggttttgttggtccctgctatagccttaatgcctgcctagaacgtagtaggtcctccgcaaacttttgctggctaaacaaacatctctctctcagcaagctagaagaaatccctggatcccatctaattcatttttctaacccctccaaaaccccagaagggtcagctacaggaactattgtgtaattacagatccgtgcctgcctacccgcccatactgagctgcccgaggacagagagcaactcttggtttatctccatagccaggggccagcacacagtagaccagagtagcgatccagagaatgggcctctgctccccaccagctacccagcccccagctctgctgtcaggttcaaccggctgtgtaacaagtactaaaggcccagcttctgcggtgggaggcaggaacggacttgccttctctcctttctcccctcaacccgcatcacagagtcacctttgcagcttcaaaattttggccctgggtggctatggagacccctgaggaaagccagaagatggcctggtttagtgatcatgagctcggggtgccccatgacccactcactacctgccctccccaagaacaacaaggcctcagcacagggaggtgccagcctccccaaagagactcttgccatgtccccagggcccagaggctcagggccacagcttcccagctgtgcatgtccctcccaatgcacctgccacccatctcccaactctggccttgtgcaacataaacggtctgcttttcaccctgtccccattagcaaactgtccaccgcctcaccccagcccacaccctctgggaataggctgccggacatctgtttttggagggcttgggggtagaggagcaccaggtgccaaaatgggcccagtgggagggcaagagccatgtgcttttctccctgcccctgatgcggccccagctgtggccttcccactcagcactgctagctcctcatcctcctggcttggcagccgtcccctcgctttccatccccccatcaaccccacgcactgtccgtcagccatgttctgctgccgaccacccccacgctcaccacacgcagtggctcagctcctttggaagctggtagcacccacggcaaggaacagggctgccagtcagaagggagtggatgcctgcatttcctcttcaggccggccagaggcattctgcagcctcccctcctcgtcccagccagccaaccctggctaacacactcagacaaagaatcctttcggctctcattcactccatgactttggttcatttcatcatttcaagggagaagtcaaagccagggaccaaacagaaatgtagaatcatctaaggacagctgtcagaccattttccccactgtcttcactggctggccagaaaaatagcttcacctagcacagtgttgatgttcaataactgttgaatgaaggttggaagggctttgccctgagcactgaggagagagagctggttgcgtgggacttgaagtctgtctcagtttctttaggtgggactgatgcccttggccttcctccagggaaggcatccagcatccagaggtaaggattctcctgtggaccttgtgacctctgactcctcccccttcttcccccagagttcaaggaggccttctccctctttgacaaggatggagatggcactatcaccaccaaggagttggggacagtgatgagatccctgggacagaaccccactgaagcagagctgcaggatatgatcaatgaggtggatgcagatggtgagccccacagagcgcgtgggcagccctgctcctggtcaccccgagtgactgcagggagcctctctcagggtgatggatgagcccgtgtctctcagggcccaggccaagagcattctccatcctttccccaccttccagggaacgggaccattgacttcccggagttcctgaccatgatggccagaaagatgaaggacacagacagtgaggaggagatccgagaggcgttccgtgtctttgacaaggtaagcagccctctccaggggcggctctgagactgacgccagccttcaggcagacaggcggaactggagccacggagctaccacttccaggaggtccgggtcccggtgccagcctcattgccaacctgctctgccacctcaggcagcctccctcactgtgctcactgctgagggatggtgatgacagccacccctctcactgcctctctccccaccgggagaagtgcccagtgaaaggctttatccccaacccccaggatgggaatggctacatcagcgccgcagagctgcgtcacgtaatgacgaacctgggggagaagctgaccgatgaggaggtggatgagatgatcagggaggctgacatcgatggagatggccaggtcaattatgaaggtgagtcaaggccaggcttgatctctggaacaagaagagaatcgcagcttcaggaacaagcccccagatccctcttgttggggagggccgctcgccacttagcctgcccgcctgacctcctctctctctgcttcactccacagagtttgtacagatgatgactgcaaagtgaaggccccccgggcagctggcgatgcccgttctcttgatctctctcttctcgcgcgcgcactctctcttcaacactcccctgcgtaccccggttctagcaaacaccaattgattgactgagaatctgataaagcaacaaaagatttgtcccaagctgcatgattgctctttctccttcttccctgagtctctctccatgcccctcatctcttccttttgccctcgcctcttccatccatgtcttccaaggcctgatgcattcataagttgaagccctccccagatccccttggggagcctctgccctcctccagcccggatggctctcctccattttggtttgtttcctcttgtttgtcatcttattttgggtgctggggtggctgccagccctgtcccgggacctgctgggagggacaagaggccctcccccaggcagaagagcatgccctttgccgttgcatgcaaccagccctgtgattccacgtgcagatcccagcagcctgttggggcaggggtgccaagagaggcattccagaaggactgagggggcgttgaggaattgtggcgttgactggatgtggcccaggagggggtcgagggggccaactcacagaaggggactgacagtgggcaacactcacatcccactggctgctgttctgaaaccatctgattggctttctgaggtttggctgggtggggactgctcatttggccactctgcaaattggacttgcccgcgttcctgaagcgctctcgagctgttctgtaaatacctggtgctaacatcccatgccgctccctcctcacgatgcacccaccgccctgagggcccgtcctaggaatggatgtggggatggtcgctttgtaatgtgctggttctctttttttttctttcccctctatggcccttaagactttcattttgttcagaaccatgctgggctagctaaagggtggggagagggaagatgggccccaccacgctctcaagagaacgcacctgcaataaaacagtcttgtcggccagctgcccaggggacggcagctacagcagcctctgcgtcctggtccgccagcacctcccgcttctccgtggtgacttggcgccgcttcctcacatctgtgctccgtgccctcttccctgcctcttccctcgcccacctgcctgcccccatactcccccagcggagagcatgatccgtgcccttgcttctgactttcgcctctgggacaagtaagtcaatgtgggcagttcagtcgtctgggttttttccccttttctgttcatttcatctggctccccccaccacctccccaccccaccccccaccccctgcttcccctcactgcccaggtcgatcaagtggcttttcctgggacctgcccagctttgagaatctcttctcatccaccctctggcacccagcctctgagggaaggagggatggggcatagtgggagacccagccaagagctgagggtaagggcaggtaggcgtgaggctgtggacattttcggaatgttttggttttgttttttttaaaccgggcaatattgtgttcagttcaagctgtgaagaaaaatatatatcaatgttttccaataaaatacagtgactacctga

SEQ ID NO: 1146 - DNA, 56692 bp, Homo sapiens
gactactcccagcacggccactgaacgcttggccgcgcgatgctccggagcgcgggtcgccattgggttgaactacagctcccagcatgctccgggccggcgacatccggagcccctggtagttgcctagcgaccgggcgtgtcccggaagacgggcccggcgtggggcgcgacttccggggcggcggttgcatcagattctaggaagtgtctgtagccgcagctgcgggtccgggattcccagccatggcagattcctccgggcagcagggtgagcggcgcggccgggccaggctgagggcggctgggggcctgactgggcgctgggtgctcggctcgaagggcagcgagtccttatgtctgaggggcccgggtgcatgggttctgaggggcagctgtgtccgtggtctgaggggcggcagtgcccgaggtctgaggggtgtcagtgcgcggggtctgagggacggcacgtccttgggtccgaggggcgggggtgctcggggtctgaggggtgtcagtgcccggggtctgagggacggcgggtcctgaggttcgaggggtggcacgtcctaggatccgaaggacaacgggtgcccggctccgagggacggccactgggacccctgggactcctgcgtgagggtctgccagacccgtggctggagcacagaccccgcggggacccgagcccgagcggggcgctgcccagaccacccagcctcagtttcctcacttggttcctgccgaggtccccttgcatcctcaccccgggaggtggccctacatcaaacagcctttccccagccggtgcctgggcgggccctcgctccctcttgccccagctggcctttaggggggagacaaaggcccaagggttgttttggttttctgcccagacctggcagcttccgggaggtgggcggagggcacctgaggttggtatttagggaaatggggcagaggacgccaggggtacgcgtacacacagtaaaagggcttggggctttacgaaggctttcatctccagttccgcaggcagtccactgcaagctgattgtcagagcattactgccccattttattgccaacccgggaggttccccagggacacagctgtgtcagctcccccagtcactcatgtcaccagcgggtagaccttgagagaccagtgggttcttctctcactgtccctccagcaagattttaggtgctggaaaggcaagagactgaatcagaaagcccagattcctaacagtctggagcagcctttccaaaggaaacattctcagtatctagtttttaattcttttggctggcaaaaattagatgcaagttcttgtaagacacctccagcccccaccctcagtttagatcgtaccaagatttccttagcatctggtggtgccctttgcccctgagggtttattgggttatagataggtagttatgacaacccgagtaatctggcggcatggggacacccagatgacagggctacactcttgtgccaagtggcaggaggtggtcaccttccaggcacgccgcctaccaccctacctgtgtgcctggattccagcaccatctccacccgtcccagagccaagcggccctcagaagtcacccagattcctgtaaaacagcatcatagttaacagccccaactctggaaccaccctggaagggccagggttccaactctgcctcccgccccacagcaaaccatgcgtaatggctcctaccttggagcatggagtgtaaatgaattaatagatgggaaggacgtagaacagtgcctggcactcaattaagtgctgtgtctgtgctgaaagttagggcctgtttgttttcaaactaaaaatgtgtttttgttcatttgtgaacgtaaatgacgtattagtagtgttttgtatcttgtttttaaaaatagctttagaattttaggttttcagagccttgtaagaattgccttctttttggagcttgccatataggttgggattgccctctccgggctgtcagggcagcaggcagattgcccagtcctcagcctgcgcacagcatctccagccagtgttcttctgccccagggcatggcccacctgcctttactatcgcctcctcccatcacacacacactctcaaagatgagaacaggaaataaaatccaatcgtaggccaggcgcagtggctcacacctgtaatcccagcactttgggaggccgaggcaggcagatcacgaggtcaggagatcgagaccatggtgaaaccctgtctctactaaaaataaaaaaaaaattagccgggcgcggtggcgggcgcctgactactcggaggctgaggccggagaatgatgtgaacccaggaggcggagcttgcagtgagtcgagattgcgccactgcactccagcctgggcgacagagcgagactccgtctcaaaaaaaaaaaaatccaatcgtaaatgctttcagtgaccatcttcccagatttttcaaggaggccatcatttttgtaccatcttccctaagttgactcagaaggtctatttctctttcctgatctcactgggtgtacagcttttcctttgcggtcttgaaggtgcataggcttggtgcctgtccaagagcctgattatttcagaaggatgagtttcatttctgaggtttctggggtagatggagcctacctcagggcctttccgcacagacttgggataccacttggtcggctgctcatcaggtcagacttatagtttaatttttatacagtttaattcaagggtcttcataataacacagccagcattttttcagcatgagtctgtgccaggcactgctctaaatgctttgcatctgttatctcctgccacccttgggggaacccctttgaggaagatcctgccggcatcttgtacagatgagaatcctgaggttcagagaagtcaagcaatctgtccaccatcacgactagccagaggcacagccaggctcccaacctgggcagcctgactcaatagggaccttaactgctgtgctgtgctgcctttgatgattctcttcagactcacaatagctcaacccagtgagttaaggcagacgagaataaagctgatgcccttcgatgttttccccagagccacatgaaatgtttgctcctctatgaactcaggtaccatgtttccgggtatttgaagagccttaggcagtacccttggggtggagattaagccatttccagtgtgggtgctctgggtggcaatattgctgtctgatcaccccacaggctcattgtgagggatgttggatgcccctaataatgaataacctccctcccagtaaggaggaagatggagatgctgttcttgggggtgagagaggatgcctgggggccacctttgtgaacgagttgcagctggacctccggggctggtgatcaggacggggagtgggaggggaagccctcacctgtgggaggaggcgctggtctctgggagtgggcagtgttggctcctagttggtgagagcaggggtgcatgcccctctctcctccccacgattcatgtctgggggctttttccggtcccctttctgaacacttcttgggcagggagtggatcactgggaaggacccaagaggagcagctgtagagggtgggaccaggggaacatttgcagaaagggagtaacctgcagggtgagatgttgcctggacacccacaagatgaggaccctggtgggacctttgaagtagcagggtcagagggcaaagggtcagggtgagtgaggggtgcagacccccaccaaaccggggcacttattaggagctcagacctgctgtaaaggggtctgcattttagcaagctttccacccatggggaagctggtttaaacctcacttgctgggcccaccccagagattctgatttggcaggtctctggtgagcccaagaatgtgacttctctggatcccccaggttctgctgctgaaggcacaccagggccatgcctggagtggacctgggagagcctcaagggaacgcaggaagagaaacagggcagccgggagaggtttaaatgcttacaggaggccaggcatggtggctcacgtctgtaatcccagcactttgggaggccgaggtgggtggatcacctgaggtcaggagttctagaccagcctggccaatatgtagaaaccccgtctctactaaaaatacaaaaattagctgggcatggtggcgggcacctgtaatcccagctactcgggaggctgaggcaggagaatcgcttgaacccgggaggcagagtttgcagtgagccgagatcatgccactgcactccagcctgggtgacgagcgagactccgtctcaaaaaataaaataaaataaaataaaataaaaataaataaaaaataaatgctgataggaaagagccagagagagggagaggtcgcactgccacagttgtttgacgtgtcagggttgttgttcatttggtgtggctttgttttggtatctgtgctgagcaattgcttggtacttgcatgtgatttcaataaatgttctgtagagactccacctttgtagccggtgacaaccaccatccacctttgggacattcccatgtccctcaatgtgttgatgaactgaactgcaaggtcatccggtggtggacattccttctcatgggggcagagcaggagtttcggcacggagcgtgcaggctctacgatgagggccagtgtcgaggaacaggtccctgggaggttttcagtctgctcagaagtgttctcatctgatctcagcatcagactgatccacagcctggctcaaacccatgaccacttgaaagctgacctatttttatttgtttcctcgagacacacttaaatgcagctaccacgattacccaaatgactgtctgcgtccatctcatggaagcctgtcattctcctgtgcttccctgggcaccagcacctttctgctctgagaagatccttcccaagcatggtcttggttcccttttgatgagccgtctagcctgctctagacggtacatttaagaattatgtgatccaagatcaaggcagatttggtaataaacttttaaaataataaaattaattaaataaaaatgggtgtgtgagccctaggaaaactccaggaaattctctgtgtgtagcatgcggctattacaataacattaataataccagagcgattatgataataatgatggcaaatggggcccctggctctgtgccaggcagcttttaaacattttacaagtgtcatttgacttaatggcctgcagctttacagggctgatgttatgagcgtgttttaccgtgaggaaatgccgccgtgtgtgtgagtgtaggtactcagccctggagggcgtcggggccgcccctcaggtctccagagagcggatacacagcggcttcagttcccagactgcttcctcagcgctcaaaagccactgcagccgccgttaggacatttgatgtttttctcattttaaaaatagcagatgcttactgcagaaaatgtgagcaatgaagaaaaagagggaattaaaatcacctgtcaccccctctcatcaaccatcgtcactgtcagtgttcgggctgttgctggtggtctctccatcagaatccattctgagtgtgagaggcacgtgactgtcagctcgctgtctcagctggaagccgatgctgtgtcactgtttctcagggtgctgctgttgtctcttcttccctcttgctgtcgtggagtccaacccaggcatgagcagttgcagaagaccaaggctcagggaggggacaggggagaggaatgtggagggtcagcattggggaacagctttcgaactgtggcctgatctgtgaggggacaaggctcaccttccagctctgtccatccctctggcaagttctctaatctttagtgaacttcattttctttatcatgaaatgggacccctgctggcagctgcagagctgttggagggaaatatccagctaaactagaagtctcctggctggaagttgctctgcaaaagagtttgtaggagtctgatatttatttagagttagttttccaggacctcactttggggtgcttggagctgcctctgtgggtctgcctccgcctccgtcctccctgatctcatctccagctgggaggagagcgcatctccatgtaagcagcctccttcttctcagagggaagccccggcagtgtcagtgctgacactgggcctgtaactgtggggatggggcaggtgagaggccctcaagagctcccggcaccccccaggcgccttcagtggggccagagtccacccctgtctttctctttccttggactgttggaagagctgaagtgaaaagtgacttgttcttatgtctctggtatctttgggcagcagggctcctgctaagcaagcccctgggggctcaaagcagcagaggctgtggccggttcccagcactggtccttgtgcaggtgtctttctgagaagggtgcatgaggcccagtgccacaggggaacgccagcccaccactggtggcatgcactctgtggtgccattctgctgtccactcatctgtgccctaggcaactttagctgatatctggaatgtcacacgctcagttgtagatgctgaagatcgagcagtgaataaggtagatggagcggtggggcagatggtgaaggaaagaaatgcgggcacgtgttagacaggggtgctgcggagagaaagagcagccaggctcagggtctagaggcgggcgccatatggacagggagtccttgaagacctggtggggaagccggcacctagcagagctgtgaaggattaaggggcctgctggtatctggggagcatgccccctaaaaaaagagcagcaggtggaggggccatgtgactagggtattgtgagtcaggtgggggcccatggccagcatgaggacaggcttgtgctgctggcgaggtgggtgttgggggcagtaatgtgaacgtgcgcttttcagcagggccgctggaggcctgtggctgtgaggggagagccatgctggctacaggtggcggtgtctggcttgcaggaatccaggtgacaagggctggctctcaagtccaaagcttcttttgagttagaggccccggatcctcccgtgggttggctatgggtgctcctaaggataacttgtaaaggggtgtgattccagttttggctagggagtgtgcccagagctttgcttctgggtgcctgtggctgcttggagtgggtggccatcttattggggtcagatgggacagtggctccgtgcagtgggaaggaagcagggcaagttagagggacgctgcactcgtcatcccaccagcgagagtcatcccaggaagccattttaagccctgcatccatgttgagacttcaggaaggctctcccacagagtgcccacccctttactgcagagaagaggtggcttcaggacatcttctccggcagccacggaggctgggccttggggcatcacgtggctccgtaggctccctggcgggtgaagagctcggcccagtggggcattcttgctgctgcagctgtgcactccattctgactcatctttgctgacaccacagcgttccgggaagtgccagttattggcctgacacgaagggctttccccacactaagcaaagcagagaaaggcattcgtgtgcagttacccccgcaacacactctgctctctgttttcagaagctgtgtgggcttggttggggtgactctggctctgtgccaggagtaaacacggagatgggggacaaaagggaatgggagaaggcagagagggggactgtgatgtgcagggcatccacgccccatggctgtgatgtcgggcagcctgtgcccaggaagggcagctggcacagcaaggggtggccagacatgtgcattcctaccctgagtgaactctggggtgagagggtatctgtctggaaggagcaagcatcggtccttttcccacagtcctctcagcaaacacaatcactggttcaaggtttggatgcacctgtgctcatgggctcagggaccagactccctcctctggccagaagcctggcaccatctgcctggtctgcccccactttagggacgtgggctgtggacacagcacctggtccacaactcccgtgtcagaggtaattgcagggagatattccttagaatggtgagacagattttattccctaattcctgacagtaggggaaggagctgcgttccctgccagttcagcagaggtgacttttggatttaaagggagtatgattagctgggcctggtggcatgtgcctgtagtcccagctactcaggaggcttaggctggagggtcacttgagcccagcattttgaggctgtgatgagccttgattgcaccactgcactccagcctgggcagtagagtcagacgctgtctctaaaaaataaaaataaataaataaataaataaataaaaataaaaaagggagaatggaggaggagaaggagggtgagcaggggctcaaatgaaaaaagccatggagctggtcagcgtgcatgtgtcaaggcggccttgtctacagctggcagtggtgaaagttagggttctgctcctcctcccaatggtgacatgcggaacagtggctcttgggtccttgagtgacacacctgagtggtggaggtgcacgcttactgctttgaaggctctaaggagggaggctggggcctggggccaggggccaggggccaggtgaggctggctggagcagccacattttcctggcagccctgtgctttcttgggctggtcctttgagggggcccagtcctcctgaggctgtggccttgacctgcagaagccatgctagagtccagctgtctcttggtgcaggggtgtaaatggcacacattgtcaatgtggggttctcctacccctcatcccccagcacccagagggagagggtgccgctgcggcaaagaggcttgaagttggtttggtttgggggatttctgttgtgagtttttaaaaattgaggttaaattctcgtaacatacttagctgacaggagggataccatgatcatgtaggtagctttcccaaggcgaggcttatccgttatactccagatgtgctgacccctatgatttccccaaatgtcagaaactgaactgtgtaatttgtgatggtgtggaactgtgttcctgctttccctgatagaaaacataaattaaaaatgtaaaaactaagtaatttatatgacataaagtgaaaagtacacaattctgtggtatttggcgcatgatgttgtcatgcagccttcatttctgtctagttccaaagcattttcatcacccaagagggaacccatccatacctgtcaggcagtcactccctcgcccccagtcgaagcgctgcccctgtgcctttgcctgttctggatgtttggcgtccagggaagggcttgaacacctttttccttggttctgtgccatcccctagtccctgtctttctggcggcctctgggctgcccgcctgcctgcctgacaccatgtgccctctgtctttgcagctcctgactacaggtccattctgagcattagtgacgaggcagccagggcacaagccctgaacgagcacctcagcacgcgtagctatgtccaggggtactcactgtcccaggcagacgtggacgcgttcaggcagctctcggccccgcccgctgacccccagctcttccacgtggctcggtggttcaggcacatagaagcgctcctgggtagcccctgtggcaaaggccagccctgcaggctccaagcaagtgagtaacagagtgggttccctggccattagaacctctctcccaaggtcaagggctttctccatcaccctggtgcttacctggcgtctgcggataccccagagggagcctcgcccaagtgtgtctcgagcaagtggcctggatgggcagatgcagcgcttgctggatggaggttgggataaaatcacgccctatggagttggttattcaggagcagtatgttcacatcactggtgtggcaggattgcctgaggtggtggggtgcagagccgctgcggctctggggttccacgtagcatgcccaggccacgggccctagccttgtgatttttagctaaggctgtgcctggctctggttgactcagttctttctctttatttcttccataagattgtagcgtgtctatcctccagctttagaattgttgaatcctaaagtattaattggcattgaacttttttttttttttttttttgagatggagtctcgctctatcgcccaggctggagtgcagtggtgcgatctccactcactgcaagctccacctcccgggttcatgccattctcctgcctcagcctcccgagtagctgggactgtaggcgcccaccaccatgcctggctaattttttgtatttttagtagagacggggtttcaccgtgttagccaggatggtctcgatctcccgacctcgtgatccacccgcctcggcctcccaaagtgctgggattacaagtgtgaaccaccgcgcccggccggcattgaactttttaaaaatcagaaataagtcattttttctctttgagatgatgtctgtcccgtagctccagcctgttggtgctggttgtgtctgtggaacgtgcctgtggttatttgcgggagatactcctgggatgcctgcatggctttgtcactctgtggcaaatctgagggggctccatgccatcatcactgaagtatgcctttgggtggcccagctcctcctgtggctgtgggcactcctccaccttcatgtgggggcaggtttagtgctgttttctggtggtcctggctgtagctggcagccttctgggggcttctccagactccgttggggcctgggattgggaacatgcccccccgcctctgccgtgggtcaggcctctgctagatcactgttttaaccaggctggaggtggggatgtcacatctcctgtgggtcgtgttttctggataactctgcagcagacactccttccccagcgtagggcagaggccgttgctgtgcaggtcacgtccttccccatgtagccgttcctgcctgagcctccagcgcggtcacccaagtgacacctgtgctgtgaggtgccttctctccaagggctcgggtgtcaggttgttccccctgccatgtgccattccaagacacagccagaggggggcaggattagggagggtgaagcgggcctggtacgtccagctcagcagtggcctgtccaggcttccctcatagggacttgttgaaagagcggcacagacgcaagcctccatccacactgtgagaggaaggaagggttttgctcttgcaaacactttttaacctacagagaggaagcagagccacgttgctgtgtaacagaatggaccatggatagcactaatggagttgctgtgccctccccaggttccaaatcccctcatcacccaggctgcgcaagaggctgccagggtctgcttgtgccaggaatgatgggcattatgtcaggcgaccctcactcaagcttgctgtacactgagcaggggctgaagggggaggtgggagctggagtctgggactgctagagcatccagtgacctcgagtgggtccaaggcgccatggagtccagtgtagtgtcctcgcccatgtccctgggatgacagtagctgtggatctccctccatgtagctgtgacaatcagagctgcttcccccactgagtgggaacgccctctctttccatggctcatactccccaagcatgcaccttccttgctggcacagtgggccatgtgcccctcctcctgctcgcccttccacctctgttggacatcccagcagcatcagatgtgcctgtgtctggccctcagtgtgcccgcctgttaccagctcctcccatgtgccttctgtgtcctgtctccaagatcctctcagacatggaaagactctgcttggcccggcgcggtggctcactcctgtaatcccagcactttgggaggccaaggcgggcggatcacgaggtcaggagattgagaccatgctcgctaagtcggtgacaacctgtctctactaaaaatacaaaaaattagccgggcgtgatggcgggtgcctatagtcccagctactcgggaggctgaggcaggagaatggcctgaacctgggaggcggagcttgcagtgagccgagatcgtgccactgtactccagcctaggtgacagagcgagactccgtctcggggtggggggttggagataatggaaaggctctgcttaacccccaggtccctactcctgtgaagccagaccccttcctggtggatcccttccctggatcaccagcctccagcacggaggtccactggatatcaggacgttgaacttgttgagcacttctcacccgcagtggaggctcagcccttccagcccgccggcctctccctaccccccgggaaggagtgtcagctatacccttcactgaggagggtgtgggtctgtcagacgccgaggccatagtttcaggaacatgaaggtttggtgttgctctcacccctccgatggaggacccttaacttcctgatgaaggatttctctccatgaaccccttgcttgggtcctatctgcatctggtgtgttgtaggcagactgcttgccacttcctggcttccctctccatcattttatcttcagcctcccacatccctgtttcaaagccatgtctctcatgagcggttcatagttggtctgttgttggatcactcaggtcagggtgggactctggaatcaacgaatgtgtgttcattttttccaaagaaacaaaagcacaggccaggcgcggtggctcacacctgtaatcccagcactttaggaggccaaggcaggcagatcacaaggtcaggagtttgagaccagcctggccaatatggtgaaaccccatccctactaaagatacaaaaattggtggggcgtggtggcaggtgcctgtagtcctagctacttgggaggctgaggcaggataatcgcttgaactcaggaggcggaggttgcagtgagttgagattgcgccagtgcacttcagccagattttatctaaaaaaaaaaaaggggggcaagggtccttatgtgatatctctcagttcttcccttttgcaaatctgaatttgtatatctgggcctggtaacccgttttcctggggagcccatcgccagctgtgtggagatagcagccttaggggagcaggaatgctggctgtggccaggcttcttggacaagctttcagtcctgtgaaccctgggccgtttcctcatagcagggtgagtgtgatgatcccgtggcctcatggctgtgtttctgggcagcgtctccagctgtctgagatggcagcagtgtcctattgaaggagctccagggtctttgtgagggaggagagtgatgggatcctagagtggccggttgaatgcctccaggcattgagtgagattctccttcaagggcttgtgaggcatttaaagtacactgaggccgagctgcacttggcctcaataagcacatgatgtttgattaagattggagattgcctacgctttagaatctgaccacctgtgaccactggaactcacctagagtgggggctcctgctgagcactggccctctctccgtctcctgccccatctcccacctgcccacagtacccccactgcccagacacagtgcagccgccctccttcctccccttggcctgttagtcatcagcgtctgccgtcctggctcgtgtggcctgagctagagccgggaggccaagagatggctggtgcccaggaccaacttccccgtgatcagtgtgtggcaatttgctggccatgctgccagaccctctggcacagaaaccagggacaggaggaggcaggatgcgagcaccctggtgagctgccaggcggcctgctggggtgggcacaggtcagtgctaggagtatccatctcgtaggccttcctggtgccactcagcagagacatgtgaagcccttcccagggccaggcaccagctggggtcagaggtgcccagcagagcataacgcagaacctggacctgtgggcgacgactgtggagaaaagtggggatctgctgagggggcagggcaggcaggagccggctgagggcaacgggaaagtcaccaggtaccgtcctccacacctagctttgccagattgacgtttcagagggtgaataatcaccctgtggctgcccctggccccagggacagagctctgccccttcagggatctcagatgcaggttgtgtaaggacagccttgtgccaggttggaagccaggcctggaagcagtgtgctcagagcagcccaggcggcccacaggcgagtggaggggaacaactagggaagtctggccaggaggaggtgactgcactgaggggctggctggcaggggtctctgcctggaggctgagaggagctcaggttatttatgaaggcagtatagacctatgtggagcttgaagcccagtgtctggatcagagtctgctgggctgtgggcccagagctgggagccagccactcctgcagtgtccgaagtgatgaggaggggctgggctggagccagtcttgcctgctggccgtggccacagggggtcctttctgctctgactcctggcttctgctgccagggcttggaggcttggaggtggcctctgtcccaacaagagtcctcaaaatcctcagtttgtccaggtgagggatcctgggtgggggaggttcccagggctgcggcagaacagaccataccttgtcagtgtcaagccctgactgacccaggagtgccaggtggtggtgtgctcactgccagaaaggggccagtatttgaagagcagtggaatgtgctgggcacgctgtgcaggcattcctccgccctcctggggctctaagggtgttattggggtatgctgccatacagaatattagaaagcaaaagaaagacgcggttgtcgggaggcagagcttgcagtgagccgagatcacaccactgcactctggcctgggcgacagagcgagactccgtctaaaaaaaaaaaaagacgcagttgtctttgacctgcgtaatgttgaccgagattcgtgtggtttcacattgtttaaatttcatggaaaactatggtcccgttgtaaaaaccaagtctccaggtgaagaggcgacttgcacttcctggtgctgcccctggaccctgatcctgctctctctgcctcccaggcaaaggccggcgtgtgcagccccagtggtcccctcctgctgggacccagccatgcagactccacctttacaacagcctcaccaggaacaaggtaaggagaacacagatgccgtggcacacgcacacaatggggaggcaggaggcaggacagcccatgtgccttgtcgcacaacagacttctctgttccttgtgttgggatctggagttccataaatccaggtttaagatccttcagtcacttccatgttatagtctctgtggcccagaggcagagctgtcctctgaaacccagacacgtgaagtatcatgcctcatgtggaagcctgcccatgacttctgggcatggatcaccctggcttgtctctcggactctgcccaaccatgagtacttgaggtcatccacagccacgcctttcaggaggacgcgtggttgcagcaggtggcactgtatgagccaagcaggatggacaaaacggcaaactggctggatgttgttgggagcacagcaggttttgagaagaaggcaggattggttcctaacagaatggggtttgcatggtttgcttggctcagggcatggccagtgactccagtgatttcagaccaggctctgggcggggctgcttggatttccatcagggagcatgtttggcagacagagagtcaggtgtgagggagttcatggccttccttgggaaactggttgaggatgatgcccccagagaggtctgagggtgctgggatgttggggagtggtgccagagcagcaccacgattcaggggtcctggcctccaagccgcgctcccccaacagggactgaccctggccaagtgttgtctgcctcagtttcttcatccgtaaaaagaaaatgacataacctacgtcctagagtgtactgcatattgaatatttagctcagggcctggcacatggtaggtactcagtaaatattagctgtgttattgttaaataagcagcatttcaacaatcaataaaatcattgattccctttatcgcctccctccatagatgagtagaaccccagggaggaagaggccccacccacccagggctcagttggtgggaggtgccgtacatctcactgggctcccactgagactgtgacttttcacagtaaaacaaaatggtctctgttgaattgtttacactaaacacaaaccacactgtgatgtttgttgctgtttttggtaatcctgtgcagtgtttcttgcatttcttgtgatcgtcattccttcattcctaacaaaggaagtgttcatacctcaagatgggaaaaaggtgacgtggtattgctgtgggccaaccgtctatgacgcatctcacatggggcacgccaggtaggtccaccgcggggtgtccctgcagcttctgcagttgcacgcagaagtcagagccattgggatccacagcagcgatcttaggtccacaaagatcttagatctgctacagagacctgagatttgaggaatcaagactgaatttcttctcttatttttaagatgaaaattttaatgccataagtaatctatattcactgcagaaagactacagatcaccaaaaagaaaatgtccatagccccactgctaacatgctggactcgacctgggcactttttctcacataccttaaagttttctctcatccctcaagctctcgtggggtccccagatgctgagttcccgtgacactcagacctgacaggcctgacgctgggttggctgtgaccgccccccgaccactggatggtcatggctgtagctcctgacgagtagctggctgttggggtaaatgccacagagtccttttatgtgttcatgttttagttgcagtgccaaggtcatgtatagtcaacccttgaacaacctggagggtagagggtgtgaccctctgcacagttgaaaatccacacataacttttgattccccaaaaacttcaccactaaaatagcctcctgttgaccaatagcatgccagtcaatgaacacatattttgtatatacattacatactgtattcctaatgataaaggaagccagagaaaagaaaatattatgaagaaaatcataagggagaggcaatatatttactattcattaggtggaagtggatcattataaaggtcatcatccttgccatcttcacgttgagtagactgaggaggagaagggggggtcttgctgtttcagggatggcagagaaaatcatatataaatgcactcatgcagttcaaacacgtgttgttggaggttaagctatacatatcgtctggtgtggaaatgtttgttttttcattgctttaggtcctacatctcttttgatatcttgagaagagtgttgaaggattacttcaaatttgatgtcttttattgcatgaacattacggatattgatgacaaggtaaagggaatttgtaagattaaattttaaatgcaattggatggtgtaaaagaagatagaactttcgcataagtaaataatgtaggcttgagctagcttgtgttttcacctgataaacatcattttaatcccctcagtgagttaatattaccacttctgctactgatatgatcatttctatgatgttcagacacggttagaaacctgcatgttgctcaggggtcggtagccctgggtgttttgcagaaggaaggcctcccacagcacgcacttcgacatgtggcttgcaggggaagctggggcccccagggctcatttcattaagcgtcagaaagatcatgttaggccttgggcactacttggcaggtgggagatggagggtggtgtttctatttgatgatggtgtgcacgtccggggcccacagttgtctcccaccaccctcaccctcacttagagttggccaagggagagagtggcctgctgcagagggatgcatgtgggatccaagcatcactccccaatgtctgccttccctccccagatcatcaagagggcccggcagaaccacctgttcgagcagtatcgggagaagaggcctgaagcggcacagctcttggaggatgttcaggccgccctgaaggtgggcctcttgctgtctgctctagaaaccgagccctttgctttctgttctcggtcctttgtaggctactgtccctagggtagtgtcagtctcacaggctttcacaaagtgtatgttactcaagccagttccgtcaggggcgctgaagtctccataggtaaggtcccctggcctgtgacaaagtcaccagcaaagatgtactggagtggagtggagagtaggtgacattcctgccacttacaggaaaacaactgaattcatcacagtgccactaattacacttataaaaatgcttaccaatattgctgtctaattttcaatgccaaggttacaactaaatcagaaacttctgcccaagatacaaaagctatactaagctttttaatttggtaatactgtaaattttcagaatcttttgaagaaattagttctctctagtattttcattctgaataaccatcgttatatacttatttttattacaatagtaagaataggtcattttactctctactaattatccttagtaattacagtaatcattatggatatgcttatggcattttatctctggaattaaaaacaggaataaaattagagctgagcaatcttttaggtcagtgaggcctgagtaccttcctgatggatgtgtctgcagcacacctcagaacacactgggtggcctacttttcctcatccccagaacagccctagaaatactgctctcacacccaatttgcattggagaaactgaggcacagagaggttaggtgccctgtccagggtcacacgtgagagggcagaaccaggagctcctgagccgggagcttcagtctctcttagttccttactgcctggccacttgggttgcacacttctctatctctatggggccatgggaaaaaccgttctgttttctacctggaatcacctttatgaatttaggttttgctgagcagtatctaatagatttgacgtctctttatggttgcagccattttcagtaaaattaaatgagaccacggatcccgataaaaagcagatgctcgaacggattcagcacgcagtgcagcttgccacagagccacttgagaaagctgtgcagtccagactcacgggagaggaagtcaacagctgtgtggaggtgaggcttcacacatctcccagacagcccgttcgggtcaaatgtcgggccgtgcatagactgatctgtgtgcacggattgattccacagattgtcttagtggaagacactctgtgtctccagtagctccactgtggcaggcggccctgttctgcggtggctgagtcagtgcccctcccctcccacacccctttgccccatttcctgggtgcagagcctgtgccactggaaggagactcgggatccacaccctcccaccacttccatcagataggcaggaggtgcacttggaacgtggggaggcagccttctgtcgaagtgttccaagattctccagcggactctccccacaccagctggagaaggaggagcagggattaacattgaattgagcattgaggcctgtgggtacctactgagcttggggccttcacgttgaccagctctcctgcccctgccaatatctccttcagacacagggcagagacctgggtgcagaggggaccctgccctcttcctcaggcctttccctgtggctggcgccctggacacagtcaggaaggccttctcctttgtgccagcgccgcctgctggtcaccctttaagaactcgatggaaaagagaagagacggctgcagctgtgtgtagaaaaagaggccccactgaggccgcagccctgccttccctcaccactgccctggccccacctcagtgatggggcagggagtctgtgtctgcccttcgccagcatgtttctttctagtttggtctcttctgtgtcctgactcagcagatcgcttcgttgcgcctgtttccaaacttcacggaaacacgccacgtgtatgtagtcgtcagtgtgctttcacccaagctgtgcttctgggacgacccacatgtggtcactgtcactgcctcagtgcctgcctgggagccgagctgtttgtctgttctcctgggacgggcagttaggtttccttcttaccaacaatgctgctgtaatttttttcccagttgttccactaatattctttttttttttttaattgtggtaaaacacacatcataagaaatttaccatcttagccatttttaaaaactttttttttgtagagacagggtctttttgtgtctggtttattttgcccagcatagtgtgcccatggttgacccatgctgtagtgcatgtcagactctgcttccttcctatggctgaatgatactctgttgtgtatagatgggccacattttgctcatcctttcacctgcccgtggacacgtgggttgtttccaccttttggagatgcaagtaatgctgctataaacctgggtgtacaaatatctgtttgggttcctgctttcacttcttttggggatatacacggaagtggaattgctgggtcatgtgatgattctatttttgatattctgcgtaaccaccgtattgtttctgcagtggctgcactattacacattcccacccatagtgcatggggttctgttttctccacatccttgccaaagcttgttattcttcatttttttcatcccagtaggtgtgaggtggtatactgtggttttggtttgcatttccttaatggctagtgatgtggagtgtcttttgctgaactgtgagttgttttgtgttgtctctaggtggacatttgcaagtttctttaggccatatacctgcaagtggaatcgctgggttgtgtaggatatatgtgagtgactgtcgggggttcccaacactgcccacacattctggggccctagaaggactcatgagactcggcatcgagttatcatcttgtctaaggtttgtagcagtgacacagcgaggagcagaagctcaggcggagtcttcaatcatccatgggcaggctgctgaagcttcctccctgcctcccatgaggggacacagcacactctcccccaccaggaaaaaaatgcagccacatgtgtgaaatgtccctccctagggaagcccatcacataggcaccctctgcctggcacgtgccgcaattcctgactccccaggaggaaagctggtgttccacctgcataagccacagtgtttgttcaacagcccactgggggctgctgccacagagctgggtttcccggcctcttagcacaggggacatttcagctcctggatgccagctaatggccagctctgtaggcaggcctttctcaggtggcagacacagaccttctaggctcacttttatcttcatagtagccatatcagaaatgtctatatggccaggcacagtggctcacacttgtaatcccagcactttgggaagccagggcaagaggatcacttgagcccaggagctccagaccagcctaggcaaaatagtgagactctatttctacaaaacttttaaaaattagccaagcatggtgatgcaagcctgtggttccagctactggggaggctgaggtgagacaatcacctgagcccaggagtttgaggctgcagtgagccatgaacacaccactgcactccagcctgggcagcagagtgagacccagactcttaaaaaaaaagaaagaaatgtctatgcaaatttcttcttcttctaccacattttgggtgtgctgtgtatttgcacatacacctgcatttgtattgttggattcttccctttcatcagtcaatgaatgtgaagtgctgattgctgtggtttgaatgtccctttttccaacctctcctgagactgagcatcttgtcaagtgcttgcttccagctgtgattctgtgcccccatctctccccctttcccatgaggttattggtccttttcttactgttttgtatcattcttatgtcttctgatactaattactatgatttgaatgtttgtcccctccaaaactcatgctgaaacttaatccctagtgtaacagtattaagaggtaaggccttttagaggtgatcgagtcatgagagctctgccctcatgaatgggttaatggattaatgggttatcacagaagtggggtagttatcatgagagtggggctgttacagaagccagtttggccctcatgagccccctggccatgtgatgctctgcgccaccttgggactctgggaaaagtccccaccagcaagaaggcccagaacagatgtggccccttgaccttgaactttccagcctacagaattgtaagaaataaattttatttaaaaattacccattcccaggcagggcatcgtggctcatgcctgtaatcccagcactttgggaggctgaggtgggcagatcacgaggtcaggagatcgagaccatcctggccaacatggtgaaaccccgtctctactaaaaataaaaaaaaaaaaattagctgggtgttgtggcgtgtgcctgtaatcccagctacttgggaggctgaggtgggagaatcccttgaaccagggagtcagaggttgcagtgagccgagatcgtgctgttgcactgcagcctggcgacgaagcaagactccgtctcaaaaagaaaaaaaattttacccattcccggccaggcgcagtgggtcacgcctgtaatcctagcactttgggaggctgaggcgggcggatcacctgaggtcaggggtttgagaccagcctggccaacatggcaaaaccccgttgctactaaaaatacaaaaattagccaaatgtggtggcgcgcgtctgtaatcccagctactctggaggctgaggcaggagaatagcttgaaaccaggaggcggaggttgcagtgagccgagatcacgccactgcattccagcctgggaaacagagtgagactgtctcaaaaaaacaaaacaaaacaaaacaaaaaacagaaaacaaaaaaaagaacaaacaaacaaaaaaacagaaaacagactaagacacgaattcatctctgttacatgttggcatgtgtttgtgtctcttaattctgttctgttggtcaaattgtccagcccagaccaggtgcagtggctcgttcctgtaatcatagcaccttgggaggccaaggcaagaggatcccttgagcccaggagtttgagatcagccgggacaacatagtgagactctatctctacaaaaagtttaagaatttaaaatttaaaaaatttataaaaattgcccagtcctgcaggagtatcatgctgtctctcacaggtatctgatgggtaagaggccccatcttggttttgtcgttaggtgtgttttgaagcctcagcttgtcaagttccatgtaagacactgttgggattttacatgttgtatctaagaaccatctcagatccagtttggctgtgttgatcctctgtagtctttttgttttatcagtttttgtccattctttattccttcttttcttctttttcctttggatttattctgtttttctttgtctcatttagcagtttagcttattttctgatttaagaatttaaggctatacattttcctctgactgtttttgctgcaaaatttgacatcatttacttgtaaacaatttctaatttccattttggattttttagcccaggaattatctagaagtaattacctaaaagttaattatctagaattacttagaagttttaaatttccaaatttaaattggatggtactttttcatattaacttattgttattcgcttataacttaattacccagtggttggagagtatggtctgtcccaatctggatctgtgaacagagacttgtgttgtggcccctgtgtgtgctggtttctgaatgttctcttgtgcttgagaagattccgtctaatcccctagtgcacagttccacatgccatccacttagctatacctgttggccgtgtggttaatattttgtgtgtctttgctaattcttcctgttggcttagcctattcatacagtttcttaaaaaaacaaaaacaagaaccaaaacaaaactccccctctgatgatgaatttgtctgtttctccttattttttcactttttagaaaaaaaaaaagtttttttttagaggagattctggttcacatcagaattgagaggctatatatatcccctacccacctcaccgtcacctcccccagcatccgcacccaccagggggtacgtttcttacagtcagcgaacctgctctgagcgtcattaccctgagtccgtggtttactttagggttcactctcaggattgttacatcctatgggtttggacaaatactatctcgtatccaccattacggtatcacacagaatagtttcactgccctgaacatcctctgtgctccagctattatcccttcctccccaccccaactcctgacagcagctagtctttctactgtctccgtagttttgcctttcccagaatgtcacatacttggaatcctacagtgttgcagccatttcagatcggaaaaaatttttaaacagaatacttcacctctgatcaccaaaatgcatagggatttcttcctcacccagcccacctctgccccgacaaccagtcagttctctagcaggcatcagctgggagtcctaaaatttaattcatttccaacacagtttgccaggaggaagcgtcagatctgacaggttgaagggctcagtcccataagactgtccccaattcagatgccagttgaaagtagtagtttgttacctatacttctgacctaccagttattggccgggcgcggtggctcacgcctgaactcccagcactttgggaggccgagatgggcagatcatgaggtcaagagattgagaccatcccggccaacatggtgaaaccccgtctctactgacaatgcaaacattagctgggcgtggcgtcacgtgactgtaatcccttctactcgggaggctgaggcaggagaattgcttgaacccgggaggcggaggttgcagtgagctgagattgcactactgcactccagcctggtgacagagctagactccatcaaggaaggaaggaaggaaggaaggaaggaaggagggagggagggagggagggagggagggagggagggagggagggagggagggagggagggagggaaggaaggaaggagaaagaaaagaacagagtgcactggtatattttggaatgcttcctttcccttcttgctattggaaacacaaggggatttttctccaatattcactgtgaggcctggtcaggttcctagaggtaaaactcacaaaagtatggggtcccctatgactgggtccctggggttttcaactgtctgacttgcctacaccaagcctgcagcaatctctgttacagtcctggttttcctcccccaacactggttcccacagaattttcagcttatgagtctctgctctggtaagttgtgattgtctgtcttctcctgttggtctctccagtttagggggcagtggtttgccctatgacctaacttctcttatggatctaagaagagttggtttttcagtttattcagctttttacctgttgttaggtagagtggcaacttccaagctcctgacttatgtgaaactggaaagcagaagtctcttatcattttgtatttatgcattttgattgttgatctgtatgcttgaccagcaacattgagtattccagccctatcatcaggcaagttttagaaacattatcttagaagtattggtgggaagcagcttttgtctatcttgaagtgtgtatatttccctgtttgttcaaggtggttgccgtcttctggcttccattgttggctgttgttgaaaacatcggctgcccttcaaattacttttctttgattggtaaatatgtcttttctatcaggcgcattataaaagtattctctcttttcagttttctgctatttcacaaagacattgtaagagatttgtttttacttatcctattggatattttgtgtgcttcccggggctggattgttgcatgggttttgagaaattctcagatgtgtcttcaagtatcacctttactcgattccctctctcctctcctctgggttgccaattagatgtgagtctcatcatttcatctcatccttctccgtgtctcctaacctgtctttcataaaattttccttcttgtctctgtttcattttggatgacttcttcagttctgtcttcctgttcacaaattctccttcagacaggaagtgaaacagtcactcagtaggatggataagactgtttcgcctgttaatagatttcatctctgcaggttccgtttgcttctattttcagatccagctgggccgctttgctggcctgtccctgcttgctattgcctgtcatctgggagtccgtccttatgtctttaagcctgtaatatttactggattttattatgtatctgataactcctccatctgaagcgtccatctgtttgtcgtttctgctgactcccattcacagttgctcatgttcttgggtgtttggtgacctcgattaggatgtcggttcttgctgggtcgtgaccttggtgatcctgagggccaggatgcgcgtttccctgtacttggggcaggcccagtgtttgcttttcgggcagcagacttggcagcctttgctccccagagcgcacaccctgcttttggtgcttgtctgcccactggatgccctgccgcggtggggagggtgtgctcattcctgcagacgtgccttgccacttgcaggcctgcaatacatttaacacatctgtttgattcaggagctgtaggcagggattgcatcaggaacctggcccacgtgggccctgtgccccttctctgtctgtgttgtggctttgtccaccctgtgtccttgctgtctgccaggccattttcctacactttttctctccagccttggttctttgcctccccttcccatagtaggccacagaccatctgcttggtgtcacgccctgtcctgggtccacgtcagtgcattgagactctaggtccctccaagatggcggagggtagacatttctcttttctgacatgagtgcagttggggcgtgtctcatgcctagagtgtgtgtggtcaggacctggttcacataggtgccatgttttgctgggattggtggtttttactcccattccatggtgtgtcaagtggggatggcatcttcagtcaatggcgtcagggagatggggcttttgagacctctgggaccagtgccctgcctatctctcctaacctctggctgtgtccgtcatgaatcttttcctgaatgcaccaaggggttgtgctgtaggtgacacactgtgtgctcctgcccagcctctgcccataaccctgccctgcacggcccaggtaggctgcacatgctcaccaggcccacctcggccctcccacctctttttgcctctgcacccacagtccccttggctttgctcctctgagttcatgtgagacctgcccatttgtagagtcttgtatttgtccctgccgagccagttgtgtaagcatcacagtctccctaggagacggtggctcttcacaggtcaaggtcagcacctttgaattcagggcactgatgggctcacaccagctgcacgagatgttctcatgtgaagtgtgtggcccgctgctggatttttgtttctttctcttcaggtgttgctggaagaagccaaggatttgctctctgactggctggattctacacttggctgtgatgtcactgacaattccatcttctccaagctgcccaagttctgggagggggacttccacagagacatggaagctctgaatgtaagtgtcacgattgtcttgtgctggctctcttgcgctaagggccctgatttctaaattcctgttttggcaaggccagctcaattaagcggccaagtcaacattgaacttgagttgaggggcataatgggcttttcgttttatgaattgggaacgtttttatggagcgcgtggttttcagaagggaaaatcccaggacattctcatgtcttgcacaggttctccctccagatgtcttaacccgggttagtgagtatgtgccagaaattgtgaactttgtccagaagattgtggacaacggttacgggtaagcacaagggccttccctagggagggaagggctgcagaacatcgcacagggaggagctccccagctctgagcctgagtttgggaagcagaggagcaggtgttctggggctgcgtagctagaagtcccagcagacttcctcctacaactctgggcccacccaggggctgaggagcatgggtctgcactgtcctgggggccatggtgagaacctaacccagaatctgctgggaagctcggcagccaagaccatcagtcatggggccccagagctgcataatggtgagtgcgaatactgctgggccttcacagacatcagtgccattgcgtagacattttgagagtgctagtcctggtgtcatatcccgaaggaggatgcatttcatcagcatctatcgcttggctatgattttagtgactttttgttggcaaatccatcatacacttccctggcccgtattgtctcaatctccaaagtaagcattttcagaaatggccaacaaatggaaatgcagacaggaacccggttatctgtctgtagtgtgtagggaccagccccacagggtcggtgggtttttctccccatgtgtggagatgagagattgtagaaataaagacacaagacaaagagataaaagagaagacagctgggcccgggggaccactaccaccaagacgcggagaccggtagtggccccgaatgccaggctgcactgatatttattggatacaagacaaaggggtaggttaaggagagtgagccatcttcaatgataggtaaggccacgtgggtcacgtgtccactggacagggggcccttccctgcctggcagccaaggcagagagagagaggagacagagagaggcagcttacgccattatttctgcatatcagagacttttagtactttcactaatttgctactgctatctagaaggtagagccaggtgtacaggatggaacatgaaggaggactaggagcgtgaccgctgaagcacagcatcacagggagacggttaggcctccggataactgcgggcgagcctgactcatgtcaggccctccacaagaggtggaggagcagagtcttctccagactcccgcggggcaagggagactccctttcccggtctgctaagtagcgggtgtttttccttgacacttacgctaccgctagaccacagtccgcttggcaacgggcatcctcccagacgctggcgttaccactagaccaaggaacccttctggtggccgtgtccgggcataacaggaggttcacactcttgtcttctggtcactcctcactatgtcccctcagctgctatctctgtatggcctggtttttcctagattatgattatagagcgaggattattataatattggaataaagagtaattgctacaaactaatgattaatgatattcatatataatcatatctaagatctatatctggtataactattcttattttatattttattatactggaacagctcgtgccctcggtctcttgcctcggcacctgggtggcttgccgcccacagtagtgctcagcactgtaccgtgcgcctgctcccagagacccactgtgtccagcctcagattgcttccctcccacaggaaccacacaggctggatgaaagagaaacaagaggttgtgacagtgccaggaacggggcagactcttaagcagtagcgctgcttctctccccacttcacacaaactactgtggggcagcataagagcctgtgccaagccgagaggcatgggcaagccgaagctcagagaggacaggtcattccagactggagtaatctagagtgcttcttggaggccaagagcctcagctaagctaatgggtagagtgtggacattcagggaaaggtgaggccacacaagaatgaggacggcagcagccctgagcaaggcagggtgggagctgcatgggtcacaggacgccaggcagagggacgagctgcccagggcaggcaggctgcctccgcagcgggatgggccctggtgtcccactcagtccaaacagctgatacggttttcagtggccaccacagagagtagataggccacagatttcgcacttttatagccctgctttattttgttactgtcatcctgctgacacactttcgggtctgttagatgcacccacccaattccttttctgttttccagctatgtctccaatgggtctgtctactttgatacagcgaagtttgcttctagcgagaagcactcctatgggaagctggtgcctgaggccgttggagatcagaaagcccttcaagaaggggaaggtgaggagggcatgcctgagagcatgtgggctctccctcctggcccagcctgggttgtgttgactttgcaggccacgggggctgcgctgagcccacccctcagactcttgggaacagtgctttttcacctgaaggaattttaggagttttctgcactcaacattgtgcagctctaagaccatgacatgtgtttttttaatggatatataataattatgcaatttatggggaacatgtgatgtcttaatacatgcacaccgtgtgtgatgatcggggtagttaggatgctcgtcaccttagacgtttaccttttctttgcattgggaatgttccagatcttctggctatgttgaaatatacaacaaatgttttggtaactatagtcaccctactgtgctagtgaccacaagaacctattctttctgtctgtgtgtttgtgcctagaaaccaacctctctccactcactgcccctgacctgactcttctcagcttctggtgaccactgttctatgctgcacctccttgaggtccaccgttttttagctcccacataagagagaggacatgtgatatttgtctttctctgcctggtttatttcacttaacagaatgtcttccagttccatccatgttgctgtaaaagacaagatgtcatttttttatggtgtgttattttttaagaaacaaaagacagtaaacgcagtgctgtcttgagaaacatagtggcccctggggcctggattcacagggctggtgtttgctggctgagcatgtgaggtttagggggattgtggggtgctgggatgtgtgccgagtgatgcatatttgacaacagcctgtgcgcccatctggatccaaatgcttcaaacacagatatcagactttttctagaccaggcagaattatattgggaaccctttcgttggtgttttcttcatgtttatcccttaagtgaatctggggacacatccacaagaggcaaggttggaagcctccctgcagagtggggattcccgcaatgtgccagggcacgttctgcacccccaccccgcctgtcctagtgtttctggaagacaatttggccataaaaatgttcatacttttatctaattttaggctctattctaaagaaatatcagaacctaaaataaaggtgcggtggctcacgcctataatcccagcacttttggaggccgaggtgggtggatcacctgaggttgggagttcgagaccagcctggccaacatggcgaaaccccatctctactaaaaatacacaaattagccaggtgtggtggtgcttgcctgtaatcccagctactcaggaggctgaggcatgagaatcacttgaacccaggaggcagaggttatagtgagccaagattgtgccactgcactccagcctgggtgacagaatgagactctgtctcaaaaaaatatataataaaataaaaccagacaacacagactgaagaaagatagagatagccaggttgacacataaatatcagacccatggcatttcaggctccgggtttgtgggagtagaggggcgggtttgtgatgatgaagcgcctcagctctgagaggatgcagcctgggcctctggaccagaaggcttcactaccctagaaccagagtggacatgcccacgtttcatgcacttcccaggagttgacagatcaagtaggccaagaattaatacggatatgaaaggtttgaaatacagttaacaggcttggtttgagagctgggaactttgcactcaggaattaaagaacatcctttccttccaagaacacagaaacatatgccaggccacagaaagatttccacaaatctcaaagaaccgttttcaaggaaccctcattctgtcaaggagccctcattctgtcaccatggagcgattgtattagataacaacacttggccagacatggcgacccacacctgtaatcccagcactttgggaggccgaggcaggaggatcgcttgagcccaggagttccagaccaacctgggcaacatagggagaccccctttctacaaaaaatttaaaaatgagctgggtgtggtggcacgtgcctatagtcccagctacttaagaggctgatgcaggaggatcacttcagcccaagaagtcaaggctgcagtgagccctgattgtgccattgcactccagcctgggcaacagagcaagactctgtctcaaagacattaaaaaaattttttttttaaaataaaaaagataccaacactgacaggacggacgtctaaaatgtacaaacttgtctggggggttgaaatcatgctcctggataactcctaggaaagaaaaccacagtgggaaatcaggggtgtttaagcagaacagcagcaaaggtgccacacaccaaatctggagaatgcccctaaagcaccaattagaggaaactgatgtttttaaatgtagttattaaaaaacaaagatggaaaataagtgaggtgccgggtgcagtggctcacgcctgtaatcccagcactttgggaggccaaggcaggcggatcacgaggtcaggagttcgagaccagcctggccaatgtggtgaaaccccatctctactaaaaatacaaaaattagccgggtgtggtggcgcatgcctgtagtcccagctactcgggaggctgaggcagaagaatcgcttgaaccctggaggcggaggttgcagtgagctgagagcgtgccactgcactccaacctgggtgacagagcaagagtccatctcaaacaaaaaaaaaggaaataagtgagctaagcagtcagtcaaaaagctgggaaaggaacaagaagaagtagaaagaaataggaggaaataaagtaaaatcagagattaaagaaacagaaacaattgtaaaagccaaaagctgattcttctcaaaaaataatatagaagaacccttagcaagtttgattaataaaagtagaagattgaaaaacatattagggctgaattatagctcatgcctataattcagcactttgggaggccgaggcaggaggatcgcttgaggccaggaattcaagaccatcgtgggcaatgtagtgagaccgcatctctacaaaaattttaaaaattagctgagtgtggtagcatgcacctgtagtcccagttactcagaaggctgaggtaagagggttgcttgagccagggaggtcgaggctgtagtgagctgtgattacaccgttgcactccagcctggctgacagcaagatcctgtgtgtgtgtttgaatgtatgtatgtatgtatgtatgtttgaataacaagacaaaaatggaatgtaactatggatatagtagagcatttcttaaagtccttagaggaagccgtgaacaactcgcactgcatttgacacttagatgccgggagggaactggcagcacatgggaaaggtgggagtggtaagtggagcagtgccctcaggtcacgtggtgaaggaatgttctggaggcagctagagcacactgactcaccactttatgatgaattttgctatctggccccatctagggtctttttcttaaataccatttattcttgggcccattttcttccagaatgacttcagcattggtttaagttccaggaaacaggagtagaatctaacagccaatatgcaggaccaaagagggacatggatttccacccctccacagtcagtgatcagacgtgggcacatgaccacccccgcaacctccccccaccatggggagtcataaggagtgtagccttagctctgtgcagtcatgtgctcctcgccatggggactctaatggtagaggaaaaggggaggggtgatgctggggcccaagtggtcctagatgatgacagctcctcactccgccaagtaagatgacccaccagaggcagatgggccatgcagaccactcgggaaggcacgtggcaggaaggcctagtgcagggaggaagctcccccagtgggagagaacaggaccctgttgtgctggtatgaacatgcttgtagggtcaaagctagaaacactcactctgcctctggggagagagacaggaaatgaaaccaagaaggaaaacttgaaagacattgtgttgtaaccataataggtctgttgcccaatgcacagcgagtcagtataccgggataccaggggttgccgtagaagaagcgtagtaattgtatggtggacaaatggagatgggaggaaacctcagatccgcctccctgagatttggggaggggtttttaattgctctggacaggtgatggggattgccggttgctggggaagtgaggggcgaagtcatgggacagggaggtaaaccacatttctgcgacgagtcagttccttggtgcaggtcttcagaccagttggcaacagctgtcctgctggaattcaggatccaaaaaataccttaagcagttcttggtaaaaaggtccagggttagagattctatcgctaggaacagtggtggagcaggtggtcagcgtgctatgtgactctcagttagagctgcagggaagcggatggacgtgcactgcacctggccagtgaccggcctcatcattctgcctatagcctgccttggaattctcattaaccctatgagggcagttgcagtgtgatgtttgctgaaggatagggtgtttgtggggagggtcctgtgttctctgttatcaattttttcaaagcgtatttttaaaaaatcagatataaactttcatgagtaagttcataataatgaaaagttgaaaacgtgaatgtatattttctatcaaagagcatctaaaagcgaatgtcatgggccatatcacattgtgcttttgcggaattgtcagtggcagaacagtgcggaggtagaaggaagccaggacagcggccttccgtgttggtggatagatctggattttgcttgcagaggttttttgtgtttttgtgtgtttgttttttaatctgggaatcagtataccaaaatggtaacagtagtaattcctaggttaaaagataatggcaatttttttcctagttttctttttttatctttcaaatattctacatttagtacatattttataatcatgaacttggtgtttagaaaaatatatttagcggtgcttttcctctggactctgtttctcagggcagcttaggtctgttgcctgattaggctcctgaaaagtggatttgtcacctggaaagatctcactgcagcttcttcagggtcacctgagttagaaccctagatggagtctgttcttcctccacaagggggtgacagcacctaaggcagcccttagaccagggaccaggaaaggctgcagcagccgggcaagacctggcgtgggtcctggtaaccttatgcctagagtgaagacctctgctctgcccattcatcgaacaaagggtgattctctgcgtgacctttggactggctcacaggtttctttattcacagcagctaatcttttccattggtcctgcatgtattgttgagagaaatctgcagtgatggtgcattccttttctggggactcagaccgccttgtaccctgagtgtcaggtggctgagtgtcaccgagtcaatgcatggaattcaccaaggggttatttctcatccctctggcaaggcatagacagtcttgtttttgttggccaggtgatcattggctttgtccaggaaatagaacttgtgccaagagcagtactccccttttcttatggccttcctggactattctttagtttccttcacctattttccccttataaatacacaggaacagcaaatgtccccttcaccactgcactgccaccaggttccctgcagtagtacacagcagcttagctgcatccttgtatcccccgggacccataagcagatagttgtgcgggcccttgacatattgaccccacccgcatgaaccaggcaggatccctgagccatgccccagtggctgcaccactatgtcacctcctagctttagcccagggttcttatcacttgtcctagacactggtgggctaatgctgtgagaaggcagcaggaaggtgaatgtcttacggagaccccagatgtggcctcaagtcagccaggtatataagctggtgactttggggattatgtaccgttttgtaaatctagacactgggtcaacaccagaatctggtaatacatagttaacttgaagaaatgcttgagccaagttaataaacagaagttagtcagaaggactgcccattaggcaccgtggatggccttgaagtgagacatgtgggtctgtgggtgctgctgagtgaccttgcctggcgtccctcgtgtttgcaggtgacctgagcatctctgcagaccgcctgagtgagaagcgctctcccaacgactttgccttatggaaggcctctaagcccggagaaccgtcctggccgtgcccttggggaaaggtgagcgagtggcctagaaggtgtggggcttggacaggggcactggcgccagccacactctcaggcccccagcagagggccgctctgtgtgtgaaggatgttgtcactgggccagagcctggtgctggtgcagcacaggctgcctggccccggggacctggacatcatggagactccctgagtctctggacaaatcacttccctcctgggatttctgttttctggtctgtaagtggagatgtgatcagagtagacgtccatggaggcttcttggttcttgtgttctgtgactctgagtattccaggccccagggtgtaggatgcgttctgatcttcccggtgacaggagttgttgactgcagggtaccctaggaaggggcgtgaccatctgcagctgtcaagggctcagaggtctggatgtaattcagtaacttcacctaaacctcggcccacataggaccggtttatgaacttcaccaaagaaggctatccttagtcttttttttttttttgagacagagtgtcactctgtcaccaggctggagtgcagtggcgcgatctcagctcactgcaacctctgcctcctagtcccggttcaagcaattctcctgcctcagcctcctgagtagctgggattacaggcatacgtcaccatgctcagctaatttttgtatttttttgtatttttagtagagacggggtttcaccatgttggccaggctggtcttgaactcctgacctggtgatccgtctgcctcggcatcgcaaagtgctgggattacaggtgtgagccatctcgcccagccttcccttagtcttttcatgtgcgggatttaacgcttgttccaataaagttcagaggatgtaagggccatcaacttggagtgataagtgataaaggcctggacaagcgggtaggctggtcagtcactgtgtgttcggctttctccagggtcgtccgggctggcatatcgagtgctcggccatggcaggcaccctcctaggggcttcgatggacattcacggaggtgggttcgacctccggttcccccaccatgacaatgagctggcacagtcggaggtaggtgaaaacagagtccccttgtcaggtgcaagagcacagtgttcatactgcagtggaggaaaagtcagcccaggcctcagaagggcctctctcactagaacttgacaccttcatcggggcttgtgggtggaatctgaaccctgatcatttagtgtggtttccgcattgacagcctggcctttggcaacagactagcctggatttgaaccagttgtgttacctgctggcttattaacctgggctgtccttccaagccctgcctgcaccacctggaaaacgcagctcctgcctgtggacagcaccaacaaggcagcagacagtgcaggtggcaggaggcggccccagtaacacatgactgttgacatcctttgtctctttccacgcaggcctactttgaaaacgactgctgggtcaggtacttcctgcacacaggccacctgaccattgcaggctgcaaaatgtcaaagtcactaaaaaacttcatcaccattaaagatgccttgaaaaagcactcaggtatacactggcttctcccacagaccccccaaccaccttctcatacatgtgtaatggctgtagcactcgggagaataagggcgttggctgtcttgtgtccccccacagcacggcagttgcggctggccttcctcatgcactcgtggaaggacaccctggactactccagcaacaccatggagtcagcgcttcaatatgagaagttcttgaatgtgagtccccagccccttcctggaggttggtggagcagcctcccctgcacagtgggcaccttgtgcagtggtgataggtgcaccagcctcccgatgtctctaatggagaccagcacatgggtggaagcacctccatgctagtgggtataacaggctcggggccactcctgaaatggctgacggctcagcagagtggacagaggcctcgtcctcctagtcactgcagtgcacgtccttctgacttgtactttccaccaaatgagcatctgtaaacctaaagcaagagcatgtttctgtcaaagaaatatcttttcctttctttctgaccacttgtgtaattctggtctttcagatttttaccaaaaataaaatcacagcagtagaaagttgtaacagatatttcaggatggaaaagttgcctaaatgctgttaaactgatttttctaacttcaggagtttttcttaaatgtgaaagatatccttcgcgctcctgttgacatcactggtcagtttgagaagtggggagaagaagaagcagaactgaataagaagtaaggtggtgccatttctttggggtttttgagcatgcccatgttctatgcctagcctcgcatcttggccaccatgtgtcctggactgtcgaggaagggctggggacactgtcgtacgttgtgcagaattaattcaggataggcggctctgctaatgggagctgctctgggtgttgaagtgcatggagaatttcttttttgttttttctttttgagacggagtttcgcccttgttgcccaggctggagtgcagtggcgtgatctcggctcaccacaacctccacctcccgggttcgagcgattctcctgcctcagcctcccgagtagctggggttacaggcatgcgccaccatacctggctaatttcagatttttagtagaggtgggggtctctccatgtttgtcaggctggtctcgaactcccgacctcaggtgatccgcccacctcagcctcccaaagtgctgggattataggcgtgagccactgcgcctggccacatggggaatttctatggtgtgttttcaggtctgacttcacattccttcctctttgttgctcagcttttatgacaagaagacagcaattcacaaagccctctgtgacaatgttgacacccgcaccgtcatggaagagatgcgggccttggtcagtcagtgcaacctctatatggcagcccggaaagccgtgaggaagaggcccaaccaggctctgctggagaacatcgccctgtacctcacccatatgctgaaggtaagccaggccccaggcaggcgtatccctcagcctgtgtggacacaggagccaggccccaggactgggagaacagaggcctctggtgccccccagtgctgtgcctggtgcccagcacctctgagacgtggagatatgcttctgtcctctttggttcctggtgtgcttttcacgcgttagaaataacacccataagcggagcacagtggctcacatctataatccaacactgtgggaggccaggtgagtgtatcacctgagcccaggagttcaaaaccagcctggacaacatagtgagatcccgggtctataaaatatattaaaaattagccaggtgtggtggcacacacctgttttccagctgcttgggaggctgaggtgaggggctcgcttgagcccaggaggttgaatagtgaggtgtgattgcactactgcactccactctgggcaatagaggggagaccctgtctcaaaaccagacaaaaataagtaacatccatatagttgtccttactcagagctatttctttcctttgactccgtttccctctactcccatcttggagtttgaaaagcaaaaccacgccaggcgctgtggctcacgcctgtaatcccagcactttgggaggccaaggcgggcggatcacaaggtcaggagatggagaccatcctgactaacacggtgaaaccccgtctctactaaaaaaaatacaaaaaactagccaggcatggtggcgggttcctgtagttccagctactcgggaggctgaggcaggagaatggcatgaacccaggaggcagagcttgcagtgagccaagattgcgccattgcactccagcctgggcgacagagtgagattccatctcaaaaaaaaaaaaaaaagagaagcaaaaccagggacaaggcctcctctctgaacacatcctgtgcagagcccttccccgcagtgcaccttgaaaggccagcagggcctggactcaactcccctcccctctcctcctctttccttgttgttgggctccagtggcttctggctgaaacagagctggagagggtagctgtgagtcagggccatcctggagcaatgagggcaccctcaggctcgggtttctggggctcctggagctgctgcttccatctctttcctggtcttggggcaccccctcccgtgaacgaggaacacagctcacagctgctcgccacatgccgccttcatcttgccgcagcttcaggtcccatctgtttcttttcctagatctttggggccgtagaagaggacagctccctgggattcccggtcggagggcctggaaccagcctcagtgtgagtagcatgcagggtcctgccttctgcacctgctccctccccactccctacccctctgtgtccctctgaactgcccctcctctgtctgcccacccacaccagacccttccggacagcgcctcgagctaaatggcaattctggctctgagagtgctaagtgtggtcagctgccctgccggtgtggagggtctgctttggttgtgactgttggtttggggcactttgccattgtgctgtcccatgagcttggtcttggaccccaactacataggccgctgcttatttgcattttgctgcggccacttggcatcatgaacacacatgacttcgtcacatatactgacctgtattcagtaaatgcttcatcgaaaggctgcagagctcacaaacagcacagaatttacactgatggggagatacgccactgtctgcctcggtccccatggggctgggcagatgccctaacaggcccagtcctgaccctgagcccaggtcggtccacatggcctgagccaggaccccctgccccagagctgtggcccacaggtcagggggaggtcatcctgtagagccccctgtctagtgggtctgtgcggtgagaaaatccatccagaacaccctggcagtctgttgctggcttctgtttgcagttggcatgtgagcagacacacactgtcagtcctgtccttctgctgtagaacccctgtcccgtctgacacacccacagtcaggcttcttaaagatggacttccacctgctcccaggtcaagaatgctctttgactattcgattagaatgcagatctaaatatttaaatagaacaactgtaattttaattaaaacaggagcttaatacaaagtcaaaatgcaaaacctttttaaaatcctgtttcctaatgacaagtggtgtgaagagcccccatgcggatggagcttacagatgctcccccaggaaccaacttgcaaagagaaaacagtccgtgttgtaagaagtcctgccagagcacctagcccatgtgcctggtgccttttgccagccttagcgctagctagcttggttgtggtagttggtgtggtatttttgagacttcctgatatgaaccttctttggtgcttttaagaaaacccacatagcttctttgttctcttgcgcaaatgatactaagatatttattttctttaaaaacaaaaaaccaaaacacacctcctgggttaaagtcagcctgcctttgaactgcagtgtttttcatcttaacggctgctgtggttgtgggggtgccttcagcgtgctgtggacacgcatccgcatcccccaggcagcctcatttggcctttgcagtcagctgattgcgaagaagcagctgcggcgaatggtgagcctgctgacaaaacgtcctgtgcccacacatcatggccatttgacgttcatggattaacttccaaatccaaatggttttaggagcaagggaggcagttcctccatcttgtaccacctcagtgtcgccacacagccacctgctagcatgctcaggtgggggttgcagccccaggcgttcttgagacacacccctgcagccattctgagagttcccctccagtgcccctagggctggaactgagcctagcagtggggtgaatgcctccctttctgtccttccccaaggcttgtctgggctggctgtgtggtgggtggagatacagatcgaaaacccccaagaagtccaaagttcagatgcagaattgggtctcagggagcttggcttagacttaagggcttgctagcctgcctgacttttgcacttgctaaatttgtgtgtttctgtttttgagacagagtctcactctgtcgcccatgccagtccctgccctgtgtcgtggccgctgagctattattcagttatggatataggagtgtgagcagctctcagcgaacaaaaactcttctttccacagctggagtgcagtagcgcaatctccggtcactgcaccctctgcctcccgagttcaagtgattctcctgcctcagcctcctgagtagctgggactacaggcatgcaccaccatgcccggctaatttttttttgtattttagtagagacgggggtttcactatgttggccaggctagtcttgaactcctgacctcatgatccacccacttcgccctcccaaagtgctgggattacagttgtgagtcaccgcgcccagccagcacttgctaatgtttttattttggttactgagctgctgaatcagctaaggggcagggagcaaccttgctcaaaagcctaaaaccttttctgtcctattagaaaaagagaaatgctagcacagcatggtggctcacgcctgtaatcccagcactttgggaggctgaggtgggtgaatcacctgaggtcgggagttcgagaccagcctgaccaacatggagaaaccctgtctctactaaaaatacaaaattagctgggcgtagtggcgcatgcctgtaatcccagctacgcgggaggctgaggcaggagaatcgcttgaacctggaaggtggaggttgcggtgagccgagatcgccattgcatgccagtctgggcaatgagagcaaaactccatctcaaaaaaaaaaaggggaaatgctttgggaggccaaggcgggcagatcacaaggttaggagattgagaccatcctggccaacaaggtgaaacctcatctctactgaaaatacaaaaattagccaggcgtggtggcgcttgcctgtaatcccagctactcgggaggctgaggcaggtgaatcgcttgaacctgggaggctgaggttgcagtgagccgagatcacaccattgcactccagcctggcaacagagcaagattccgtcttaaaaaaaaaaaaaaaaaaaaaaaagggaaatatagtagaaaggtttttctatcctgtggccacctccccagtgttactgtgggtggtgaatctacgtgtagctgctaatgtgcatgtagatagtaggtgcttaatggagatcattcatcttaaacaagtgtatgtgtgaccacagatcagacgaaagcacggcccgggagccgccagcctcagcataggtaaggccccagcctggggagtgatgtccttgggctccttaggaaatagtccctcccagagctggcccctctgaaaccataaagacaagctgtttcacagcagcgtgtctgacctgaggaaagcagggcctgtcagcagctgggcagagcggcggcagacccacctgctgcagtagaaaggaagctcacttcatgctctctggcctgagagtctgtgtgactcgcacacctagcagggactgtgtgtcagggacgagagcgtccaggctctgggatgccggtcacagctgtagtgtgcacagcagcactgcccatgccagtccctgccctgtgtcgcggccactgagctattattctgttatgaatatgggagtgtgagcagctctcagtgaaccaaaactgttctttccgcagctcgaggccacagtcatgccctaccttcaggtgttatcagaattccgagaaggagtgcggaagattgcccgagagcaaaaaggtgaggaccagttgctggaaagagtgtgggagccactcccctcactgggctccccggaccgggcgtctcccccgaggcactatggcgttcaggccggatcatcctctgggaaggctgccccgtgcaccacagggtgttgaacggcatcccgggcctggacccaccaggtgcattagtaccacacgctccagtcaccacagccccacatgtccctgcagggcagaatcctcgagtgagtgcagctgagtgggcagtggggaccgaggatgtgatatgatgggccagggttgatttgcctctccttctctgagccgaggcagaatggtgggtcctctgaccagcccagtcaccacctgccatttggctcacactggggcttatttttgttcctggtgacctggtaggctgggtgcgctgaggtgtggctcgttcctgctgccgagtggagccgagctgcagcttccagggttcccttttctgctcaggcatgccagatgaatgcttgaacttggggttcacacagtggcccctcactgtccataagcagccattccttcatctttttgtttgtttgtttgtttgagatggagtctcactctgtctcccaggctggagtgcagtggcgcgatctcggctcactgcaagctccgcctcccgggttcacgccattcttctgcctcagcctcctgagtagctgggactacaggcgcctgccaccgcgcccggctaattttttgtattttttttttttttagcagagatggggtttcaccgtgttggccaggatggtctcgatctcctgacctcgtgatccacccgcctcggcctcccaaagtgctgggagtacaggcgtgagccaccgcgcctggccattccttcatcttttgaaatttctgagatgtgtgtggtttaagacttagaaagtgctgaatctgagcattcgttttgactgccagttttaagaaagtgttaaacacagcaaaaagcagcatcaggcaggcctttgcttcttcctgtgagtggttctgaattggtgagtaacagcacagctgggaacacacactgaggacttaggatgtgctgggccctgcccactgctttctgcacattgcctcatttaccaccatgatcctccaaaagaggaaaggagagccctggccgggtcacactgacctcgagtgctactccatcacctgctgtgctaattctccctccccagggggcctctgtgtggtgggaagtctgacctaggatccacctggtccccatctgtgcagagcccattatggagggtcacagtggggcagcatccaggcagggcatgctgaagacagagcagacagagacccagcaagcctctaggagaagctgcaccttgaggaaggatcaggaagcctgggtgggtggaggggccgagaggcggaggagccgaatctgggcctgtttcgggcaggggacagtggagcaggaggcaggagggcaggaaagagtttcgggagctcggggctccacaggctgcaggagagtgcaggacactgggtgagaggagaggctggccgggctgctgggctgctgggctgccacaagtgctctggagaggggcctgggcctgactgagcccctaacaggcagcggtgggcgcacttgccctgaccacataagcaccatcgcccctttccaacacctgatgccctcagcatttcaaagcactggaatcaaactgaaccaagcctggaccagcctattcaggaccagcgcagggctctccagcaatcttggcagcactaacttagcggcatcgctggggtcgtgggcttgggaagaccattcctggaggtcgcctgggcatttccacctgccttctgggggacatcgaaggccgagcccgggccccagctccctggggtcatacaagactgtgcacgtggccttggcttccctggcatgccacagccccgggagggcgctaaagggggactggccaggcacaagctcccgctcggtggcactgaccaggacaggacttgctcaggcctggagagtggcaccagccagccagcattggaagtagttcggttttgctttctgtttgcttttcacttttgttttgtggcttggagcaggtagatgggtgatgtggccccaggttaagatggtggtgatccctaccctgtacatcatcccatatgtgccttgtgagccagagaccctggggatccaggggcctcagaccttccgacggggcagcgtgttagaggtggctctggtgcaatcaccctgtctccccagcagcagcaaatagtgactgttttgttattcactgttaacatctcatggctggccaaagagaaagtgagtgtataacaagctcaggggtggccctcagatcagctgggatctgcttggcccaggccagatgctccacagacagacgaaaaagaaactgtttcccctggaaatacccccatggtccagtcagctagagagcacaggcctggcaaggagggcaatgggttcagggtttgaccaggagagaggcactgaagtgagaaagccaggggctgggccagggccctctgcactggggagatgatgccatttccccatcgccacggttttgttttcattatgttaaaatacacagctcagtgccattagggacatttacagtgttgtgcagccgccaccgtccatctccagaactcttcccttttcccaaactggaactctgtccccatggaacagcaactccacatcccctccctcagcccctggtgctcaccctctacttctgtctctttggattttactactccagggaccctacatgagtggagtcacacagtgtttgtcctgtgtctggcttatttcgctgatcacggtgtcctcaggtctatccatgttgcagcctgtgtcaggacctcctgcctttttaatggccaaatcatattccatggatggatgggccctgatctgtctattcttccatggaagaattctcatcacctttgcgttatctttgtagcccacatttctcttcagtaaatccctgatgatgatgtcattgtctgctcctctgccccagctctgctaacagaagccacagaggcttcttcctcagctcctcagaatccagacccagaggtcggtgtgggcctgaggggtacggcgtgtgtccctttcccccagggagtgtggcccgggaggctttcttggtgcctgctctgatgatcacccatggcgggtgggctggggtgctggccttgtggcctcccatgacacccgtgacagtgaccacaggtgctggcttgccttccttctaatgagggtgctatccaggggtggctttcaaagagtgaagggcaggcacctacctcagctcatgccccagtcagctgctcctcaggtggctgaggagggcctgttcccaggaatgatactgcagacaaatataaaggccattgttcccctaggtctctgcctggggaggttgaaactccggaagctgcccaaagtggctgtgcttatgagcgcggccttgaagcccaaggatatgcaattttttttttttttttttgagatggagtcttgccctgtcgctaggctggagtgcagtggtgtcatcttggcccactgcaacctccgactccctggttcaagcgattcttctgcctcagcgtcccaagtagctgggattacaggcacatgccaccacacccagatagtttttgtatttttagtagagatggggtttcaccatgttggccaggatggtctcgatctcctgaccttgtgatccacccgcctcagcctccaaaagtgctgggattacagtcatgagccaccgtgcctgcccggatatgtgaatattttatctagcagtgaatgaaggtgtggggtgcccagcaaggagctctaggggtctcagttatgaggacacagcaggaaaaggacagacgagaatggcagcatgtgcatggtcagtgctgcccaaaggcagggcaggcaggaggatggggtgggatggtgggggtcccagcaggctggggggcagggcacctgcccgcctagcacagttgggcgcagcaagctgaggggccagaagaaaactaaagggtgtggtgattccagcaaacccaaggtcagatttcagagcagaaagttgtcacttggagagcagcaagcatctgtcctgttgatgtagtctaggagatgctgtcacatcacctgatactctggagtctttctgagataggttggcatcccatttaccctgtaacacccaaaacttcttatgtcctgttctctacctgggcgttgtgcgtgggctgggaacgggaaaactcgggcagagcagagacacagagggggcgcctgctagagactgcgtgaggagcccactaggagaaccgtgggatgccgggcaagtctgcactgctgcgctctgaagtcagccacagacacatgggtttccaagcgaagctccctccccatgtgatggaggtcacagtcgccctccctgtcatgcctcctttcaccctcccagctgggtcaggtccccagtcagaggcagaggtgagcacagtcttgggaagcaacctgcggtccacccccaccgctcagccccgcctttacagctgcgtgcgcttcagccctgggagggctgattctcacagagctcgagctccttggtggtcctgggactcagctctcctgggtgccggtcaggacccccatcgcagtcccgtgtgcatttgggaaccaagtccttggggcttgagtgtaaatggtccttctgtaagaaagctgattctggcaccaacagagaggctgcctcagatgaagagtgttagcacccgaagggacccccaggcctgtcctgaccctcccacccctgctgtcggcccaacttgtgtccctttcctggaagaactgcttccggcggccagtgtgctatgcttcctcctggctctgccctgcacccccagaacagcccctgggcttacgggagacactagtctctgggcttctgcagccaatcaagctgctgggccctccctcccaagcactggaggaggtactcgttctgtgggccggggcccctccctcctgagcactggaggaggcacttgttctgtgggccacggcccctccttccccagcactggaggaggcactggttgtgtgggccctggctcctccatgtctgagggaactgctctgcttctcctacagtccctgagattctgcagctcagcgatgccctgcgggacaacatcctgcccgagcttggggtgcggtttgaagaccacgaaggtgggtgagcccttgctgtttgctacaaagttaccaggagcttggagaggtgtcacaaggagagctcccggggctgggctgaggctcatgcttcatgattgctgatgcagaatcccaaagtggcagccccatgggtcccccggcgccattcccacgctggccagcctggcaggggcaggggagcaccccgtagctccttcccactgctgcgtgtggtggtgtcacctcccctgcgcatcatctcccctaggggcctggctgcccgctgcccctgttgctaccgcctttgaagctctcagctgaggaaccagcctgtatcctgtacactgtcaacagattgcatgcttgttctcccacttcgtggaggtctttttgttccacagaaagttaatttttttgttttttattttcaatttttatttatttgtttattgagacagagtttcgctctgtcgcccaggccggagtacagtggcgcgatctcggctcattgcaacctctgcctcccgggttcaagcgattctcctgcctcagcctcccgagtagctgggattacagacgcccatcaccacgctcggctaatttttgtatctttagtagagacggggtttcactgtgttgaccaggctagtgtcgaactcctgacctcaagtaatctgcccacctcggcctcctaaagtggcatgagccacatgcccagccttagtttcagtttttatggatacataatagttgtacatatttatgggctatgtgtgatatttggatacatgcgtatgaggtactatgatcaaatctaggtaactgagatgtccatcacctcaagcatttatcatttctttgtgttacgaaccctccaattccactcttccactctgcccctggtaattttaaatctcagatgtcatgtcctattttcctactcctggctggcaagaccttcctaccttctcgttacaaaatgttctcgccaggtgtggtggctcatacctgtatcctagcactttgggaggctgaggtgggtggattacctgagctcaggagttcgagaccagcctaggcaacatggtgaaaccccgtctccactaaaatacaaaacattagctgggtgtgggctccttgggcagctgagacacgagaattgcttgaacccgataggcaaaggttgcagtgaactgagatcgtgccactgcactccagcctggatgacagagcaagactctgtctcaaaaaaaaaaaaaaaaaaatcacacacacacaaaccaaaatgttctcctgtgcttcactgctgctatggaggtttttgtttgtttttctcctgtgggccctcgctctgactgggcagcaccgcatggtctgggcagggcagggcagggcagggctggccccgcagtggggacggcccacagagcccagactcttctcacacgcagtttattttgcaggactgcccacagtggtgaaactggtagacagaaacaccttattaaaagagagagaagaaaagagacgggtgagtaaagtgaaaatgacttaagcgtgatatttgttgaaaatgtaaaaaccattgcgattattacatagtttactttttaagcattgatgtttacacttttattaaaatcccagtatttataaatgtcagaaagaaaaattaactagtatcttctaatgaaggacctcttttaaaaagattattccctcagtttaagtgaaaaccagtcacttttggcaaactgtgaagctgacttttttttttttttttttttttgagacggagtctcactctgttgctcagactggagtgcagtggcacgatcttggctcactgcaacctccacttccctggttcaagggattctcctgcctcagcctcccaagtagctgggactacaggcacgcaccactgtgcccagctaatttttgtatttttttagtagagatggggtttcaccatgttggtcaggctggtctcaatctcctgacctcgtgatccacccaccttggcctcccaaagtgctgggattacaggcttgagccaccacgcctggcccgaagctgacatgttaagatcccagtcccaccgtgccctcacctgagtggcgcgtgtcactgatgcatctccacctcctattcccagcatactccccacctgcaccccacaacgcccccaggatcagggatggcccaagttcctcggtgcccaataggacagaagaacaggaacaaaaacgcaatgtcagaatctctgggcacagcgcatggggtaccctgggatgcaggcagcaggatgagaggcacctgggcccccagtgcacaccatgggaggtgggccatgggggctgttgccaccagcaggtgggtccccaagaggcttaaagcaggagaccaccgtggagggcgagtttggatgccacagctctcaggaaggaggctctgggaggaactgaggaaggagaatcgacagggtggttgattgatagatgggatgtacaaggtcagggaaggcatctatgcctagccctgcactggcccaaggcacgaggggagagctcatgccagatccaagtgtgggtggctggagtttgcagtgctttggaggaataacgaactggaactctggggaaagctctagacagtggtgagtggtctgcaggtccatcctggttggcaggttgggaagagctgggcttgccctgtgaggttggctggtgtgactgcctcatcagggcccctccccattccatcacagtcactcacctagccttgggtctcgcctgccgtgctgtgctgtgaggtggcctggtgctggctgtgcagacgccctggcttgctgcactccctggcagagtgctcagaagcaggaaacagacaagaggagcgccagggtggcccggccagagcctcacaggccttgcactctttgtgctggcctttccactggccaccttggctgtggcctgtgacttctagtagctcctgtttcccaaccaagggactcttacctcaccaagctgctgcaagaaggcatccccaggcccgaggcaccatgggggaggggtcctgcctctccctgtaccattcccaccagcacataaacacatactaacttttaaagggaaaaagcagaaatcctgagcactgtgtctctggttcctccaagctcagtgcccagctcctcccccacctcagcccctttccctcggccagccctgctctccctccatctatctcgaaagagctcgatcctgttggccccagccccatcctgagtctctgagacctttgtgccttcctggtttcttttccctagctctgtgtgtggcgcctccccaggagaccttatctggtcctgcggcttctccaccatctatcttgtagccggtggcccaaaaacagtttgcccagctgcctacctgatagctccactgggccaggaagcctctgatatctaggctgtccaaagtaaatgtgattttcaactccccaaacttgttcctccttcctgccatggagggcgtgcctacctgatagctccactgggctgggaagcatctgaaacctaggctgtccaaaggaaaggtgaaaatgtgattttcaactccccaaacttgctccttttccgtcagtggagggcatgtctgttcgtgcaatggctcaggccagaacctcccaaagcaaccgagggcttccctcaccggcacccagcctgctggctccactaataagctctccctgcagcatcagactgtcctcgcccctgcccgggtgctgcctgctggttggagtgggctctggtctcctcacctagcccccaaggctgccctccgcccaccatccccatcctgccctggcgctcttgctccttcccaggtaccccaagacccactcaggataaccctcacagtgctgtcctggtcattgccttacagatcctctctccttgggccaggctcaccatgctggtccatttcttcatgttagtggtgcctggatcttttagcattggttctgtttgtctgcctgctgcatacctttgcatctagggcagggccaggcacccaggggtgccgctgaggatccccaaagggaatggaagagggtcggtgtgctgcccggcacatgggcttgtctccccacagtggggagggcctggtcagagttcagccctccatgccaggccctaggagaggggcttgtttggctagacctctcactccgagagacccagcagcctgaggcagccctgtctcatctggctctgtattgaccctccaggttgaagaggagaagaggaagaagaaagaggaggcggcccggaggaaacaggaacaagaagtaatgcattttgtttgggggtgagggctctactgggcaggagtgcaccctgaccccatgccctgtggctctctgtgcctccgtggaccttagccaggcccctgcagaccctcacagaaggagctccgctttctgcctccaccacccaaggcctgccaggcccttctcacatggggtgcagggaaggcctggccaaggggaaggctgtgccatgtggtcacaagctccaagacagcgtttatagacttactactattaggttttctagtaagctttccactattcctgtagaaataacatctggtttaattttaaattccttgtatgttccctccaccttggctttccccttcccatctttcatagcactctgaatctgagggcttggaagcaagttgagggctggaggtatgagcagatgtcgttcacagtgcggagccccaggtgctgctcgggggcagtgactgtgccgtgttgcgtgttctaggcagcaaagctggccaagatgaagattccccccagtgagatgttcttgtcagaaaccgacaaatactccaagtttgatgaaaatgtaagcatgtaagcatccttctcttctattcagaacttgatcagaccacattaaagtgggaggacaggaattttcaaccttggacaagcagattttctgtctgtagaaaatttggaatcaaatctgacacccgctttaggtccagggcctcctggcccaactactgagctccttccacagcccaggcagctaggcaagcccgtgccagggccccctccactggtgtggtgagctctggtccctagccctgggagttgtggccccgggccaagatccacccaggccctcacaagctggctgaagtgccgtggcgcagataggcctcctacccccagtttcttcctttgtcatagcgattcacagccactgcctccaaacctctaggcccctccctgctggcatttggatgtgtttgctatgtacctttgggccagctgtgtcagaactcagccatgggtaggctctgaggggcacagtgcccctcaccttaggcaggaagcacccccagactctggtcgcccctctcccattcttagctgctggagccagcactgccagatgagtgtgctggctccagagcagtgtggtgactgaatgtccaagcaagaggacatggctgcatcagggagatagacactttgagacgggagggcaaagaaaggggagttggggttacccaggtgcagaggagaccaatagccgctgtgctctgggttttcagggtctgcccacacatgacatggagggcaaagagctcagcaaagggcaagccaagaagctgaagaagctcttcgaggctcaggagaagctctacaaggaatatctgcagatggcccagaatggaagcttccagtgagggggcacaggactgactttttaaaccattgtggactagtggctgctgtctgcctcagtgacaatgtcccagcgctcctatcatgtttacagtcacccttgggtcctaaattaagagttgtgttcatgtaggttcgtgtcgtcgttggctctgagacattgataataaatttttctcaacagtgagaccctc

SEQ ID NO: 1147 - DNA, 35703 bp, Homo sapiens
agcaacagttgctaggatggggacgcactctctggtccctattctctttaaccctattcgtagaaccttagagcgtcagattggaagtgaccttagggattctttaactctccaactcctgcaatattgatagggagaccgaggtccagagaggggcagagatttgcccaaggcctagaatccagcattccttttatttttgtttacttatcttttttttttttgagagaatccaggacttttaatcccgtttaccgaaaaccgagctccacccaagaatgtaccagtctgtgccttaagcacggggaaagggcggtgggggtggagagagggataaggcacaggtaagtgaaggaaactttctttgagccaatgagatagatcccttgcggatataaagagctttcatatctccctgtcttgtttttatttttttctctttgcatttatcactatctaacatagtatgtcttatttattgatatagtttatcacctgatccttccactggaatgtaaactctaaaagcagggattttgttttgttcaccttcatgttcttagtgtttgactacaggctcaataaatattcgtagaagtgaacgaatggggctgaggttttggtgctcaagagattatattctaaggtggattcttaagagtgtggcttacagagtcaggttcgggtttcaatcctgcctgcctcggccacttagtacccaagtgaccttaaacattcgtttccctgaaccctagggtctacatctgtaaaaccggcggggggtgggaatactttcctggcaggattgtagttaaggataagtgaaataagcatgaaaagtggctagcacgatgcctgggacttagcaaatgctcagtaaacagaaacgattatttttgaaatgtgaaaatgaaccgttcagaacgatgggagtttacaggactagatttctgccgtttttttttttttctgtgtgggaggtgttagggtgggagggagggaagagggaatggaagactgtgtaaggtgggcttggttggatcagacactcgagtttggaacagtcaactgcgatctgggcacaagggcggtgaggggagcttatggttttacttggggtggaggagggggctaaggggaagccatgccccggaggaggttgaatgggcgggacagatcacggctccactcatggtttccctcttgctggaagtgtgacgactccctccggatctctgtaaaagcggggctatagtgaattctggcgaagggcccgcggtggaccaggaactggtgccagaattgcaaaagggcacctgcgcccggagtggggaggtgatgcgggggcggggcggggccctgggggcggggcgagtcgcggaggtgccgccttggggcggggcggtgacagaaggatggatcctgggggtgaggattgactttgggggcggggcgagagtgcgaactggagtctgaggctgagcggtgacgcaaggacgattctgagggtggagcgaggggaggggattggctcttggaggcggggcggtggcacgaggctagcccttgggggcggggcggtggcgcaagattgaccttgggggcggggtgggggcgtgggttgaatcctgggggcggggcggtggcgcggaatggattctggggtcggcgcgaggcgctgaggtgcgtcctgagggcggggcgatgacgcagagcgaatcctgggggcggggcgagaccttctagatgcgtcccggggagtgggcggtgacgcggtggcaggttctggggacaggcggtgaccccagaattgaccctggggacagggcgaggcgcggaggcgtcctgaaggcgaggcggtgacgcaagagcgaatccttggggcggggcgaggcgttggagatgcgtcctgcgggcgggacggtaacgcgggggcggggcggtgacgtgaggtcagtgcggggatacggggcgggttctggggcggggacgcagtggtggattctggagcggggcggtgacgtggggcgggttctggggcggggcggtgacgcggagcgtgttctggggcggcgcggtgatgggaggcttggccctgggggcggggcgaggcgcagaggtgcgtcctgagggcggggcggtgacgcaagagcgactcctgggggcggggcgaggccttggagatgcgtccggaggcggtggggagcgaagactgacccggggccgtgacgcgggggcaggccctggggcgggggcgggtcctggggactggggcgggcggccgaggcccggaagcggactgaggcggcctggagtcttagttggctactcgccatggacgaagcggatcggcggctcctgcggcggtgccggctgcggctggtggaagagctgcaggtggaccagctctgggacgccctgctgagccgcgagctgttcaggccccatatgatcgaggacatccaggtgcgcccccggccccctgtccccgcgctgcacggccgggtccccacgcccctcgaggaggcgttgtgcgggagcctagccttccctgtggcttcaaacccctcagcggagccaaagaatcccaaacacctcttagtcgggtgttcgctaaagcgattccatgccatactcagtcagcgtacactgttagtgcttgtgtttcttgtgtaaaggaaaaatgtgagacacatcttgagaactttgaataagaaacaattcatgaattggagaacatcagactgaaagagctttagtgttgcaatgacaaaacgtcagaggcaagtatttattgggaaaatgtggaagcaaaataaagaaattatttgattggtttgcagttacaaaattgccttttttttttaaggtctgttaattgactgcttttggctggtcttaagttttatttctctctaacataagcatttatcagatatgacccaagttaaattttgcttatgtttgcagtttaagcaagatttaggtcacttaggatacctgattggttttgtctgctcaggaattcttcatggttggtctccattttaatttacgttaatacttgcgaggaaggaggcgtgtgcgtttttacttttctagcatagaggtttcgggaacccactttggcatcaggctgcctggcagcgtgttcttgggccagtcacttaccctctttgagccacagtttctgggctgtgaaatgggaataagaataatactgtcataaggactaaatgaaataacggatgtgaaactgtagtgctaggcacagagcgggggatcagcgtaccctgccctctttggccagccccttctgtgttcagtttatgttttgttaagaggttttggaaatgaggggacctgatgcagaatggagaataatgaagtcaaacatttgaggttttgtttaaaagcactttcccatctttgtctcatttgaccctcatcacaggcctgtgaggatgcaggagatatttcctaccatgaggtgcagtaggtgtgagtggctggctggatatccctggccagtgccctggcccagggaaagagtctttaaataattgagtatcatatgagtaattattcattaataataaaataagttttgtgccttctgtgtggcccctactggggaacagtaatggtttgaggccacagtccttgccttcaggaatgttcacggggatcacaaactcaaatgcccatggaggaccaatggatgggcgtcatagtggatagcctttgcactgccctccgtctccagctgagtatggccatatcaacaaatggcccagtattgccacatcttacacttattttgaggcagggtctcactcttgcccagcctggagtgcagggatgagatcatggctcactgcgaccttgacctcctgggcttaagtggtcttcctgcctcagcctttagagcagctgggactttaggcacatgccaccatgcctggctaattaaaaaaaattttttttttgtacagataggagtcttgctatgttgcctagatgagtctcaaactcttggcctcaagtgattctcctgcctcagtgttgggattacaggtgtgagccactgtacccggcccagctttcacatcttaaaaaagaagctgaaaatcttgattcctctgtcaaattccctggcttaaaatgttagcaacaaattcagaaattttttaagaaccttgtgggaaccacaggttgccattttgccattcagtatggctgaaaaacaggcaggttttggaaccagttggatctgggctctcatcctggccttgttacatattagcaagttgtaaaaaaccacaaccaatgagccaaacaaacagaaaaaccctatgactcagtttccctgaaattttttaccctaaaaagttgggaagttctaatttaactctataaagttattgagggagaaaaagatgaaacaatgcatttaacacagtgttgacctcctggagtgttcagcaaatgtggagagaaacctaaacaccaccatctatttgcatgtagccaactgttctgctagtgagacttaccttctcagtggcactgtaggtctgtgctgttcccaacagtagccattagccacatgtcgttaaaggtaaatttgaagtaattaaaattaaataaaactaaaaattggtagggtcaagccttacagggcctgtgggtttttctcctcgtgtgcggagatgagagatcgtagaaataaagacacaggagaaagagatagaaaaaaagacagctgggcccgggggaccactaccacctagacgtggagacagggtagtggccccgaatgcctggctgcgctgttattggatataaggcaaggggacagggtaaggagggtgaatcttctaagtgattgataaggtgaagcaagtcacgtgatcataggacagggggcccttcccttttaggtagctgaagcagagagagaaggcagcatatgtcagcgttttcttctatgcacttataagaaagatcaaagactttaagactttcactatttcttctaccgctatctatgaacttcaaacaggaaccaggagtacgggaggaacatgaaagtgggcaaggagcgtgaccatggaagcacagcaccacagggaggggtttaggtctccggatgactgcgggcaggcatggataatatccagcctcccacaagaagctggtggagcagagtgctccctgacgcctccaaggaaaggagactccctttcttttttttttttttttgaggtggtgtcccactttttcgcccaggctggagtgcaatggtacgatctcagctcactgcaacctccaccttccgggttcaagctattttccttttttttttttttttttttgagacggagtctcgctctgtcgcccaggctggagtgcagtgccgcaatctcggctcactgcaagctccgcctcccgggttcatgccattctcctccctcagcctcccgagtagctgggtctacaggcacccgccaccacgcccggctaattttttgtatttttagtagagatggggtttcaccgtgttagccaggatggtctcgatctcctgacctcgtgatctgcccaccttggcctcccaaagtgctgggattacaggcttgagccaccgcgcccagccagggttcaagctgttctgcctcagcctcctgagtagctggaattacaggtgcgcactaccacgcccagctaatttttttgtatttttagtagagacgggtttcaccgtgttggtcaggctggtcttgaactcctaaccttgtgatctgcctgccttggcctcccaaagtgctgggattacaggcgtgagccaccgcgcctggcaggagactccccttcgcggtctgctaagtaatgggtgtctccccagacactggcattaccgcttgaccaaggagccctcaagcggcccttatgcgggcctgacagagggctcacctcttgccttctaggtcacttctcacaatgtcccttcagcacctgaccctatacccgccggttattcctaagttatattagcaatgcaacaaagagtaatattaaaagctaatgattaataatgtttataataatgattgataattgtccatgatcatctctatacctaatttgtattatgactattcttattctaactattttctttattatactgaaacagtttgtggcttcagtctcttgcctcggcacctgggtaatctttcgcccacaaaaattcagttcctcagttgtactacccaagtgcttaatggtcatgtgatatatggttactaaataggacaatacagaccaagaatatttccatcatcacggaaggttctcatagacagtgctgctgtaggatagttgaggacacggtgccatcttatccctgtggatcctgagaacctgtccagtgctgggtatctgaggacaggtggcagataaccagactcttccttcttagtgactgaccccaccatcctgacacctctcaatttttttttttgagacagggtcttgctctgtcacccaggctgaagtgcagtggtgctatcacagctcactgcagccttatctcctgggctcgagccatcctcttgggagcctcagcctcctgagtagctgggactacaggtgcgtgacaccatacctggctttttttttgttattttttgtagagacagggtctcactgtgttgtccaggctggtctcgaactgggctcaagctatcctcccacttcagcctcccaaagtgctggaattgcaagcatgagccactgtgcctggcctgcctgtcaaccttgacccttgctctgtcttcacagtccccccagtcagtgcccatgtcctatggaccctctctctttgtatctctgctttgtcctttcacttctctctattctagctgcaccatctttgctgcctcctgatctggctatggctcactcctttccatttttcaccctgacccctggatgactttttgaaaggccatatctgtctctgtcactccattcttaaaactctttggtggccgggcatggtagctcacgcctgtaatcctagcactttgagaggctgaggttggtggatcgcttgaggtcaggagttttgagaccagcctggccaacatggtgaaaccctgtcttaaccaaaaaatacaaacattagccaggcatggtggtgggtgcctgtagtcccagctacctgggaggctgatgtgggagaatcatttgtacccaaaaggtggaggttgcagtgagctgagatggtgccactgcattccagcctgggtgacagagcaagactcctcaaaaaacaaacaaaaaaacaaccgatggctggccacggtggctcatgcctataatcccagcactttgggaggccaaggctggaggatcacttgaggtcagttcaagaccagcctgggcaacatggtgaaaccctgtttctactaaaaataaaaaaaaaattagtcaggtatggtggtgtgtgcctgtaaccccaactactccggaggctgaggcaggataatcgcttgaaccttggagttggaggttgcagtgagctgagattgcaccagtacactctagcctgggtgacagagtgagactccgtctcaagaaaaaaaaaaaaaaacaaaaacaaaaccaaaaaactctttggtggcacctgacaggtctcaggatgaatttcttggcctggccacacaaaggccttgtcccttgccactatctacctcccacctcataagactctgaattcgctattcacttcatgatatcctcagccccatgtgcttccctctgggcacttgtctcttgttgtgtcattgctgatttgtctgattgcattccccattagaaatttgctccttaaggactgagactgtccatggcagcattttcagcacttagcatagtgctgggcatcttttgccctgcaaaataatgaacagatcagcaaaggctggtaaatggcacacagtgcacctgcagctccattgctgcccacgtgcctgattgtttagacttacagtagctgggaaatggggagacaaggtgagagccatataaaagtacgtggataattagtatcctgcctttctttccaaacagcgggcaggctctggatctcggcgggatcaggccaggcagctgatcatagatctggagactcgagggagtcaggctcttcctttgttcatctcctgcttagaggacacaggccaggacatgctggcttcgtttctgcgaactaacaggcaagcagcaaagttgtcgaagccaaccctagaaaaccttaccccagtggtgctcagaccagagattcgcaaaccagaggttctcagaccggaaacacccagaccagtggacattggttctggaggatttggtgatgtcggtaagtagcaagagagtgattggtgggtgggcatgacacgtagtcatttgggactcactatgagtacagctgggtgggctgagattcagaatttaattttagcattgtctttctgaatgttcatagggatggcaaaattctgggaggttttcaggaggttgaatcttggcagcccctcctctgaaaagcatgtgttgaggtctgttttggatgtcccaggttttttgtttttgtttttgttttttttcctgcctttgagatagcaggccccaggttttgatcaatgtttccagagccatctattgttttggatttgcctttcagtctgggtgggtagcctggactacctcatgtctgggggcaggagacaggcctcagttgtatctgccccatacaaacagacatctgcaaagtatttacccttaccttcttcgtttatagcaaccttgcaaggcaggtatcattagacccatccttgttgatggagaaactgactgaagctcacggaaattaaacactttgccaaaggtcacacggctacatccaacaaaatgcataaatcccaagagtaagctgggtgatttttacctatgcatacccacaggtaactaacacccatatcatcaagatgaaaacattccggggtcctgtaagaccgttgactctctttccatttcttcccactttccctttcccaaggtaatcaccgttctcatctctatcgccagagatcccttttgcttgtccttaaacttcaatataaatcctatatagtcttatatgctcttgagcctggcttctttcattcatcattgtatctttgaaattcattcatattgttgtacatatcggtagttcattctttttaatttctacatggcattctgaataatccacagtttatttaaccattttcctactgatggacatgtgggttgttttcagttggggctttgttcccatggcagcgtgtggagctctagcacttcctgtttcatgggtgtctggtggaccattgcatggtatcaaagttaataatcataatagtaatggtgaacattattgagtaattgctatttgccaggcaccgttcggagtgcttacataaatgatctaatttaatctctccatctctcttgtaaggcaggtgctttgctgttagaaaaagtgagccacagattgggagatgacttgtgccaaatcacacagctagtgaggagtggagacagggctgcagcccgggcttacctgttctgtctgctctgcagggtagccccatgtgtgctttgtgggacacacctcattgatccgactcatgctggtggacattgtgttgtttctgcagttagccttgcatgtgcgtctagttctgactgcaggatatttctagaaatggaattgtgtgttaaagggtacttgttcctgtccgatagatgctaccaacttatacttcaaaaatatgtcattttagccaggtgtggtggtgtgagcctgtaggacaagctacttgagaggctgaggcaggaggactacatgagcctaggaattcacagccagcctgggtaacttagtgagatcctatctctaagaaaaaagaaattgaaaaattgtgtcttttttttttttttaattgaggcaaggtcttctgtggcccaggctggagtgcagtggcatgatcacggctcactgcatccttgaactcccaggctcaagcgatcctcccactcagcctcccaggtagctgtgtgcgccaccaggcctggctaatttttttgtattttttgtagagacagggtctcaccatgtggcccaggctggtcttgatctcctgggctcaagcaatcctcccatctcggcctcctggatagctgtgcatgttatccctggccattttttttttttttttttaagagggagtctcgctctgtcacccaggctggagtgcagtggcgcaatctcagctcactgcaacctccacctcctgggttcaagcaattatcctgcctcagcctcctgagtagctgggactacaggcagccgccaccatgcctggctaatttttgtatttttagtagagatggggtttcaccatgttgcctaggctgatcttgaactcctggcctcaagtgatccacctgcctcagcctcccaaagtgctgggattaaaggtgtgagccaccactcccagcccatgcctggccaattttaaaattttttgtagagatagggtcttaccgtgttgcccaggctgccctcaaactcctgtgctccagtagtctgcccacctcggcctcccaaagtgctggaattacaggtgtgagccactgcactcggcccaaattgtgtcattttataatctcaccaactgcgagtgaaggtgaccactttcccacattcttgccaacagtgaatattgacattttttcctgtgtgatgggtaaaaagtgctgttttctttcaacaaaaattcaccaaaactcattcatattgttgtgcatatcagtagttcattctttttaatttctagatggcagcagttcctgttctgaataatccacaatttatttaaccattttcctattgatggacatgtgggttgttttcagttggggctttgttcccatggcagcgtgtggagctctagcacttcctgtttcatgggtgcctggtggaccattgcatggtatcagagttaatattcataatagtaatggtgaacattattgagtacttgctgcataatggtgatttttgggcaatccactaaagcagagaaacagacaaacatgataagggtaggaagctgcatttgcttgaagtgtaaggaagaagactggttctggaattggccatgtgcattaccatcctgtaaaggaggcaggcagaatacaaagctcatctgttgttatttggttctgggaaatgtcaacgtgagtcatttaggaccaacagtcagaatttgaaacttcctgtttttttggaaggtgttttatttcctgtttcttgtgaatatttattcctagtaggagcttaattctgaagggtaaataacaacagcaatagtaagatcacttaattttttttactttattattattattttttgagatagggtcttactctgtcacccagggtggagtgcggtggtgtgttttcggctcactgcaacctctgcctcccaggttcaaacaattctctcacctcagcctcccaagtagctgggactacaggtgcaccaccatgcctggctagtttttgtattttttgatagagacaaggtttccccatgttggccaggctggtcttgaactcctgacctcaagtgataaacccgcctcagcctcccaaagtgctgggattataggtatgagccagcacggctggcccaagatcactttaaataatgtgaatatcactttgtagtatacacagtgttttttcaggtcatcaaaaccaccctgtgccgtggtagacatggcaagcccgtctgtcattatatgctacttacaggggaggaaactgggttctgagagcaacagtcacaaagtgagttccagtacagagctaggacttgggcctaggtcttctggcttaatagagcgactgtcccattttccatgagctgctgagagatgtcctttttagatgctgggccttagactccagagtactgcatgggaatgtttcccaaggtaggtttcatggtgacccacaaaggaagagctgtgtattcatatgtatgggaaggtctggctgagcaagaatagggccagcagcagagcctttaataagtgaatacaggaaaggatgctgtaggtcagtgtttcacactggggacgatttttccccgacctccaagggacatttgacaatgtctagagacaaatctggttgttatagctgagggtgggtgggtgctactggcatctagtgggtagacagagatgctgccaaaacccaacagtgtacagagtagctctgcacaataaagaagaatctggcccaaagggttagtgtggtggggctgagtacacacactgcactcatacatattcattgagcatgagtgtcaatgaataataatgtggacacatcagttttattgagttgtcaagtgtgtcgggtattgttctatgtgcctcacatgtattaattgtttgaggtgtcatcacaatcctatgaggttggtagttgctcctattatcctgtaatacagatggggaaatcagaagcccagagactctgagctccttgcccattgtgacacaggtgctaagtgttggagttgggatttgaacccaagtacctcagactcactccatcactgtctcatgaagaacaaatggctcattctctttcttgtccctatatttgtgccattactcattagctcacacaaatgtttactaagtacctgttgggttctaggtgttggggatgcagcttcgaacaaggatgcccagtccttgccttcaggtggagaggggcaggtactcagttcatgcttgcctaatttggtctttattcacggctgtgggtagtgctatgaagctgaacacggtgctttagaggtgcatcattaggggacccaccagagagagtggctttgtctttgtatattcaaaggaaaatgccttttccttcagaatggaaggaactttcttagtttcagacgtgatgccttgtgtgtaactgcttgttccagccagggcctcttgcccgggaggactgggagaactgttggtggctgtgttctcatgattctccagagaaagagaaccaatagggggtgtgtgtatgtgtataaaacagcatcttttgttcaatgctgcatccccaacacctagaactcagcaggtacttagtaaacatttgcatgagctaatgattaatggcacatatacacagacaagaaagagaatgagccgttcgtttttttttttttttttgagacggagtcttgttctgttgcccaggctggagtgcagtggcgcgatctccgcacactgcaagctctgcctcctgggttcacgccattctctcgcctcagcctcccgagtatctgggactacaggcacctgccaccatgcccagctaatttttttgtattttttttagtagagacagggtttcaccatgttaaccagtatggtcttgatctcctgacctcgtgatctgtccgcctcagcctcccaaagtggtgggattacaggcgtgagccactgcacctggccaagccatttgtcctttatgaggcagtgatggagtgagtccgaggtacttggttcaaagcccaactccaacacttagcagctgtgtcacagtggacaagtagttgagtctctgggcctctgttttatatatatacatatacacacatacacacacggatatatatagaaagatatatgcattttttttgtgtgtgtatatatatatatctttatctaaaaacatatttattacaaggaacaggctcatgcaattatggacgctgagaagttccaagatctgccatctgcaagttggagaccaggaaagctggtggtgtagttccagtctgagtctgaaggcctgagatccaggagcaccaatggtagaagtcccattccaaaggcaggagaagactgatgtcccagctcaagtagtgagacagagagagatcaaattctcccattctccactgtttcgttctattcaggcccttgacggattggacgcggcccaccatcctggggagggccatctgctttactctgtctacctattcaaatcccattctcatccccaaaacactctcacaggcaccctgagaaatactgttatatttaaccaaatatttgggtaccctgtgatctagtcaagttgacctgtgaactcaaccatcagtggctttctctgctcatgccttgcctgggttggaacttccttgaaagtagaagttggcttttcagccctacctggcttcttggtctctttgctctggggctggtggctgtgctcacctcccattacaactcagggtctctgagcccccaattcccctctggcaaatggggatgtgtgccagtacttctgtgctgaagggcctgctctgaggagtaaatgaggcagtgtgtggagggacttcacatggggcctcctattgagtgagccttgggtcttgttggtcagctctgcttccttctgtgatttctaaattgccaagggctggggagggccagtcctagggcatcttcccttctgtagggtcccccagttcccctgtttctttctgtgtcctgattgaaaatcacagagtgctttgaccaccctgtgacccagccagctacaggtttttcccagcagacctgagcccaaacctgggccttaaacattctcaggcattgataaaggtatctaggtaggctgggcatggtggctcacgcctgtgatcccagcacttggggaggccaagacggatggatcacttgaggccagtagtttgagaccagcctggccaacatgatgaaaccctgtctctactaaaaatgcaaaaattagctgggcgtggtggtgtgtgcttgtaatcccagctacttgggaggctgaggcaggagaattgtttgaacctgggagacagaggttgcagtgagccaagattgtgccattgtactccagcctgggcgacagagcgggactctgtctgaaaaaaaaaaaaaaattaggtgtggtggtgtagtcctagctacttggatggcttaggagggagggtcacttgagcccagcaggcaaagtttgcaatgagttgagattgtaccactgcactccagcctggacaagagagtgagactccgtctccaaaaacaaaacaaaacaaaaaggtatctaggttatcacccaaaacaactgaaagaaaccagccttggccctgagccaaattccttaaaccctcatataaactccttaccctgacctcttcactttggaccaaacctaggtagacacctgtttttttttctcgcctccgcacctcgaggattgctttggccagatcgccctggcatttattgcttctttctttggaatcccaactggccccatcttaggacagtttggggcactcccttgtgggaactcttctgctgccacttctggggtgattccagcataggttcggagggacgaaaccccttctttcccttgggtggcagagaggatgtgcttgccctcttctgtttgtgttggagacctgggcacatgcccagtgactcaggctggaagactgattcttttgcacacacttagccatgtgtgtttattgtccccatgggagtggccatttcaggagaaactggtctcatgcaccttgtatctgaccatgtcacccaacttgaggggccctgaacatgccatgctcctgcatcctccctgcctttgctcatgccggggcctctgcctggagtgtctcctctccctctttctttgggcaccccttggttgatttgctccctccatgggcacctgtagcccttggcctcttgagagcagtcattttgctttatcaatagatatttctaatttggggaatgagtgaattcctcagtagtggatagtagttatatttttggggtacagcggaattttggaaatgagcaaatgttctcagaatgaagtctgtggatgaataggaattttcagggtaggtaaaaccatttctaactttaaaaatgggatgtgaatgggatgtgagtgcttttctgctgtggcctttaagctggcagaatagttcagacctgttctaagcaaggaatggcactgttattggaacaggagtatgggctccactgcaacttggaggtggccactgtattctccttgtttaaaaaagaaaaaatgtaggccgggcgtggtggctcatgcctgtaatcccagcactttgggagggtgaggcaggtggatcacctgaggtcaggagttcgagaccagcctggctaacatggtgaaaccccatctctactaaaaatacaaaaattagccaagcgtgatgcaggtgcctgtactcccagctacttgggaggctgaggcaggagaatcgcttgaacccaggaggcagaagttgcagcgaggcaagatcgcgccactgcactccagcctgggtgacagagcgagactctgtctcaaaaaaaaagaaaaaacatctcataaccttttaggctggtggccagtcaacttcttgctaacggaaatgaaaactcttttgatgttgatggaaaataatcatctttattcatttattcattctgcaagtatttcctgaggacctgctgtgtgctgggcccctgtggactcgcagacagtgagcatccgctctcctgagcttctctcacctctttctgctctggaatttcttctcaatgagaccacactatttctatactctctggtgtctggcttttttcacgcagcacgttttctttcttttttttttttttgagatggagttttgctcttgttgcccaggctggagtgcaatgacgtgatctcgactcactgcaacctctgcctcccaggttcaagcgattctcctgcctcagcctcccgagtagctgggattacaggcgcctgccccctcgcctggctaatttttctttttttttttttttttttgtatttttagtacagatggggtttcaccacgttggccaggctagtctcgaactcctgacctcaggtgatctgcctcccaaagtgccaggattataggcgtgagccaccgcacctggccttacgcagcacattttcaaggttatcccgcattgcgtgtatcagtgaagcggtgtcactcgtctggggtaaatacccaagattcattgtcttcacagccacggaagactaggacacggacatacagtgaggttcagagtggaagtataataggtgaaagaaagagaagagctctgtctgctgcagagagaggggttccagtgaaatgggttgctgtttctgcaatgaaatgcaaggggttttaaagatgagcctgaggagatggtgtctgatttacaaagggcacaaagattggtcagaccaggtgtttcatttgcataggatgcataaaactggttagggctaggtgtgccatttgcatgtggtgcgaaaagctggccagccccactccaatcttgtgttatgcagatgggttctctacctggccagtgccatgttgcctacttctttactgtcttgtggtaacaaaagggaagatagagcctctttgctgagtatatctggccccctggtagcccttttctattggcacagctgctggcattcactcctgtgagcttccagcttgcttatctatgtctgcagcttgatttttcaggctgctcttttttagaaaagaaatgatttgaggctgggtgcagtggctcacacctgtaatctcaacactttgggaggctgaggtgggtggatcaactgaggtcaagagtttgagactagcctggccaacatggtgaaaccccgtctctactaaaaatacaaaaaaattagccgggcatggtggtgggtgcctgtaattccagctacttgggaggctgagacaggagaattgcttgaatctgggaggtagagtttgcagtgagccaagatagtgccattgcactcctgcctgggcgacaagagtgaaactccgtctcaaaaaagaaaaagaaaaaagaaaaaaaagaaaagaaacgatttggggattttgttaaaagggaaattctgccgaggactgttttaccctcactatctgcctaaataatttctttctgtctcctgtatcatcagtagctcattcctttttaggctgtgtaatgttctcttgtgtggctgtatcacaatttgtatatctaccaaactgttgttagattggttgtttccatgttggggcgtgatgaataaggcctcagggaacattttggccaagtcttttgtgcccgtttgcactccttgctctttgatatatacctaagggtggacttgctgtcagagggtaggtgtgtgtttaactttgttagaaacctctaaacagatctccaaggtggctctcccaccagcagagtctgagggtctgagttctcgctgctccgttcttggggggctgtcctcacagagccccttgcccctcctctgctgtaacccaacattcatgtttctctctttctctgcctcttcaggtgctcttgagagtttgaggggaaatgcagatttggtgagtctccatgaaatttgggccagtagctcgggctctgggcccttccctccccacccctcaggtccttccctgcaggtgtgtcaggagcccagggaacccaaccctaggcagtgcagtgggggtctggtctcagcctccctgactccggcccagcgcctgctggggcagattgttcatctctgcgcttcctcatctgcaaagctgacagcagaagcagggcagacctgatgaggggcagtcatcgggatccagaccaagtcgccactctctcattcacaagtatttattgtgtggctcccatgctctgtgctggggccacctgggaaggagccatcagtcagttaggcgagagagaagttagacaaatgagtatataaatagaaatagtgataagtaccatcaacaaaagaacaggctgccttgagagaattacaaggggactgagcctggggagagggcagccttgggtgcctccaggtggcctgggcatggttctgctgacagagttctcaggtacaccccggcctaggtgacccgtgaggtcctttgggatgaatgctcatggctgttggatttccaggttaccagctcccttcccttaataccaagatgggggggtcaccttctagtgctagtcttccctgcagttgcttctcttttgccctggaatgccgggtggagaccctgctactccttgtgcgagagggcagaccccgttttcttcccgcctctccagactgtcctctagggagcgtggggagagcccgggtttacgtgggtccctgtgctggcaggcttacatcctgagcatggagccctgtggccactgcctcattatcaacaatgtgaacttctgccgtgagtccgggctccgcacccgcactggctccaacatcgactgtgagaagttgcggcgtcgcttctcctcgctgcatttcatggtggaggtgaagggcgacctgactgccaaggtacactcactatctgtggagggagacagggtggggggcagtgggtggggaagtatcttttgagggactccaaaagccagctgactccccaggcgagcccttacatctggaggaccatgggaggtaggacggcccagcggctacaggttcaagttcagacgcagaagtccgggtttgaggactggctctctcggccacctgctgtgtgacctcctgtgcctcagtttccttgtctggaaagcaggaatagtacctgcctccttgggttgttttgggggttagatgaacagtgcccaagcgtagcaccttctccccaaaaatggtggctattacgactgctgggactgtcagcacttcggtactggccctgggaaaccgagaaagtgctctgcccaggcgtttgggttgggccctttgttgttttattttttggggggggcgggggcacagagtcccactctgtcatccaggctggagtacagtggcgcgatctcggctcactgcaacctccacctcccaggttcaagcaattctcctgcctcagcctcctgagtagctgggattacaggtgtgtgccaccatgcctggctaaatttttttttttgtatttttagtagagacggggtttcaccatgttggccaggctggtctcgaactcgtgacctcaaatgatccacctgccttggcctcccaaagtgctgggattacaggcgtgaaccaccatgcctggccaggctgggcccttttattgttaggaacggtccagtctgcatctagacctatccgtgcttctggctcacctgcagccctctcttgtagaaaatggtgctggctttgctggagctggcgcagcaggaccacggtgctctggactgctgcgtggtggtcattctctctcacggctgtcaggtaggaagcctcccactgttccctgggcaggcattgggtactggccgtgccaagaggctgtgcaggggccatgtcccttcttgtgtccaaaacacccttggctttgtggaaaagggctgtggggccctgcccacctcctgttgttttcttgggagccatgtggtcctctgaggagttggctgcaccgtcctgggcaggtcggtgttcctgggagaagccctctgggagagggagggcagagaccaggtctgctcacgaagctcctgcacccagagtttgttcagaggcgggtacagcacacatgttgtctcagctcctgtctctgtcctgtgaggcactgccccaggccccttgctgctggtgggactcaggacaccaggcccactgggggcttggccccttacgtatttgtcactgtgattaagcccttaccccttactgggcctcagtttcctcatcttttaagttgaggagttggacagatcacagttataagctggggcctggagtccccctgtggtctgcacggtgttttgaaaactggcaaatttcacataaaaatcaggatttctagtttctcttgacaaaccgcaaaggtctggcctgacgaggccagcatcttcagccagtaaaactccagcctgtggctgggcagggctttccctttggtcctttctctcataatatggtccctagagctcatgaagaatgtggactcccaggccctaccctggacctcttcattccaagtccgcccagcaacaaggtttccaggtgatttccatgcccttgaggtctgagctgaactgatttaaagcagccactctcagcgttgagctgcctcagtcagaggggcctggaggaccatactgctgattaggaggtctgggtggggcccaggaatcacatttcttacaagttcccaagcgatattgatgccgctgctgcaggggccaaactttgagaaccactggtctagaggccgcagccagcactctccaggcacactggcccctagaggcacatgagtttgacatgcaaccccttgctgtcaaggtgtctttccagatgctgaccagggtctttccagaaccaacctgctctgtctcaatcagcctcgtgcccctggctttgaccttccaaatccttggctcccacaaaacctctgaacaggctgttggattcctactccaacttcttggttttgtaaccagggttcttggtcttctaggccagccacctgcagttcccaggggctgtctacggcacagatggatgccctgtgtcggtcgagaagattgtgaacatcttcaatgggaccagctgccccagcctgggagggaagcccaagctctttttcatccaggcctgtggtgggggtaagcagctcctcagcctccctctgggtgggtctggtggggagggagccgccacctgcttctttctccagcctgcccctcacagggcccatgaggtctctccaggcagtcagagggtaccacacatggtccctttttggcagcacctctgtctggctggagcaggccctgctctgtctgctttgtagaggtcagagtcttctgtttcatggcacagtggcatcatgggctcaagtaactttggcagcttcaattccaaagacttggcaaaaagaaagcagaagagagaggagaaacctctttttatttttcttgtcaccattctcctgacctccatcaactagaccccgtttccactatcccagagaaagggtggccacagctaaactgcatggagaaaccaaagaatttaaatattggaattttcaaaagtgtagttgtgggggttcgaggaacatttaaagattacttgggctgggtgcagtgtctcatgcccaacactttgggaggccgaggcaggaggattgcttgagccaggagttcgagaccagcctgggcaacacagcgagaccctgtctctatttttgttttgttttttaaatgtattacttggattctttgtagttttgctgtatgctctaattttaaacttaactcctattacagtgttatctgattttcttataaaaaaagagggaagagagacaaacatggggttcctagtttgtgggtcatgacaggaatatcagggagcgctagaaattctgtcccagggagtcccctctgccctaggctctccacggactggaacattcagaaggtatatcagttccttgcctccagcctgatctgccagagaagtgagcactgttataccatagcgctgtccagctcgtccagctgtgacatgggcacctgtggtctatttctcctgtgcacatccaactgccccatccctattccacgttggtggagttgggtggaggctacctaggagagcagtctctggtcacatcattcatccagtaagtgtttattgagcaccatctgtatataccaggctgtgcgttaggtgctggggataggggaaaaacagagtttcagtctcctggaatttataatttgacatgaactgtattaagtcactgtcatgacccatgcccataacttgaccacaagtgattgagaacacttgattaaccctggatgggctactgacctatctatcacacagccctgggccagttcatctctagacagctcagcaaatggggaaaataacagaacccactcccaagctcaggtgatcctcccacctcagcctcctgagtagctggggctacaggtgcacactaccatgcccagctaatttttctattttttttttgtagagacagggttttgccatgttgcccaggctggtcttgaactcctgggttcaagcaatctgctcacttcggcctcccaaagtgctgggattacaggcgtgagccactgtgcccaggcaactttaataatatttaatgcactaattggtgtgtgtacagtgattggttcattttaataactgaaaacccagcctgccccccgctcccaccccggaggacccagtgtcacataagagtcccccaccccgctgtcgccagcagagttccctcaggacaacagtaacaggaagtgaggaaggctgccactctcggggctgtagaaaccctgctctgcctcacctcctgtcttatccacagtgtgtggtccagcaatgctcttccttcggagcctccggtccctctttctcctatgaatcaaatgaaagacagaaagggcaggggaattaggaatgcaggctgagcaggcatacctactttctggacagttagtcagtcttgtgctcctcccatgccccatccagtctcagtctcaacagcagggagggcctttgtcacgtgaatatctgctgtcactcttaggactcagtagcagggcttccaaggcctttggtgacctggcccctgccacttcaccttccccagcctggcatgctccgagtccccagcacggcccagccttcccaggatgtccaggctcttgcttgctcttctacctgctcccctggctaactctttttttaaaattcatttttacttattttgttttagagatgggggtctcactatattgcccaggctagtcttgaactgttgggttcaagtgatactcccacctccgcctcccaaagtgctgggataacaggcatgagccaccgtgcctggcacctggctgactcttaatcatccatccttctggttacaatttattgtcacttccctaaacaccccctttcttggccaaagtcagggttagctggcctttgtgctcctgcagcctctgtccctcccctaccatagcactgtctcattgtattgagatgggcttatcccctggtcagctctgaggggagggccaggcctaccctgcagccaggcccccagcctggcacagagcccacagtctggttgcgtctcatgtggattctaatttgaatgtaaaggagaaccatacaaaagcatctgtggtggttcacgcctgtaatcccaacagtttgggaggccaaggtgggaggatctcttgagacgaggagtttgagaccagtctctatcataaaatttaaaacattagccaggcctggtggtgtgtgcctatggtcccagctacttgggatgtttaggcaggaagatcgcttgagccctggaggtcgaggctacagtgagccatgtttacactattgcactccggcctgagtgacagagccagtctgtcacctgtctctaaaaaaataaaaaataaaaaaaaaatatgagccaaatttggcataatgtagatttccatcattaaaacaaaactcacagaaaacagcaagatttcaaagccagcatgcagtgattaagatatccctttggagtcgggtccttgctttgcctccgcaggctgcgtgacctggtgcttaacgcagttaccacatggtggcgccacgtcagctgagagcagaaatagaaaggtccccgttcttcactagtgcctggcgaggggtctgtttacatgcatcagaacacctgtcctgggttttgaggactcttgtattgctattttataactcactataatactttaaaaatatttaatttaaaaatcatttaataattaatttaaatataataataaataatttaaaaatcatttttaaataataattttaaaaccctccaacatgtcatccacccattcattaggaggtaacagcaccagggctgaaaaatgtgcattaaagtcgataactttggtgtgcaacgtcagcgtgataggcaaccaagtagccacctctctgaggctgagccgtcaattttggggtgacccctctttgggatttgagagatcgggctgagaagacagaaagcaatgacaatatgctgcagtggtcgtggattttctgtgcggagggaacatctcctcctactgtatatttattcttgtggggaatgagtcctgccctacggggagttttgcattaatgaggctctctaagaaccgaggctctccaagaaccaagccatgcatacagtgcagaacaccctaggcaaggccttcacatcagatttgtgggctgaggctgacacgtgaacggagctgccttagcgccccgcctgaccccctctttcctttcccccacaccccctgctctgatctgctgtctcttctcagcctctctgctcaccctgtctcttctggccattcttaacggcatcccccacttaggcatccctccgcccccacaggctgccaggcagacccagcaccatcacattcacgcctcaggcctccttgctgtgctgtttcacgtcattcccagacacctggggcagattccggagtctctaccaagaaaacaaccagaagcaatgaaccacaaaatctggagaaaaacatggctgtcacagatcaaagaggcccccctttggaggctgggggcctccgtgagaagcagtgggatagttgagaggcaaaaaacatggggcagaattccgcgcccctcatatcagctgggagaatgccaatgaccagtggtttctgagctttagctgtgtggggtaagaggtcaatagattttggtgttactattatggggttgccagagccacctctgttcctgccagatgggcccccagctcctctgggtgaactgtgacttccctcagtcacatagatccagccatgcaaacctgcctgcgttgcggccacagcacttgctgtctctctcaccaggaccgttctccctgatggcatcagggcctggatcacagtcacattctccaggagtgtttttgcaggggaccctctggatcactcctactccaacttcagcctatttttaaaaaaatttctctttttttttctgcagtatgtatacatagttaaatatatatttatattttttaaccaaagctcttgttagatgccttctttcctgagtagccctctgtgctccgccttaccccacccaccatgagccctactgcagaagacctcatcccggaagacctccgtcagtgtctccacttcagtagctctgtagctgagccatgtggggcacaagtcctgccaggacctctctgttttccaagcttggcactgcctttggggagtctagattttaaaatggaaaagacaaaaaatatggcaacctaaaaaagaaaataattcagaatgttataagctaatacagccatctcatttttgcatcttccttttggattccagcccatgagcacagtctgcttttctcagctaacgttatcccttaagcagttccccagatctccatggccttcatcatcactagctcaaatggctttataatgggccattttcatgacatgcactaatttactaaaccattttcctaatgtcggccatttaggtgatatctaatttttggctcacacaaccacaggtgtcttcatatagaaagcttttgactgcatttgaattattttcttaggaaattactggattagaaggtgtaaacatctccatggatttcattatccatgacttggtgtctatttggtatttttctgatggcttctttgattctagaaaaggatttgccatagtgcaagaagtacaaatgataacactaggacaaaatagagagggaacacaaggagagaagaaaagtaaaagtttggattccaaaaatacatcctaggatgtcctgcagctttctacagttctctaatgtacaagtgaattaaaaatttaaggtatacaacgactgattttagagataaaatcactttgcagatgtaaagaaacatggaaaaatcccagccattggtaatagtagactcaaaaatgaggtaggtcaaagtcccagtcagcctctgtctggggggaaaccccttaacttatctcagtctcagttgcctaattacataaaatggaatactgatagctacttgctagaggtggcctgcgcattttttacgctttccagccgccattggaaataagatcattggccaggggcggtggctcacgcctgtcatcccagcactttgggaggctgaggcgggcagatcacgaggtcaggagatcaagaccatcctggctaacacagtgaagccccatctctacaaataattagccaggtgtggtggcacacgcctgtagtcccagctacttgggaggctgagacaggagaatcgcttgaacccaggaggcgaagcttgcagtgagccatcgcgccactgcattccagcctggatgacagagcgagactctgtctcaaaaaaaaaaaaaaaaaaaaaaaaagatcactttcaagatccatggaatctggtgttctatagttctatatctggtatttgcaagacagaagtcaggaatagagactccagacacatttcttcccttggttgtcttaaaggggacactgtgatcttgacagcctgagtaaagggtttgagtgagtgcctatgatatagtggacagtttcctcaactatatttctaaaaaaagacaagttttatgtctttttaaaaattgtggcaaaatacatataacataaaatttactatcttaaccatttttttggggtgattgcttgagctcaggagtttgaggctggagcgagttaagatcatgccacttcaatctgggcaacagagcaaaagtgtgtctcttaaaaaaaaaaatgcctgtaatcccagcactttgggaggccaaggcaggcagattgcttgagcccaggagtttgagaccagcccgggcaacatggcaagatcctgtctctacaaaaaatacaaaaattaactgggtgtggtggcacctgtagtcccagctacttgagaggctgaggtgggggatcacttgagcctggcaggtcaaggctgcagtgagctgtgattgcaccactgcactccagcctgggtgacagaatgagactctctcaaaaaacaaaaacaaaaacaaaaaacaatcccccaaaacaaaacaaaaaaccactgccctctccccactgaatggtcctgccacccttttcaaaattcatttgaccacgcatgtgagggtgtatgtctgggctctattcaatgacattgacctatgtctgtctttatgccagtaccatactgttttgattactgtagctttgtagtaagttttgaaatcaggaagtgtgagtcctccaattttgctctttttccagattgttttgtctatttggggtcccttgagattctcgtgtgaattttaggatagattttctatttctgcaaaaaacatcattggggttttgatagggattacatttaatctatggattgctttgggtagtattgagatctttaagttttctaatccatgaacataggatatatttccatttatttatatcttttttttttttttcttgagacagagtctcgctctgttgtcagactggaggactgtggcgccatctcggctcactgcaacctctgactccctggttcaagcaattctcctgcttcagcctcctgagtagctgggattacaggcacacgccaccacgcccagctaatttttatatttttagtagagacggggtttcaccatgttggctaggatggtctcaatctcctgacctagtgatccaccagcctcggtctcccaaagtgctgggattacaggcgtgagccactgtgcctggcctatgtcttctttatttttctttctttctttctttcttttttttttttttttttagatggagtcctgctctgttgcccaggctggagtgcaatggcacgatcttgactcactgcaacctccgcctcctggattcaagtgattttcctgcctcagcctcccaagtagctgggattacaggtgcccaccaccacgcctgggtaatttttgtattttttaatagagacggggttttaccatgttggccaggcttgtttcaaactcctgacctcaggtgatctgcctgccttggcctcccaaagtgctgggattacaggtgtgagccactgtgcccggctctttttcttttttgagactgggtcttgctttgtcacccaggctgaagtgcagtggcgcgatcactgcacactgcagcctcaactgcttggactcaagtggttctcccacctcagcctcacgagtagctgggaccacaggcacatgccaccacacctggctaaattttttattatgtgtagagatgaggttttgctggtctggaactcctgggctcaagggatcctcctgcctcagcctcccaaagtgttgagattacaggcgtgagccatggcatccagccttctttctttcagcaatgttttgtagttttcattttacaagtctttcatcttggttaagttaatttctaactattttattatttttgatgctattgtcaatggaaccatttttgtaatttctttttctgattgttcattgttagtgtatagaaatggaagtattttttgtggttggcttcgtatcctgctaatatgctaattttatttgttctaatagtgtttcatctttagggttttctgcatataaaatcataccatttgtgagtagagataattttactccttctttccaatttgaatgtcttttatttctttttcttgcctccttgctctattaacttctagtaatgtgttgaatagaagtggcaaaagcagaaattcttgccttcttcctgatcttatagaaaaaggtttcagtctttcaccattgagtataatgtttgctgtgggtttttcatatatggcttttactatgttgaggtagtttccttctattctgagtttgttgactgtttttatcatgaaagcttgttgaattttgtcatgtgcttttttctgcatcaattgagatgatgatgtagggtttttttcattctcttatgaaccccaaaaatctgagacaggtctcagtcaatttaagaagtttcttttgccaaagttaaggatgcacgcccaggagacaggtctatgcctttctctgaacatgaattttagggttccaaatttaaaggggaaagggcaggatattgagaagtacacagttttcaggtaagagcagggtagggggaaatagtcattcaagcatttgtctggctcagtgaatttgcatttttacgtaaggtaacatagggcaggggaaaatgcagggaacctgcatttttacgtaagataacaaagacaaatggggcaggggaataatcagatatgcatttgtgccaggtgggcagaggggtgatgcctctgtaaagataagctatccatttacattgccgtggtgaattttatcagacaactatcttggagctcaccaggaatttccttgtgggcaaaatatgggagaggtgtgtagcttttcatcttgtagccatcttatttaggaaccaaaacggggaggcaggtttgcgtgacccagttcccagcttgacttttccgtttggcttaatgagtttggggtcccaagatttattttcctttcacactgttaatgtagtatattgcaccgactttcatatgttgaaccatccttgtctgtgtatttcaatgacaagaggtgtttgtttctgcttcctgcagagcagaaagaccatgggtttgaggtggcctccacttcccctgaagacgagtcccctggcagtaaccccgagccagatgccaccccgttccaggaaggtttgaggaccttcgaccagctggacgccatatctagtttgcccacacccagtgacatctttgtgtcctactctactttcccaggtgagcacatcagaagggctcgtcctcgcagccagtgggtcttcccgtctgccctagaggcagctgtgtggtgagagaaaagaccagggtatgagtcctggttctgtcttttgcccctctgtgaccctgagcaagttacttctctctgagcctcggctcaggctgagcgggcaaggatgcgcgctgcaaggaggcctgcgcccttgggttcctatgcctcacttgcctctcctctgcctgaccctgcctctgccttcgcatctttagcaggggaataggaatcgtgcctcaggggtttccatgggaattaaacaaggtggctggcacgtcactgagcacagtgcggggcacgtagtagttgcagcaagcggtagtttccttccttcttttttttttttttttttttttttgagatggaatctcgctctgttgcccaggctggagtgcagtggcgcgatcttgggtcactgcaagctctgcatcccgggttcacaccattctcctgcctcagcctcccaagtagctgggactacaagcacctgccaccacgcctggctaattttttgtatttttagtagagatggggtttcaccgtgttagccacgatggtctcgatctcctgacctcgtgatccacctgcctcggcttcccaaagtgctgggattacaggcgtgagccaccgcgcccagcctttttttttttttttttgagacggagtcttgctttgtcgcccaggctggagttcagtagcatgatctcagctcactgcaacctccacctcccgggttgaagtaattctcctgccttagcctcctaagtagctgggattacaggcatgcatcaccacacccagctaatttttgtatttttagtagacacagggtttcaccatgttggccaggctggtcaagaattcctgacctcaagtgatttgcccacctcggccttccaaaatgctgggattacaggtgtgagccactgtgcctggcagtttccttcctttcttatgtcttggatgagtcacttgacttttccaagccttggtttccttgctgggaaaacaggaattatagccggaatcaggggatggtcatgagggtgaaataagatcatgattagggcagagcctcaggggccaggctgctcctgttggatgtatgtatgagtcaaggtctggagggcgcccgagccagcgtgcatggccagaggggtggtggggagccggcggaggggtggctctccagcagtgttcagccctcctccctccaaaggttttgtttcctggagggaccccaagagtggctcctggtacgttgagaccctggacgacatctttgagcagtgggctcactctgaagacctgcagtccctcctgcttagggtgagtgctgccttcctctgcaaaggagaggggaggctgctgaggggcagcgtgtcctcctggggctggggatttggggtgagcagggcaggcccaaaccaagggtaaaaggtagtagactcctgcctctgagccttggagtcggcacttttgtgtctctttatgagaggcatcctgcctgtggtgacgtttgccctttattcaaagagttgccttccctgtctcctccaaggtccccaggttgacacctcccgctcctccactgatggagctggtcctcagtgccagcgcaggatggctctgtccagaccctgaaggcgggtcatgggcccctccctatatcctgtgggcatcatgtagtcttctactcttgaccctcaagaattgtgaacccctccttgtacatcgccttctcaggaggccccagtgaggaaacagatagggaagggtggcctgataggcccagtcctactccatagaaacccgactcagagcagttgcttcctctgagggtcctgtggccttgtggctgccttgggaggcagcatgtatgggccccagctgctctgctcaggtattcatgccacgagaaggggctgcgaggctggggccactcctggctccttgcaaatatttcagtctgatttgaactttatgaatttggaaattttgaattttgagttttttaaaggtaaagttgaggtgcgtattctttaagccctcctgctcaaagaggctgcagtttgagctgtttttaaggtgcgggttgagtggacattccccccagcccctcttgaattcttccttcagtccagagaactgaactcacagagctctccatggtcatgtcttacaggtcgctaatgctgtttcggtgaaagggatttataaacagatgcctggttgctttaatttcctccggaaaaaacttttctttaaaacatcataaggccagggcccctcaccctgccttatcttgcaccccaaagctttcctgccccaggcctgaaagaggctgaggcctggactttcctgcaactcaaggactttgcagccggcacagggtctgctctttctctgccagtgacagacaggctcttagcagcttccagattgacgacaagtgctgaacagtggaggaagagggacagatgaatgccgtggattgcacgtggcctcttgagcagtggctggtccagggctagtgacttgtgtcccatgatccctgtgttgtctctagagcagggattaacctctgcactactgacatgtggggccaggtcaccctttgctgtgaggctgtcctgtacattgtgggatgttcagcactgtcccttgcctcaatgccagtaacgcgtcttcctgagtggtgccaaacaaaaaggttctcaggtgttgccaaatatgtcctggggtataaaactttcctcgcctgacaaccactggtctgtagggatttttggctacacacaaaccagtatcgctcatagatcagcaaaccggggcctactagagtctgaacagctgtaatctatgaattctaagtgaaattttaaaaattgttaatttttcctatattgcattaattttaaaaaataaatctgaggcaaatatggactctcttttgcctatttcttccctcattttgctccaactctttcttcttccttacaaaagagacttttgcttttttcgaaacatttccccatgtttttctggggtctcgctatgttgcccaggctggtctcaaactcctgggctcaagtgaccctcccaagtagctcttactacaggcgtgcaccattgcacccagccccatttattcatgtcttatttcacttgatccttatcccatcccaggaaggcaacaagggtgagaaccctgtgctcagggaggttaggtctcttgtccaagggaaaacgattatccagagaagagacctggccagaacctgggtcccctgagtcctagccatgcttcccatgtgccttacttgctgaagcacccccggactgcagtgtgaacgtgctgtgcaatagtgacacgctgggcttccccacaaggctccaccctgaggtcttttaagctgtccttatgccagcctatttcttgttttttgggcctttttttttggagatagggtctcactctgtcgcccaggctggagtgcaatgacgcaatcttggcttattgcagtctcgacctcctgggctcaagagatccttccacctcagccacctgagtagcttggactacaggtgtgcaccacctctcccagttaatttttgtatttttagtagagacagagttatgccatgttactcaggctggtcttgaactcctggactcaagcgatcagcctgccttagcctcccaaagtgcaggggttacaggcttgagccattgcgcctgacctatttctggttcttagggccctggatgttaggatggatttctgaattaataataataataaaaccctcatcaagatgtgatttgcatagttgtcactttatataatattattttccttctgtgacctttccaagtctgaaacagtcccagggacttcttttggttagttatttgcaatcacctgcaggacacacacacaagaaaattgtcaggttcacgtaaccacagagctgtgcgtggcagtttcctgtctctgtcctcctgggctaagctactcaagtgagtcacaggcagcccacactacagtagctcctgcctgaggagttcagatgatgtttcggagaaaaagatgcaatcacagcttttcattgacctgttagggtcttcctgtaaagggggtcttagccaggagtcctgtgtgggcttcaggtcagggggccttcgaaccccctaaaaattatatgccaaatgtgcggatggcatatttttagatttcatttgtttctcatcaaaactgctgtttgcaaggcagttatgcactgtggttggggctataactgtttccagaggctgttgatcagtatctgttaaactttttttttttttttttgagacagtcttgctctgttgcccagacgagtaca

SEQ ID NO: 1148 - DNA, 9728 bp, Homo sapiens
agtctgcattgagcttggctcaggaaagaagggaaatccaggcggggcctgttgggcccaggtcttgagctcttttggctccagagttcccagcacagtcatggatcaaaactcagtgcctgaaaaggctcagaatgaggcagacaccaataacgcagataggttctttcgctctcactcatcacccccacaccacaggccaggccacagcagagctctccaccattacgagttgcaccatcacggcgtgccccaccaacgtggtgaatctcaccaccctccggagttccaagacttccacgaccaagccttgtcctcccatgtccaccaatctcaccaccacagcgaggcacggaatcacggcagagcccatggccccacaggctttggtctggctccctctcaaggcgccgtcccctcccaccgttcctacggtgaggactaccatgatgagctccaacgtgatggcaggaggcatcatgatgggtcccaatacggtgggttccatcagcagagtgactcccattaccatagggggtctcaccatggcagaccccaatatctcggtgagaatttatcccactattcctctggcgtgccccaccacggtgaggcttcccaccatggtgggtcctacctcccccatggacccaatccctacagtgagtccttccaccacagcgaggcttcccaccttagcgggctccaacacgatgagtcccagcatcaccaagtcccccaccgtggctggccccaccatcaccaagtccaccaccatggcaggtcccgtcatcatgaagcccaccagcatggaaagtctcctcatcacggagagaccatttcccctcattcctctgtggggtcctaccagcgtgggatatctgactatcacagcgagtaccaccaaggtgatcaccaccccagtgagtaccaccatggcgaccatccccaccacacacagcaccactaccaccagacccaccggcaccgagactaccatcagcaccaagaccaccacggcgcgtatcattccagttacctccatggcgactacgtccagagcacttcccaactctctatcccacacacatcccggagcctgattcacgatgcccccggccctgctgcttctcgtacaggagtcttcccctatcacgtagcacacccacggggctcggctcacagcatgactcggtcctccagcacaatccgctcacgtgtcacccagatgtccaaaaaagtccatacccaggatatctccaccaaacattcagaagactggggcaaagaagaagggcaatttcagaaacgcaaaagtgagtctttgctgggccccccatgccaactcctgctgcctggcgcaggatccagacctgatctcggccccgcactgtccttccgcagatcgtaaggcccgaccctcctgcacaggtcccccactggctattcactctcctgactgttcatggtcccatcttttattccttgaattatgtacctctttaggccatgaggtgtttgttcattcagtcactgccttatttattcatatgtctaccagtcaaacattgatactcatccaatgtgggtgtgtggcctgcctgggccatggcagcatggggaaaaattcaacacagtcgctgccctcgaggggcccaaaactaggagtggtcacttagctgaccacagatcatcctgtgctcggggcctgccctcagaacatttaccatggtggattctatctgtccagatttctcccactcacctgtgagctgcttgagaacagagattaggaactaatgcctgaatgagggccttattggagggcaaggagggaccatggcctttagctcatacgccaccaaactttcttcctagtagttcaataaacatgacaacaggccaggcgcggtgactcacgcctgtaatctcagcactttgggaggccgaggtgggtggatcgcttgaggtcaggagttcaagaccagcctggccaacatggcgagatcccgtctttaccaaaaaaatacaaaaattagctgggcgtggtggtgcacccctgtaatcccagctacttgggaggctgaggcaggagaatcgcttgaacccaggaggcagaggttgcagtgagccgagatcgtgccactgcactccggccggggtgacagtgcaagactccgtaggaaaaaaaaaaaaaaaaaaaaaaaacaaataggctgggtgcgatggctcacatctgtaatcctaacattttgggagtccaaggtaggtagattgcttgaggtcaggagttggagaccagcctggccaatatggcaaaaccctgtctctaccaaaaaaatacaaaaattagccgggtgtggtggtgcgtgcctgtaatcctggctacacaggagggtgaggcaggagaatctcttgaagctgggaggcggaggttgtagtgagccgagatcacgatactgcactccagcctgggcaacagagcgagactccatctcagaaaacaacaacaacaacaaacaaaatatgacaacagtctcaggaacaagcagagaggggcaagtgtgttattaaatggggacaggaaaggcagcccagaggagggaacatttcatcaggacctgaaagggagaggataagtttaccaagaggatgggatgatgaggagggtgggttttccatatgtaagttgccacgtgagcaaagaaaggcatggaggcataggagtgggagccctcaggatccccagaagccaactccaaatccccaacaggctggcccctgccacagaaggcacaggaccagcctgttggggatttgctggccaggctggtctcaaactcctggcctccagtgatccgcctgcctcaacctcccaaagtgctgggattacaggtgtgagccattgcttctggccacaattatgcccattttaaagacaacaaaactgagacatagagcagtagtgaagtcgcgcagctgcttacccagagctggagagagcctgggaatccgggcttgtgtgaggctcatgctgaggagagagagggcactgggtgctggggacagccctgagcgcacccctgtgtccctgcagagtggtacttcatggccttggactccatattcttctgcatctacgtggtggaagccctggaggccaggagttcgagaccagcctggccaacatgttgaaaccctgtttctaccaaaaatacaaaaattagccgggcgtggtggcaggcacctgcagtcccagctacttgggaggctgaggcacaagagttgcttgaacccgggaggcagagggccagcaagcaggcaggagtgaccatggacgctgagccaggctggggggtgcctgggacctcgtgtcccctcttgcacacacttgactttctggccctgttcctttcagccggccggctccagcggacccgcaagaagggacactctaccaatctcttccagtggctgtgggaaaagctaaccttcctcattcagggcttccgggaaatgatccggaacctgacccaatccttggcctttgaaactttcatcttcttcgttgtctgcctcaacaccgtcatgctggtggcccagaccttcgctgaagtcgagatccggggcggtaagagccagggagtcctgttcccatggagaagccaccgatgctcttccaggacctccgtgggcctgatccagtgccgggcggtttataggactcagctcacttgatcctcacccctgggaagtagatggccttacccagtattagagagcgtctcagaaagaccccgctgaggccggcccgagacagaaggacccgctaggcgggaggcggtgctgttcgcgccgcagccactagggagcgcatctgctccaaatgtgcggctgagggcgggcgggcgcctggagcccgagcttcgcggaagggccgggagcccgagaaggccctggaggggcgaggatgtaaggtcggggaaggctgggccctccaacgccgtggagcagggtgaaggacaggagctgcccggctcgctgtctcaggctccattctaagcacttcgcttgtgttcatgcatttaacgctcacaactctatcaagtggacttcaattatccccattttattttattttattttagacggagtctggctctgtcacccaggctggagtgcagtggcgcgatctcactgcaacctccgcctcccgggttcaagtgattctcctgcctcagcctcccaagtagctgggactacaggtgcccaccaccatgcccagctaatttttgtatttttggtagaaacagggtttcaccatgttggccaggctggtctcgaactcctgacctccagtgatgcgcccgcctcaacctcccaatgtgctgggattacaggtgtgagccactgctcctggacacaattatccccattttaaagacaagaaaactgagacacagcagtagtgaagtcgcgcagctgcttacgcagagccggggagagcctgggaatctgggcttgtgtgaggctaatgctgaggagagagagggcactgggtgctggggacagctctgagtgcacccctgtgttcctgcagagtggtacttcatggccttggactccatattcttctgcatctacgtggtggaagccctgctcaagatcatcgccctgggcctctcgtacttctttgacttctggaacaatttgggtgggtgcggccggggccaggctgcgtgtgtttagtctgggggaggctcgggacgagagaaggatggggaagggggcgctggcgttgggagcccgccaggctcaggcaccccgtgccctcagacttcttcattatggccatggccgtgctggacttcttgctgatgcagacccactccttcgccatctaccaccaaagcctcttccggatcctcaaggtcttcaagagcctgcgggccctgagggcaatccgggtcctgcggaggctcaggtcagtggccacggctcccacctggggtggggactccaaaggaagaggggacacagaccagggccccaaagaaatccactgtgacctgctcaagggatgggggcgcaggaggctgctgaccccagcctgcttctgccttctgtcatgcactggaatcagccccttcatttttccagagaggggccaggactcacccaagtcaccaacaagtcaggagcctcctgccttcagcgccagctgtggctgctgggcagagacacacacccccgcccctcaccgatgactcagtccccactccttctgcccacagcttcctgaccagcgtccaggaagtgacagggaccctgggccagtccttgccgtccatcgcagccatcctcatcctcatgtttacctgcctctgtatcctggtgctgcaggggctggggtgggggcctgaggggctgcggtgaaaggggtgcggggagcagggatggggcaggacgaggggcgctggggtggggatagcactggagagctgagtttggccctgaacagccagtcctcttctccgcggtcctccgggcactgttccgcaaatctgaccccaagcgcttccagaacatcttcaccaccatcttcaccctcttcaccttgctcacgctggatgactggtccctcatctacatggacagccgtgcccagggtagggcaggccccaggctgcagggagggccggggattggcggggtggaccggccagggctcagtgaccccatcggcaaagtggggcttctgatgcctgcatgtccgggtatgggaagggagcaggtcgtggttgggggtggcgagcacagcctgactgtgccctctggcctgctccccctaggcgcctggtacatcattcccatcctcgtaatttacatcatcatccagtacttcatcttcctcaagtgaggactcacccctgctctgctgcccagcaccacccacacttcctcctctcccctgggacccttaccccagccctctcaccctggtcatgccacgctgaacccacaagaagtaccgggtgcccctctcctctggcctcctcgctgagggcacacccctgtccctctccccagcctggtgattactgtcctggtggatagcttccagacggcgctgttcaaaggccttgagaaagcgaagcaggaggtaccgagtggggtgggacaggtggaccagatcaggaagctggaggagtgaggccaggggcctccagggttgagcaggcctgggactctggcagatctgaggcctcttcttcccagagggccgcccggatccaagagaagctgctggaagactcactgacggagctcagagctgcaggtatgggcctggcccgccctggccccacctgcccgtccgcagtgggggccagtctctccatccccctaacctccttccacagtcacagaattccagactcagttttagagttttagaatttgagactcaggaggactttagtccagaggaccctagaacaatcctcccaaagccagttaaactgcttgtcaagtcttttttttttttttttttttttttttgagatggagtcttgtgctctgtcgcacaggctggagtgcggtgctgcaatctctgctcactgcaacctatgcttcccaggctcaagcaatccttccatctcagcctcctgagtagctgagactgcaggcatgcgccagcacactcgcctaatgttgttgtttttttgtgtgtgtgtgtattttttagtagaaatggggttacaccaggttggccaggctggtttcaaactggaactcctgacctcagatgatcctcccacctcagcctcccaaagtgctgagattgcaggtgtgagccacaacacctgactgtgcttgtcaaatcttaaaagacctacctggggccgggcatggtggcttacacctgtaatcccagcactttgggaggctgagacgggcggatcacctgaggtcagcagttcaagaccagtctggccaacatggtgaaaccctgtctctactaaaaatacaaaaattagctgggcatggtggtgggcaccagtaatcacagctactcgggaggttgaggcgggagaatcacttgaacccgggaggcagaggttgcagtgagccaaggttgtgccactgcactccagcctgggcggcagagtgagattccgtctcaaaaaaaaaagaaaaaaaaaagttctaattggccaggcctaagttacctgtccttgaagctggggggtggggctaacttcagccagaggacatggactgaaagggggtatccctgaagctggaggtggggctaacctcagccaaaggacatggactgaaagggggtagaagtgatttgttcctcaagacaattggggcacttcttccagaagtggggtgggtgctagacgggcaaacaaagggaactgcatcgtgctgcatgcccggagaagcaacctcctggagcagcctggccagaaactccattagcccttatcttcctgacacatggggttcctctgcctcctctccaaatccaggccttgacctcacccttctttctctacatccagagcccaaagaggtggcgagtgaaggcaccatgctgaagcggctcatcgagaaaaagtttgggaccatgactgagaagtgaggagacaggaagggagcgaggcctggggtctgagggtgaggcctgggggcctggctggagggctggagggaaagggacattgcctgcccctctagaaggggatggagcgctgaggcttgtggatgagcctgtgggtgcaacgaggagaccctgggtggcttctgcacatccagaggtgtgtgtgccacctggctaatcccagcagcaggggtgccacccattccttcaccccagaaccatccccaacctttgtcaagtctgggccctgtgagggctccagggacccaaagaggacacagattcagcccctgcccatgaggaccccacctctaaagacctgtgttgggccatggagaatgagtagacttcagccaagtggagggataatgaggcggttggaggaacagcttagatcaaggcctggaggtccgatgctcaacctccattcctgtccacttgagtggccagctgggccaggacatctggggactcatgctgtccccatgagaaggatctctggggagccaggcctgggagcaccaggagccctgcccaagcctggtaaaccctcatgtatctttctctttttttcttttttcttttttttttttttttgagacagggtctcactctgtcacccaggctggagtgcagtggcacaatctaggctcactgcaacctccgcctcctgggttcaagcgattctcccacctcaccctcccgagtagctgggattacaggtgcatgtcaccacacccagctatttgtgtgtgtgtatatttttttagtagagacagggtttcaccatgttggccagactggtctggaactcctgacctcaaatgatccacctgccttgacctcccaaagtgttgggattacaggcatgagccaccgcgcctgggctctcacttatctttcaaactcagctcattgacgctgcctccagaagtctttccaggtcgccagcatcaggcgaggtttccctcctctgggcccctcagaacccaatttcatgcctcaaagtgtcagcagctgtctggctctgagggcaagctgtctctcattcatctccatctcctcggagtaccttgctgtgttcattgtttccagtgttctttgatgaatgggttgacaagatggcggggagggtgtgaatgggacaatgggtaatgtggtgggcagatgagtgggtggagggacaggtgggtgactgactacacagcatgatgaaggtgtcaatgggtgggtggggggtggctacagggaagagcaggtgggtggagggggaggtgagttgtgagtggctggagggccagatgggtgagtgactggataaggaggtgggtggatggatgggtggatggtcgagtgggcgtatggggaggaatggggctgacaaatgggtgggtggagggatgggtggttaggaagataaacaaagccagaagcctctgcgctacaggcagacttgggctctttctcatatctggaaaaggagacctcctggaaatgcaggtctgcagtcatataaattttgtggggaggaggcaggcaagaagagcctctgggtggttctggggtgcagtaggcccagccagcaggtcagcccagcccctgtctctgcgacccccccgcccacccgcaggcagcaggagctcctgttccattacctgcagctggtggcaagcgtggagcaggagcagcagaagttccgctcccaggcagccgtcatcgatgagattgtggacaccacatttgaggtgaaccaggcaggagcgggaaggggccggcgaggggaaccccaggggcttgtagccagaaatggctccaagtaactcccatggggatcggggaaggcaaagtctggctcattcacccaccagtgccccactcacccctgcaggctggagaagaggacttcaggaattgaccccaggaggacaccagatacagacttcagcccctggcagtctgcccacctgggtgcactgggacgggtccccagatctgctggaatgattgtccgggccctgcagagcaggggccccaacagagtttttaaacccca

SEQ ID NO: 1149 - DNA, 63982 bp, Homo sapiens
ggatgttgacagcgtcgcctagcaacgggaaatggcggaaccgggcggcgcggcgggccggtaagccgggccgaggggcagcgggtcttggagtcgccaggccgcgctctccgttcaccgctccaggtggcccccgcgtcggctcctgcctcgccccttcgcctccactcccccttcctctcgcctgtgtcccttctctcgccattttgctggcctttcccgtccactgcgttcagcccctcacccccccgccaacccttctcacttctcccctcctgtccctttgtcctctctcggcctccctctttcccctactccaagcgcgcgactccctctaaaacccgggaccgctcactctgcagtcaccatggcaaccactctgcgtggcggtccctgcgcgcagtcctcctaagagtagagggctctgcagggcgcggggctgttggataccgcccctgaccttgctccggggccactcgctgtggccggagaccagcccggccccgcgcctccctcctgcaaggacagatcccctctcgcaggcttgggggtgacccgcgatgggaggggtccctgcggttaggcggcccgcgatagtccgcggtcaccgtcctggggcctgggtggaagcactgagcgcgcacagggagggcggctgagtgaagatccctgccaccgggcctctgctcgcttaggctctgtttaaaaggatagaaacgattggaaagagtttggcctttttaccttagacacatcggtattgtttcatttttttaaaggtgggtctgtatgtattgacatggaaagactaaaggtattattaataaaacgataggcataaatgtaaaagggtaggtatactatgatctctaattcagggtgtgtgtgtgtgtttaaaacatagaaaaatgttgaaagaatgtggtcctaaatgttatcaatgattatcttgggaaggaaagggaagatcacagggaactgtcactgtctgtctctttgaacatatctatattcctttgacagataaaaatagcttgaatctttaattttttaaaaaagatatacatatatatatatatatatatatattcctgtgctacgtaaatcgtggagaaactcagagtccccagaacacttactctgatcgcgctactttctctacgttgtatttcttttccccagttttgtcccagacacaagttatatttgaggtgacttttctggggtgatctaatcctgctgttccttcgatgttttaataattatatttttcattcattcatggagctttgcttttgtggcatctccgccacctgacaggcatgatatagtgctatggttcctgacaaacaggacaaagacgtgacaacagcctgggggtggcagagaagtaacaagtaaataaacagatgtgcagaattcaggaggggataaggaccaagaaaaagaaagctgttgcttgaaactgttcaattgtttctctaaaaccaggtcccatccggaagatggatcggcttctgagggagagaaggaagggaataatgaaagccacatggtaaaattccctatgggcagttattccgggcttatatttactaggaattaaagagaatcagagtacgggcactgtggctcacgcctgtaatcccaacactttgggaggccaaggcaggtggatcacatgaggttaggagtttgagacaagcctggccaacatggtaaaaccccatctctactaaaaatataaaaattagccgggcgtggtggtgcgcacatgtagtcccagctactcgggaggctgaggcaggacagtggcttgaactcgggagacagaggttgcagtgagccaagatcacaccattgcactccagcctgggtgaccagtgaaactctatctcaaaaataaataaataggccgggcacggtgactcacgcctgtaattccagcactttgggaggccgaggcaggcagatcacgaggtcaaaagatcgagactatcctggccaacatggtgaaaccctgtctctactaaaaatacaaaaatttgccaggcatggtggttcacgcctgtagtcccagctactcgggaggctgaggcaggagaatggcttgaacctgggagatggaggttgcagtgagccgagattgtgccactgcactcagcctggcgacagagcgagactccatctcaaaaaatagataaataaaattaaattaaaaataaataaataaagagaattaggacttggtcaagtatattgtatgatgacattatcttgcaccagaacaaactcaattcagttgaagagagactcattttcttcctaccccattctacagtgtcagtgattagtcagggatgcaaaggatgtccaactttgggttgccctgagtttttcggaactcatttcctgtaacaaaggatgcaaaaatgattatgaaaagcagagagggccaggcatggtggctcacgcctgtggtcccggcactttgggaggctgaggcggatggatctcttgaggccaggaattcaagaccagcctggccaacatggtgaaaccccatccctactaaaaatggaaaaattaactgggcatggtggtacacacctgtagtcccagctacttgggaggctgaagcaggagaatcgcttgaacccaggaggtggaagttgcagtgagccgagatcacgccaccgcactccagcctgggcagcagagtgagcccctgtcacaaaaaaaaataaaaaaagaaagaacagataaactgaagcatgaaacatgattttttttttttttgagacagagtctcactctgtctccaggctgaagttcagtggcacgatctcagctcactgcaacctctgccttccgagtttaagcaattctcctgccccagccttctaagtagctgggattacaggtgtgcaccaccatacccagctaatttttgtatttttagtagagacggggtttcaccatgttggtcaggatggtctcaatctcctgacctcgtgatctgcctgcctcagcctcccaaagtgaaacatgatctcttagtgatgctgagaagggtataaatgcagttttcccattgatataattacactataaagaataaaacctcacaaggtcctttatactttgtttcctgatttttttcctgccacacctttacaggtgtcaccaccagagaaggatgatggccagaaaggtgaagaagctgtcggtagcacagagcatcctgaggaagtcacaacccaagcggaagctgcaattgaagagggggaggtggagacagaaggggaagcagcagtggaaggggaagaggaggctgtgtcctatggagatgctgaaagcgaagaggaatattactatacagaaacttcatccccggaagggcaaatcagtgctgcagatacgacttacccgtatttcagtcctcctcaggaactgcctggagaggaggcatacgatagtgttagcggggaggctggtctccaaggcttccagcaagaggccaccggtccaccagaatccagagaaaggagggtcacctccccagagccatcccacggagtcttaggcccgtcggagcaaatgggccaggtcacctctgggccagcagtgggcagattggtgagtagccctgacttctgttttgtgccagtgtcgcacggcccacggggtttgtcaccctatgtgaggaacttgggaatacattataaatacaaattgcaatccctgttagaaatgtcttagcaaggctgggtgcggtggctcacgcctgtaatcccagcactttgggaggcgaaggtgggtgggtcacctgaggtcaggagttcgagaccagcctggccaacgtggtgaaatcctgtctctactaaatatgcaaaaattaggcaggcgtggtggcgcacgcctgtaatcccagctactcaggaggctgaggtgggagaattgcttgaacccgagaggcggaggctgcagtgagccaagatcccaccattgcactatagcctgggcaacagagtgagaccttgtctcaaaaaaaaaaaaaaaaagaaaagaaatttcttagcaagcttaggtctcaggattcacggtcaaatgctgagagatcctggactctgcttcagtctgcccaagcccaaggctgggggcctccatagccgccatccacgtaagggcatccaagttcccaggcttccagagcagcattgtccaatacggtccatcagtcacatgtggctacagagagctctccaaatgtgactagcgagctggaggaatggagcttttaactgtttaagattctaatttccatttaaatagccacctgttgccagtggctgccataatgaatagtgcagttctagataaaaacaatgacaatagctgcgttcttatattttttcatcaattttctttaaacaatcacaaagttacagaaaaaaatggagtacaataaaaaggatcttttattttcttaaacactggagagtgggttgcggatctggtcaccaaagccttcgaacgcttctgtatgtttcccacaaacagctgggacacaaccatcaaaatctagaaattgggtcgggcatggtggtgcacgcctgtaatcccagcacttcgggaggccaaggcgggtggatcacttgaggccaggagttcgataccagcctggccaacatggtgaaaccccatctctactaaaaatacaaaaattagctggacgtggtggtgcacacctgtaatcccagctactcgggaggctgaggcaggagaatcacttgaactggagaggcaggggttgccgtcagccgagatcgcacccctgtactcctgcatgggcgacagagcgagactctgtctcaaaaaaaaaaaaaaattctggaaattgccttgctccatttccaaggaatgctcaggcctcattcagggttcaccaaatgtcccaatgatgtcttttgtagcaaagagattcagttcagaatcaaatgttgccttgagtgctcatatttctgtagtctcctcagtctttccttgacaaccttgacccttgtgaaggtcataggccagctgtcttgtagagcgcccctcagcctggatttgccccgtgtttcctcatgatggggttagggtcatgaggctttagtgggactatcacggaagcgacgtggggctctcagtgcgtcccaccagggatgcaggattccagcttccaccattcctgatgatgttcacttctgtcaccaaatttaaaagcaccaagattcttcattgtgaagcgaccttttactcctttatacttaatgaagattttgtgggaaggtgcttttttcttttttggtttaagataggaaggcgaatactatttagaatgggaaaaaaattgcaacagattccaaccagttattgaggacttcttatatttgcttacaaacgtatacaggtgttatacaacttttggcagatttatccctaagtatttctcttttttttgagatgtagtctcgctctgtcacccaggctggagtgcagtggcatgatcttggttcacagcaacctctgcctcccgggttcaagcaattctcctgcctcagcctcccaagtagctgggactacaggcacacaccaccacacctggctaaaattcggtatttttagtagagatggggtttcaccatgttggccaggctggtctcgaactcctgcccacaaatgatctgcctgccgcagcttcccaaagtgttgggattacaggtgtgagccatcgctcctgcccagtatttcacatttttgatgccattataaatggtttccaattgtctgtggctagcatatagaaatacaattggtttttgtatactcacctgatattctgccacgttgctaaagtccctcactagttagactagcttgtttgtagaatcggtaggctttttcacaaagataatcatctcatctgagaaaaaagacagttaacttcttcctttcccatccagatgccttttctttctttttcttgcctgattgcattggctagaaccgccagcaccatgttgaatagaagcggtgagagcagacctcttgtcttgccctgatcttacaggaaaagcatcagtctttgactgtaaagtgccatgtttgctgtgggtgttgcagatgccctttatcaggttaaggaagttcccttgtattctcggtttgttgtatgttgttgggttgtttttttttttttaatcataaaagggtattgggttttgtcaaatccttttctgtgtctgttaagaagactgtattttcctttttagttagttgatttggtagattacattgattgattttcagatgttcaagcaaccccgcattctgagataaacacagggagccactttggagtgatgtgaatgtcggttcctctttaaactcttggtttatttatattcttacatctgcatagactcagggctctccatgtgattcactgggttataacccattactgtcattatgtattttgatgctcagtttggccagtgagggcccatttaaaccagcctttgtgtgatcggacgcacctccatccttctttgagggctttcttgctttctgccatagactgcccagccttagaatcagacatttctccaggagccctgtttctgttagtggaaaatagaatttagaagttatcacttgggtgctggggtcctcattgatgctggggtgtcactgtccccaggacctctcagcggcaggagatagggcctgtgtgcgtgtactgtacgtacttcccccacatttatacatacaccatgtacacagacattcgctcacatctatatttattggaacacacccctgcggccggccttggctcacacccctgcggccggccttggctcacaacagaacctctaattccatctcacctccataaggagtccctcctggttttctcctcttccttttttttttttttttttttgaaacagagtcttgcccaggtagctgggactgcaagcactcaccatcacgcccggctaatttttgtattttttgtacaagggggcgtcttaccatgatacccaggctggtctcgaactcctgggctcagtcaatcctccctcctcaacctcccaaagtgctgggattacaggcatgagccaccacgcccggcctcctcttccatatttgtagctcctttctccaacagggagaagcctggccccatgatccttactgtattcactgatgtggtcaatcctcctggatgtaacctgtctcccacttttactgccttggctgccccctactcccagcataccttaggtttcaattgttctgcgaggggagatgggagtatggaagggaggcagggaaagaggatgctttatacttcttagcactgactatgggatagacactgttctgtgttgtcttagaatcctgacaaccctacgaggtaggaactatgattgtgcccattgtacagatgaggaaactgagaggtgcaaggtcattgcatagtcacccagctgttgcggcaaacggtagctcttgcttcaaagccaccgttctgaaccacaaggcacccatccctcctactcccctaccctgggaaacccgaaagagtttctaaaagtcactttggagaacagcatgattcagtatttggtgagccctaattaagttttatgatcacaagtgacaaatataaaaccaaaaccaaaatcttattttaagaatttatcaacaacaacaggccaggcctagtggctcatggctgtgatcccagcactttgggaggccgatgcaggcggatcacttgaggccaggagttcgagaccagcttaaccaacatggcgagaccccatctctactaaaaatacaaaaattagccgggtgtgttggtgcacacctgtagtcccagctacttaggaggctgaggcacaagaatcgcttgagcttgggagtcagagattgcatgagccaagatcatgccactgcactccagcctgggagacagagcgagaccccatctcaaaaacaaaacaaaacaaacaaacaaaaaaaaaaatatatatatatatatatatatctcaacaacagcaaaaccagtgtcttcacctttgtttaagtgaagtctaggtcacttgttgctctgtaaacccgattttcatccttgggcctagtttctagaaaatacactgggaagtagttttcaaatatgattgaagaaagggcagggacagcccctgagcgagccttgcttcccacctcccactggctctcagtctttgggacagtgtgagtggagcttgtgtccagttgtgcacacggacacccggaaacctctcattaggagaagccactgctgcgcaccctggagatgggttttgaccctgggctcccgttaatgttgttgtggctccagatgcctcagaaataacttccagagtcaacaccatctgcggaagtgccgtgagacggtgcatgggctggagacagagacagccggcgccgaacatacctggggctgcccgtgcaaactggggcaagcccttcagcctccatgtggctgctttactatggagaacagaaatgactagaacctgacttgtggggttatggcgagggtggcatgagatgagctttgtaacaatgtgttgtttatgggcagcaaaaccctgactcattgtctgggttactaatatccaagagttcatcatcagcgataattattgtcaatagtcgtaactgcaaaagtctcttttaaagctaaaatggatgccgggcacagtggctgtaatcccaacactttgcgaggccgaggcgggtggatcacttgaggtcaggagttcgagaccggcctgggtaacatggcaaaaccccgtctctactaaaagtgcaaaaattagccaggtgtggtggcaggtgcctgtaatcccagctactcaggaggctgaggcaagagaatcacttgaacccaggaggcggagtttgcagtgagccgagatggtgccactgcactccagcctgggcgacagagcgagagtccatctcaaaaacaacaacaactacaaaaaacgctgaaaaacagagctggggaaaggcattaaggggagggcttctcataacaaaaactatcacaaaagactctgcaaaccccacaatgttgcacaaagatcatcataacctttcaaaaaaaaaaaaaacacttctgctaggacagctgccagcaactgcctgtcgaaacttggactgatgccaccctgttattgatccttacagccaaggagaattatcgcaaaacaattatgtaatcctcctcatttttcctgtgtcaactttcatcttcctttacctccccaaatacaaacataatttactatgacacccgtattcccattgcaatgccctatccccaaataaatgtcattttcctttacagaacctctctctgtttgttatttaggatgatacattgctcaaaatttaacatgattgttaaagtaataggaaatcacttggatataaaaatcatcatttgacttttgcaaatgtccaaaatggaaaacatctaactctcccccgcccagggaattcagaagtggttcccccagctcacacctgtaatcccagcactttgggaggccaaagcggaaaggctgaatgaggccaggaatttgagaccagcctaggaatcatagcaagaccctacctctaagtaaaatattaaaaaattagaccagtgtggtggtgtgcacctgtaatcccagctactctggaggctaaggagggaggatcaccggagcccagaagttgggggttgcagtgagctatgattgcagcactgcacgccagtctaggtggcagagtgagacccttactcaataataataataataataataataaaagagtggtttctgcgtgtctgcatctgtagctaagtgtaaacacccaggcacgagaatgcatgggtcctgggatcttttgctcccacatgctgagcgcctcgaggatgggaaaccacaactctgagcaccctcttcatgaaagcatgcggaaaagcctcggctcctggccagggtctcccaagaggactgtttcctcttctctcctttcaaaccagccccctttagggaaatttcaataagaaaatgtcttcccttcataaaaacacctggctcgattttaactttatttatttatttatttttgagaaggggtcttgctctgttgcccaggctggagtgcagtgctgtgatctctgctcactgcaacctctgcctcccgggttcaagcaattctccctcctcagcctcccaagtagctgggattacaggtgcccgccaccgcacccagctaatttttgtatttctggtagagacggggtttcgccatgttggccaggctggtctcgaactcctggcctcaagcgatccacccgccttggcctcccaaagtgctgggagttacaggcatgagccacgtgcccggccaggttttttaaaaaacacacaggtgactatattttgagtctgacaactttcacaaatgtaatgagttaaaattgaataacttctcagtggcaattaagccctgttgacttagttttggttgttcttgccatagacaggatccacagaggagccccaggggcaggtgctcccaatgggcgtccagcaccgcttccggctgagccacgggagcgacatcgagtcctcagacctggaggagttcgtctcgcaggagccaggtgccacccacctgctgaggtcaccctgccctggcgatgagccacctgcacaggcccttctgtgcaagggatgccactcgtttgtcatccgttacctgtttcctgagtggctgtgagctgaaagagaaaaatcttattaacagatatggataacatttattgggcatttactgttttatctcatttaatcctaacagtgaccgatgaagtaggaatccttctccatttaacagacaggttccctaaggccattaaggaactggtccgattaagtgacagaacgcggccttcaccaagattcagtgacgcccagccccatcccctgacagccatttctcacgggctcctggtctcagagcgagacgtgccgtgacagcaaccccaggcctgaatctgtctgctggctttcaaaggctttccagaacccctgtcttcttacgtagtcccagtatcccagtgttgtggacgtgggagggcagatcaggcagttgcaaattccctgtggtaccgacctgcagccggtccaaacctttcattacttgcaaatgacatgaaaacagcacgtgtctaaattagtaaaaaaacaagccgggcgcggtggctcacgcctggaatcccagccaaggccggtggatcacctgaggtcaggtgttcgagaccagtctggccaacatggtgaaacccctgtctctactaaaaatacaaaaattaccgggcgtggtggcgggtgcctgtaatccccagctgctcgggaggctgaggcaggagaatcgcttgaaccccggaggtggaggttgcagtgagccgagatcacgccactgcactccagcctgggcaacagagcaagactctgtctggggataaaaaatattgtatccaatccactagttaagtggccacctttctgttcactctttatgtgtaaagaaagcctctcaaaaataatttccttcctgcctacctttaaaacgggacgctttctctgggatgcattgagtcagggaatagaagatggggtgaatgatgtttctgacccacagaccgttgggatgcttttgctgtcactttcccatcatgctgcatgaggcatgacagcagctgtgccattgatgccccagaatagaatcactgaggcttctctccagcagctcctcaatggtgtcgctgtctctccccccagtgatccccccaggggtgcccgatgcccaccccagggaaggagacctgccagtgttccaggaccagatccagcagcccagcaccgaggagggggccatggcagagagagtggagtccgaggggagtgacgaggaagcagaagacgaagggtcccagctggtggttttggacccagaccacgtaaggaagccttcccaggttttgcttttgcctacatggatggcgaatgactcaggcccctttctctgcctgcactgtctcccactcctgaccctaaatgctgtacttgtatctcgcctgttcactgcaccgtttattggcactgattgacctgcctcttcgtagggtactctcctctgaggttggtataggtgaggcctgtgtttctcaaccccggaaccactgccccgtggggccgggtcattctgtgctgtgccttgcatggtgtggaacagcatccccgagctccccctgctacatgccaggagcaccacccccccgccttggttgtgatcatcaaaaatgtctccaggctggacgtggtagctcatgcctgtaatcccagcactttgggaggccaaggtctgtggatcacctgaggtcaggagttcgagaccagcctggccaacatggtgaaaccccatctctactaaaaatacaaaaaaaaaaaaaaattagctgggcatggtggtgagcacctgtaatccctgttactcaggaggctgaggcaggagaatcgcttaaacccaagaggcggaggttgcatgcagacagccaagatggcaccagtgcactccagcctgggcaataagagcgaaactctgtctcaaaaaaaaaaaaaaaaaaatgtctccagtcattgccaaatgttggcggtgtggggcccatcttcgcagccactgccttgagggcaccaattggatcgcagctccctgccccacccactggcaaggggaaaaggcagatgttgatttcatttacccatcaggacagctgcagagctccaggaactgccggaaggagctgggggctgcacagggaggttctctccccagaccactgctccaccccaccctctggccccagctcaccatcattttgccaaaatatgcactcagttctctgcaagtgcctcagatgagaccatgaggtgcctttaatttgtggcttccagagtaagaatcccaagcagaagcagggagcactccacacggaagtcgtctctggcccaccggagggagacctgtggccacctgggctgagccctgggtcgggcaggagggtaaccagaaaggtaaccacctgtggttttccattgttctagcccctgatggtaagattccaggctgccctgaagaactacctgaaccgacagatcgaaaagttgaagctggacctccaagagctggtgtgtatccgtccagtctcccaccctggtcggatgcctgcgtcctggtgaccctgtttctctctttggtccaggttgtggctaccaagcagagccgagcccagcggcaggagctgggggtgaatctctatgaggtgcagcagcacctggtacacctgcagaagctgctggagaagagtcacgaccgccacgcaatggcctcgagcgagcgcaggcagaaggaggaggagctgcaggccgcccgcgctctctacaccaagacctgcgcagccgccaacgaggagcgcaaaaagtgtaaggcaacccggcagccccacacgccatccggtcctggagggtttcccaggggtgtctccatgtaccatggccaggcatctagaaaagtaagatgtgtgtgcatcctggaggggttcccaccctttttaggaggggaaggcacataaatcaaatgtctttttgttgttgtttttttgagatggagtctcactctgtcacccaggctggagtgcaatggcgcgatcttggctcactgcaacctcccccttccgggatcaagccagtctcctggctgagcctcccaagtagctggtattacaggcacctgccaccatgcctggctattttttgtatttttagtagagacggggtttcaccatgttggccaggctggtctcgaactcctgacctcaggtgattcgcctgcctcggcctcccaaaatgctgggattacaggcatgagacactgcacccggttataaatatgttaaatggcacctgtcaggacaaagcagcaaatgctgaagctgctaacagccagagcgtagagattcaaaactgggagagatgggtgagctgcagaggtcccaggatagatgagaccaggaggcgagagcagaccgggggtgatggagggtttcaatagatgcgaatgcgagggtgaggccggcacgacggtcagaccatggcccagggcctgaccgccgtaggatgtgtgcggcaggtcagtgggtagctttgaatcagatgagacagtgggggctacagcacgtgctatgcaacattaccgataaagcaacgtccttgcacagagctggtcatgtaggtgaccggggacagtggcttcctcttgtgactacggagtatttcagtctttatgctttttgatgttttcaactttctcaatcaactgtgtattactcttataatggggaaatgacctacacaaacctggaggaaaacagaagcacatggctatcccagctgttctggaaagaaacattttaaaccctgagaaaagtggaagaggttctggaaatttcagagttagggtaagtgggcacttatcaagcacctctcttggctgggcgcagtggctcacgcctgtaatcctagcactttgggaggccgaggcgggcggatcacgaggtcaggagatcgagaccatcccggctaaaacggtgaaaccccgtctctactaaaaatacaaaaaattagccgggcgtagtggcgggcgcctgtagtcccagctacttgggaggctgaggcaggagaatggcgtgaacctgggagtcggagcttgcagtgagccgagatcccgccactgcactccagcctgggcgacagagcgagactccgtctcaaaaaaaaaaaaaaaaaaaaaaaaaagaaaaaagaacctctctccagttagcatcaaatgaacagaaaacagtaaaaggaaagaaagtgacatccacactgaactgaaagagccacatcctccagaagtaaccaaatttacacccacctgaaggaggacgcgtgcccctaactgctccccacacctgcagtgaggctggagccgtggagctggtgtggagcgccctccggctcccctctgctagggcttaaagagtgggtgggattccaaaaagatccaaacactctggtggactctgcttcctggagattaggagagggccagagccgaggctcttcaacccagcaaggcctgcgtcaaacagcaccgtctctgccttctcagaactgaagaatttgggcaacggtcccggccctgaccggggggcagccaccactgcacagtcccttaggtgagacgtgggtcctggcccctggagaaagcccacggtcacctgcctcatctgggagggagactgtattagggttgtctagagggacagaactaacaggatagatatatagagaaaggagagtttattcagtattgacacaggatcacaaggtcccacaataggccgtctgcaggctgaggagcaaggagagccggtctgagttccaaaaatgaagaacctggagtccagtgttcaagggcaggaagcatccagcacaggagaaagatgtaggctgggaggctacaccagtctctcttttcacatttttctgcctgcttacactctagccgcactgtcagctgatgagatggtgcccacccagattgggggtgggtctgccttttcccaggccactgactcaaatgttaatctcctttggcaacaccctcacagacacacccaggatcaatactttgtatccttcaatccaatcaagttgacactcagtattaaccatcaccgacactaaaccttcacaccaaaatgagttaccaacccgagatccccagacctgagaggagactgagccggacagacaggcaaacccagccctgattctaaaaacagagcatgcggaggcaccaactggtagtctcatgagattttagaggacgttgtatccgtaaagagaacaaagtgttaggaagaggggtacgtgaaatttaaaaatataatcatcatcccagagtgtgcagaggcgccaactggtagtctcatgagattttagaggacattgcatccataaagagaacaaagtgttaggaaaaggggtacgtgaaatttaaaaatataatcatcatccccccaaaaggcactaactagacaaatgaatgcagttgaaaactgaatttcttaactaaaaagccagttcgaggaaccttccctggaaatagagcaaaaccccaaatgattgatatcttgaggaggaggtaaaagacatggacgacagattagggaaatcgaatcagtgtccgaaagggagatttcaggagatgagaggcaatagccaatgtccaggagaacagatgcgtgagttcaggaaagacgaatctgcagatagaaagactcgtgacgggccatgcagctgaaagagaaaataaacctccgcagacatagctggtgggatttccaaataccacggcaaaagaaaaaatgctgcaggcttccaggcgggaaaacccagatggcctcttgaggccgggcctgggctacgctttcatcaaggcctccatcagctgcgccttggaggaaccagggagagctcaaaaccaccaggacctatcccagcccagatttcagattggtttgttctgggaaggaccaggcattgtttgtttctggctttctttttgacccttaagcttccagatgatgctaacttgcagccagggctgagaatcacagatcttaaatttaaatagcaggatgtcaatgcatacagaattcagaattctcttttttgtgttttttgtttgtttgtttgtttgttgagatggagtctctctctgtcgcccaggctggagtgcagtggcgtgatctcagctcactgcaacctccacctcccgggttcaagcgattctcctgcttcagcctcccaagtagctgggactacaggggcccgccaccatgcctggctaatttttgtatttttgtagataacggggtttcaccatgttggtcaggctggtcttgaacccctgacctcgtgatccgcccaccttggcctcccaatgcatacagaattctaagggagaaggatggttagcatttgacctacatgtcagttagactctggaaattaacaacaacgggaagtccacgcatgaagacttctggctgcagccaaatctgctcagacaaaacccatgacagagtttatttacatttccacaaacaagcctgaaaacagacattctattcgagaagctaaaaagagggaaataaactgaaagaagcagaaaaataaaccaataaagatcaaaagcagaagctgatgaaataaataaaaaatgaattgacttgataaataaactgctttttttttaaatgaccaataaaccttacacactgctggcttatctggcaataaaaaggagatcatgcaagtaacagtgttgggaatgaggacaacttgggggagggttttttttgttttgttttttgtttttaattgcaagaaagctatgcattgtactggtttcatcatgcaagaaattgaaaatgtcaaaaatctgttttccctaaatgcaccagtattggaagatgttatggaaggcttctagtaacctttcaaggaacaaacacttcctgtgttatcaaagctccagggcatggaagattccggaaactccccacaggctggtcctgcaatgcttagtgaaaggctggctgcaaacgctgacagcatacaagcaggaaactgtaaagcggccccacatgtgaggagtgaaaatcctgaacaaaatgttagcaaaaataagtaggatttacttccagaattcacacaggaataattcacaattaggaaatctactaattttgtgcattatatttataaattaaagaatggaggccggatgtggtggctcacgcctgtaatcccagcactttgggaggccgaggcgggcagattacctgaggtcaggagttcgagaccagcctggccaacgtggtgaaaccctgtttctactaaaagtacaaaaaattagccaggtgtggtggcaggcacctgtaatcccagctactcaggaggttgagacaggagaattgcttgagcccaggagacagaggttgcagtgagccgagactgtgccactgcactccatcctggccaacagagtgagacactgtctcaaaaaaaaaaaataaataaatcaaataaaacaaaatacaaggataaaaaaaaaaggcttcctgggtgggtgccaaatgggtatttaataaaactcatcatccatcccaaagtaggatagaaggagagttctaagtatttatcagaaactaacaagaaaatgttacccagtggaaagactagacttaaaatcaggaatgagatgaggaggcctgctagcatagcagttaccccagactgttttggaggctccagcaacgcaaagaaaacaagagaaagaaatgagatatggatctgggaatgaaatactgaaattctcaacctctactaatgaaaaataaaagccaatagaaacagtaagaaatcaataaagtagctggataccagctctgtagttttcttctacaccagtaatatagttaggaattacaatttttaaaaaagctcattcataatagctataacaacttttaaataagtccaggaagaaatccaacaaggaatgatgagcctgtctgaaaaaaaacaataaatgttatgaaaggtcataaaacagatttaaataaatggagtgcccacgttaccagctgggaagacgcatgatataaaaatgccatttccctccaaattagcaataaaaccattgcaattcccgttaccctccgtggtgagatgttttgggtgaacttaaatttattcaacataattatttacttattttggaaaagtaatgattcaaaatgcaagagctctacaactaagaggaagttttcgtctcttttccccttcccccacccagccaccagggccctccgcagaggcaacgtagattcttgtggattctttttgtttttgttttcttcgagacagcgagacgcatcttgctctgtttcccaggctggaatgcaatggcagagtagcctcgaactcccagccttaagtgatcctcacacctcagcttcccaagtagctgggactacacacacaccaccaggcctggctaattttcatatatatatatatatatatatatatatatatatatttttttttttttttggtagaaacagggtcttactgtgttgcccaggctggtctccaattcctgggctcaagtgatcctcttgcttcggcctcccaaagtcctgggattacaggcataagccactgtgttcagcccttgtggagtcttttggagattttttgcatatctaagcaaagtcacaagggtgtgtgtgtatgtgtatctctctctctctctttaacttaaatggctgcatattatacccactgctcggttcctcgcttgctgtcccttagcaacacgtgctgcggatattccacctcaaaacaaaaagcacctcgggccaggtgcggaggctcacgcctgtagtgttgacactttgggaggctgaggctggcagatcgtttgagctcaggagttcaagaccagcctgggcaatgcggcaaaaccccatctctacaaaaaatacaaaaatgagaaattggccgggcatggtggcatgtgcctggagtcccagctacttggggggctgaggtgaacccaggaggttgaagctgcggtgagctatgattgtgcgactgcactccagcctgggtgacaaagtgacaccctgtctcagaaaacaacaagaacaacaacactttattctcaacaaattgattttaaagttcatttagaagactaaatgcacaaaaatatccaagacaattttgaaaaggaaggataatgaaagaaatatttaagaataataacaagtccttagccaggcctggtggctcacgcctgtaatcccagcactttgggaggccgaggcaagcggatcacaaggtcaggagatcgagaccatcctggctaacatggtgaaaccccatctctactaaaaaaaaaaatacaattactcgggcgtggtggcgggcacctgtggtcccagctactcaggagactgaggcagaagaatggcgtgaacccgggacgcagagcttgcagtgagccgagatcaccactgcactccagcctgggcgacagagtgagactctgtctcaaaaaaaaaaaaaagaagaatagcaagtcctcaaagagaacttagaggaaattactttggaatttagctactgcaagctatattaatgcacaggttgctttttttttgagacagagtctcactttgtcacccaggctgtagtgcagtggcatgatcctcccacctcagcctcctgagtagttgggattacggacgtgcaccaacacatcctgttaatttttgtattttgagtagagacagggtttcaccatgttggctagactggtcttgaactcctggcctcaagtgatccgcccacctcggcctctcaaagtgctggggttacaggcgtgagccaccacacccagccaaaatggctttgcaagtttaagctgtatccttcgagcacacctggctccaggatgatatgcgtccagcagccttttggcctgtaattcagttttctgtttggatccagccactgaaagggagtgctctgtgcagtgagcaagcaagtactgacccacgtgtagctccctcaataaatttgcactccagctttagaaatccatctcatggccgggcgcggtggctcatgcctgtaatcccagcactttgggaggccaaggtgggtggatcaggaggttaggagatggagattatcctggctaacatggtgaaaccccgtctctactaaaaatacaaaaaattagccgggcgtggtggcgggcgcctgtagtcccagctactcgggaggctgaggcaggagaatggcgtgaaccctgggggcggagcttgcagtgagtcgagatcgcgccactgcactccagcctgggcgacagagcgagatttcgtctcaaaaaaaaaaaaagaaatccatctcatgcaagttttgttaaaggaatcagttcctcgggccttggcctcctctgagagcactgacataaatctgtcacttaacttgggacaggatggaagctgctgcctcttctagcctcgtcctctctggcctgcactgctgtgcagcggtgtcagtgcaggggcatctgtggagctcagcctgccctggatgttctcgtctcctcccaggggacttaagactccacctaaggttgccagcctttcagtggtaagacatctatgcaatcaacccgaagccttaccacctggcactacttcagtgtatccttagactaccaggaggatctctgagacttggtggggaatggaacagcttgctgcaatttgtggatgtagattccgtatatttttgtctcttccaagagactgtaaactctttgctgacaaagtctgtgtcttgatagtttaaaagcagtttcccagtcttacccaaaaatggcaggaagggtgcccagaacggctgttccctgcttcctcctgggtctctgcatgggggacgctgggacagcctccccactcactctctctctctttctcccccgccgcgccccgcagtggcggctctgcagactgagatggagaacttggccctgcatctcttctacatgcagaacatcgaccaggacatgcgtgacgacatccgcgtgatgacacaagtggtaaagaaggccgagacggagaggatccgggcagaaatcgagaagaaaaagcaggtattctgcaaactcgacacatgtttaatgatcaccagaccgtggagcttcaaaaaggggctcagctttgcctcctgcgtgaaggcttccggccggaggggtggcggccggcctgggtggcgtcaacttgtatcaagggttggtggagaacaggccctcagccacgggcacctcctgacggggctgcttctcatcctgtttcccaggacctgtatgtggaccagctcaccactcgagcccagcaactggaagaagacattgccctgtttgaggctcagtacttggcccaagctgaggacacccggattttaaggaaagcagtgagtgaggtaaaagcagtccccgcagctctcagtgttcgaccctccagtgagtgtccacgcacagggtgctggtgggtctactagactgcacctgcccgtctgctggatgagtgactgcagccagcttacatctgcaaacatcgggccctccccatggtggggccacagtagatactgacaggtggacagcccggattcctattccttccctggctagtgggtgacagaaggcctcgcagggttcaggtactctagtcgcttcatgaccgccaaggccagcttgctgcggggatgctcagcaagttccttagcctgcagggacctcttccggggaggactgaagtctttctaacaattctcacccccgtgggcagccggccttccgggtagctcctacatctctgcacctcgtggagtagggagtggagggaacgaagggggtgaaagctgctccctcttggccccagattcaggtctgtagtggtagcaccagaaaccaaagttactgcaacttaaaaaaaaaaaaaaaaaaactatgagtcaccatcttcattcacgggtgcgggaatgacacggaggaaacaattaactttttttttttttgagacagagtctcgctctgtcgcccaggctggagtgcagtggcacaatctcagctcactgcaacctccgcctcccagattcaagcaattctcctgcctcagcctccagagtggctgggactacaggcgcccacctccatgcccagctaatttttgtatttttagtaaaaacagggtttcaccatgttggccaggttggtctcaaactcctgacctcaggtgatccacccacctcggcctcccaaagtcctgggattacagtcatgagccaccgtgcccagccaatgaaaaagaaggaagaggacttgaaggaacggatgagcacgctgggctcccagggtaaagggagggcccggggctgggcgttactcagcactggtctctccagctacaaatgcaattaaagtagagcacgtcccaatcagaatctcaggaacaaacaatcccttagttaacaaaacaattctggagttttatctgaaaaataaattaggaaggctagccaagaatggttttggaagagaagattcaaacggggcaagcagccatcccagtctgctcaggactgaggggtccccaagacaagggactttccatgctaagcccagggggtcctggacacagcaggatggcagatcaccctagcatcgccgcaccaaatattaaagtatacagtaaagctctggccaggcaaggtggtgcacacctgtaatcccagcacttggggaggctgaggcaagaggatggcttgagcccagaagttcaagaccagactgggcaacatggtgagaccctgtctccacaaaaaaataataattaaaaaaaaataaaacattagcccaccatggtggtgtgcacctgtggtcccagctactcaggaggctgaggcaggaggatcacttaagcccgggaggtcaaaaaaaaaaaaagaacaacaacactttattctcaacgaattgattttaaagttcacttagaagactaaatgctcaagaatacccaagaaaattttgaaaaggaaggatcatgaaagatccttgaactatgaaagatccaatgaaatatgatcataccactgcactccagcctgggctacggagcaagaccctgtctaaaataaaacaaaaccgtaaagttctagaggctaaaataatgtgtcacaagatagacaggcaagacattgaagcctatgagagagccccaaagcaagccagagtttatataaaaacctagtagattataaattaccagagagctaatgaattatgcatccaatgatgtcgggacatttggttaatcatttgggaaaaaattaaatcttttcctcataccagacactaaaataaattccagatggaatcaagtatttaaatgggggaaaatgtgccagacgaaaacaaatgaaaatatttatataatcctgggctggggaggcctttcaaagtataacaccaaaagcaggaaccttaaaggaaaagactaggaggggccgggtaaggtggctcacgcctgtaatcccagcactttgggaggccgaggccgctggatcacctgaggtcaggagttcgagaccagcctggcccgcatggcaaaaccccatctctactgaaaatacaaaaattagctgggcgtggtggtacacgcctgtaatgccagctacttgggaggctgaggcaggagaatcgcttgaacccaggaggcagaagttgcagtgagccgagatcatgccattgcatttcagcctgggcgacagagccagaatccatctcaaaaaacaaaacaaaacaaaagactaggaggacaatcacaccctcaataaaacctttgtagattaaggacgccacaaaccagatgaaggcggggagacaggcaggagaagacaactcgcagccattagtaaatccggggttgtgaagagaggctgaaagccaaggagactcgccctgtgtgcttccacaccctggaggcaggtgggctacttggtagatgcttccttttgcacctcccgccctcccctcgatgcaacttccccagggaagggggccgcccgcacttccttcatttctcatttccagtacccagaacagtgcgggggcaacagcagggcccctgttcatcgagcgaagtcacaagtaaccaaaggacagggagtcccctacagagttggcaaagataaggagagatgagccctccctgctgtcggccatgaaaatacagattggcctttatctttatcaagatcttcatccagggcgatatgatcatatgcagccactccctccctaaccctaaccctaaccccgcaccctgttagtgcttagactccattccaaggaacctagcaaagacctatgcagataacatttttgtatgttaaaaatgataaagccaggcttggtggggtgcacctgtagtcccagctactcaggaggctgaagcaggaggagcacttgtgcccaggaagtcagggctgcagtgagctatgattgcaccactgcactccagcctgggtgacagagtgaaacccccgtctctaaagaaataaatacagtgaatagagactcatgggggagatgacgctcatcaccgtgttgtgtcatcagaaagaaagaccccaagaagaggacattagtgaaacccattttcatacacctgtgcatcagaatacactacaccaaaaagagctctactgacatggaaacctgtctcgatattaatttcttattttaattttttttaaattatactttaagttttagggtacacgtgcacgatgtgcaggtttgttacatatgtatacatgtgccatgctggtgtgctgcacccattaactcgtcatttagcattaggtatatctcctaatgctatctctcccccctccccccaccccacaacaggccccgttgtgtgacgttccccttcctgtgtccatgtgttctcattgttcaattcccacctatgagtgagaacatgcggtgtttgggtttttgtccttgcaatagtttgctgagaatgatggtagagactaagtctcactctgtcccccaggctggagtgcactggggccctcatggctcactgtagcctcaaacttctgggtccaagcaatcctcccacctcagcctctcaagtaggtaggactataagcacatgccaccacaccgtgctaatttttttattatgattattctttttgtagagacggtgtttctttttgttgcccagactggttgggaactcctggcctcaagtaatccccccgcctcagcctcccaaagtgctgggattacgggcatgagccaccgcacctggcacaatacattaatttttaatatggcggggcatggtggctcacacctgtaatcccagcactttgtgagaccgaggtcggcagatcacctgagggtcaggagttcgagaccagcctggccaacatggtgaaaccccgtctctactaaaaattcaaaaattagccaggcgtggtggcgagtgcctataatcgcagctgttcgggagactgagacaggagaattgcttgaactcaggaggcggaaattgcagtgagccaagatcgtgccattttgctccagcctgggtgacgagagtaaaagtgtctcaaaaaaaaaaattaataggagattatgaaacaatatatagaatttgatttcgcacacacacacaatcacaggtgtaagaagttagaaatggttatctctaagtgttagggttattgaattttcattttctttttgcttatttgcacattctatttgcataggctgaacacttgcctttgtgaaaaactggggtctaaatgcacaggtgactgagcccggcagccatctttccatccttatgccttgacctgcacctcagtcaaccaggctgtggccggcagcctcaggggcaccatggggaggcctcgcacaggctcagtttaaggtgcatcctggctgaatttgggtccccacctgctgcctgggccagctcccactgcccaatggcacagagcagcctccttagtgaataacttacccccatacaaaactgtgacccagcagtcccacgactgggcatttatccaaaggaaagggaatccgtgcatccaatagacacctgcacccccatggccaggctggtctcggacccctgacctcaggtgatccgtccgccttgacctcccaaagtgctggggttacaggcatgagccgccgcacctggcccagtcaacaataatttattgtacattttcagatagctagaagagagggttttgaatgttcccaactcaaagaaataacaattgctggaggtgactgatacgctaattaccttgattcaagcagtacacattgtacatgtgtcgaaatatcactctgtaccccagagatatacagctgtaacatgtcagctaaaataaaaggaaatactacagacaaaagggaagtcagtcccgggatgtacacagtgtcccttcctaggctgcccaataatcctaagtaagcgtctgtgagaggaaaaaaaagtccccctcatcgtggtatacttaattcacaccattttaggttacgtcgtaatgaatagatggttcagaaaccctcacagccaagcatggtgtctccagggcgatggcctctctcatgcccggcgctgccctcggctcccccgtgatgttctagcgcactgtggttcagtcactgtctaccaagcttgcctgggtgtcacggcgtgcaggcacttctgggacttggcgttctacaggacgccccagttggctgactcgggccgccagcttgctcaagtcacagtgcttgcattggggatgactcatcaagaatcccaaacaccactcaaaacaagaccgcgatccaggccgtgctgggcatgcaggcatcaactcacttgacccggcagccccggggtcgctcctgtacccatggaggtgccgctcctgtacccatgtcacagctggggacactgaggcacagcgggtgagattcagcccaggcagccgtaccagccttaacctctgtgccccaagcataaaggaactcccctttcccttggagtaaattcctgaaccacccccctagttttcaagcccctcccctgcatgggccaagcccttactgcaggtggcccctcactgccccccacgatgcccctagacttccagcctccgctcagcctgcctgacctgcccacccctggctgtccagttgtgcctcctcattcccagtctaggcagccctgcttcccccagctggacgagagcatccagccctggccattcttgagacaaacacctccttccatcatggcctccctacaggaagcggtgctgggcccgtcctgtgggacctcagtccgaatcaatgacaccaccaaccctgcagaggtgtttcacggatgctggccaggatcccctcctcctctccctcctcctctccctcttcctctccgtcttccccctccccctcctccctctccccctcctccctctttcatctcctccccctccctctccccctcctccctctttcatctcctccccctccctctcccccttctccctccttcatcttccccctcctccctctcctcccctctccctccttcatcttccccctcctccctcccccttcctccctctcctcccttccctcctcctcctcattcccaagcactgagcaccgcaggccctgagcaaaggctcaaagcgggtacgggttatcttgaaagctacattcaggctcgtgtttacccctctgcagatgcatgatcaaggaaagtaccggtgatagaaggaaaagaggaagatttgggaatgtgaggctctggtgttcttgggctttgctcgcaaatgaaatgagacagccattcctgccccctcccctgttggctgcaggcctgcaccgagatcgacgccatcagcgtggagaagaggcgcatcatgcagcaatgggccagcagcctggtgggcatgaagcaccgcgacgaggcgcacagggcggtgctggaggcgctcaggtactgcagggccacaggcagcgaggatgtgcgggaaccccaggggtccgtggcaggcccgccccacaccccctctctctgggtccaccggatctctgggacagagggtgcaccttgatccccgggtccgggcttccgtccggaaagctccctcattgtttggtaagatttcagcgattcttaaatcctttccaacactgcggcgctgggaggggagaggcttttctgctcagatttcctggcaggattaagtagaaacagagcagggtaaagagaaagctatctttgggaggtaaaggtgtccctttgatttgcagtatcaccacctgagtgcggaaaccccatcccttctcgattgttctgcctgagggctgcattccaaccgaaatcctattttaatctccaaaggaaggggaggaagaggcctcctctgggcatcccctcacttctggggatggatgcgtggctcagggcagggcgttggagacacaggtgctgccttcattcctaaaaccacccagggtgaccaggtctcgggacgcggaaagaaaaagccgggcactgtggtggcacgtgtctcacccgctgagctttaacttcccctccacctttcgtagtctccaccccttgtgcccagcacagagcctggcatacagcaagcgctcaagaaaggctggaccaaggaatgagggtctggctggccccacagcacccgcagccaggcagccagcagcagtcacacaaccaggagatgcttttccttttgggtgctgtgattaaagaaacaaaatgaaaccattttgtttttaaaagtttttagaccaaaacattttcaaatgaataatattggattaaccatactcatttctggccaggcgcagtggctcgcacctgtaatcccaacattttgggaggctgagacgggtgggtcacgaggccaggagttcaagaccagcctggccaagatggtgaaaccccgtctctactaaaaatacaaaaattagccaggcatggtgtgggcgcctgtaatccccgctactcgggagggtgagacagagaactgcttgaattgcggaggttgtagtgagccgagatcacgccactgcactctagcctgggagacagagcaagactctgtctcaaaaaaaataaaaataataataatactcatttccttcactcccttgagtcaacaacataaagccaaagggaacactgtggtttgatacaggcgatgtttggctgaagcttcgtttcccctgtaaagatgcaggtcgaggaaccagagccagctgtggccgggcaagggctcctctccctgtgtcaccagggttgcctgaacaccaggacgagaggacttggccatctgcccacttgggtgtctttttcctcctgccccaatgctaggacttgatacctgactgtttaattacacggctcagctgccacgggccttaagaaaagtcaaggccaggttctctctgagggtccagcacctggcctggctctccgaggctcatggcctgtgaaccctgcagcgtccccaagggaagacgtcacctccgagatggtcctgttgtccagctctcccctgcatcccagactaaccagtgtcctctctgcaaaccgtcctcattgccctcagagacatggcttccttttggttgcaaacattgtaaaaatcgtattcgatcaggtctcctcctcctcggcccgcagtcactagaaccccctcccaagacaagcaaaggcacctggttttctgggatcccctgcctaacttgtgtgcaattgcaagaaagcatatgcgttcacccggagtcttccttccctctcttgctccgtgggagcacaccacactcactgttctgcacctctttgctttttccatttaacagcgtgtccctagagcgcttcccaagtcaaaatataaacaccgctcgttcccgcctttctaccacatggcattccgctgggatacttctacggggaagcttcctgcccggggcatcgagggcgttcgcgtccgtctgttatggcggtgctgctgtagataaccggatccgcgaatgctaacgctcaccaggatgctatatagccttttttatattgcctatcaagcccggaatgtctgggtctagcgggtattgctaagtaggattgtgacagtcacgcccccggcagcggtgtttcaaagtcccctgacagctcagcatgttgtcacacttcaggactgtgccaatccgattgatgaagaaaatagataatcttgttttataaaacgtgcatgcgcagaatgttgagtgaatattttagtggactatgtacacgcacaaacacttcacaacgagtgagagagcctctgacttcacctgcagcttgccacaccaaggccccggggaggagtgaggcccaacttttatttattatatttttgtggttcttgcaatggagtctcgctctgtcccccaggctggagtgcagtggcaccatctctgctcactgcgacctccgcctcctgggttcaagcgattctcctgcctcagcctcccaagtagctgggattacaggcgtgcaccaccacgcctggctaatttttgtatttttagtagagacggggtttcaccatgtgggccaggctgatcttgaacccctacctcaggtgatccacccgtcttggcctcccaaagtgctgggattacaggcgggagccactgcgcccggccagtcttttaaaagtgcaggccgtgtagaacattgtgagaagtataaactgtaattacagagatttgctgtttgcacccagatagatttgaagaagcaacttggagacaggtttaatagatcagggccattattacagaaataaattattgcatagcttaggacttccaagctaggagtgcagtgactgaactatacctcaaatattgaccttgagatgttcagatttgtagagcatcttagaaaatggtgacattcctggctgatggtcaggatggtgcataccaggccggtaccctggtggctgtctgggcatttctggagccttcaccctgcgagatccccatggggcaggaccccctggcccagaagcttggttttgccatcacaccgagaaggcacacttgtcctggagttagtttacatgaatcgagctcaccagagcctgacgtgtaactgagtataatagcccatttatgtgcatgatgaaatataaacaccaaagaaccgaatgctccacgctcggactagcagattcttatctgtgggggaggacacaggagcggatgacacagacccctgctcagggaccggctagagggcggaatgcctgggccccggccctgtctgcttcctgcttcttccccgaagttcatggcctgtccgtccacatgggcgggaggtgtcccgcgagcagccctcaccctgaccttggctgctttctccattccattccccacccctcctccctcctgacacccatggcattttttcagataagttaatacctttgattaggttccagccaaacctcaccctttctctttccccatgcctttgtgtctctcttcgtctgatgtcgagtctacaacctaatgctttgaagacagactgacttccccgtccttggtcagggggttgctgctgcgtggggggggcggtaaccataatcttgcccccgtgtctcatacacaagctgcaagcttagctcagaagctgtgcctgtcttggctgctttttcttgctgtcttccctatttttgcaggagttttgcacacggtcataaaagttcaggagaaacatgaaacgtgttattctgtttcctgtttaagtcgacctgaggaagctgaaggggtcaggcgcggtggctcacgcctgtaatcccagctctttgggaggccgaggcgggcagatcacgagctcaggagctggagattgaaaccatcttggctaacatggtgaaaccccgtctctactaaaaatacaaaaaaacagccagacctggtggcgggcacctgtggtcccagctactcaggaggctgaggcaggagaatcgcctgaacccgggaggtggaggtggcggtgaagcaagatggtgccactgcactccagcctgggtgacagagcgagacttcgtctcaaaaaaataagaaagaaaaagaaaaaaaagagagagagagagacagagagagagagagaaaaaaagaaagaaagaaaagaaaagaaaactgagggcttgccctaatctcctagacttccttttccctcagtcctgatgatggcagagacgactcctcaaaggctcttccccttggcatggagtgctggagcctgccctagggagggaggacaggatggagcaagacactgaacgcagaattagagctaggcaacgagcgggtgatttcactgtttcctgggtaacaagccccaggctcagctcggtctggtgtagcccctcaaaggggacactgtccttgcccccagttgatggaggaggaaggagcggaaggcagtgtgggatgggttgggtgtgggcattgccacagtgtccccagcaggcctccttctagcctggggatctggcaggtgggtcccagtcaccaccaatgccccatatacccaaggacactggtgacccagcagacctgaggccacagaccaaagacagagtaacaaccccattaaaaatgtgcccccatgggcgggcatagtggctcctgcctgtaatcacagtgctttgggagactgaggcaagaggatcccttaagcccaggagttcaagaccagcccgggcaacatagtaaagtaagaccttgtctctaaaataaaatataaaaaatagccaggtgtggtggtgtgtgcctgtggtctcatctacttgggaggcagaagcaggatgatcacttgagtccaggaatttgaggctgcagtgaactgtgattgcacgaatgcactccagcctgggcaacagagcaagaccctgtctctcaaaaaatttttaattagcggggcatggtggtgtgcacctgtagacctgtagtcccacctactcgggaggctgggtgggaggattgcttgagcccaggaggtcgaggctgcagtgagccgagatggtgccactgcactccagcctgggcaacagagccagagcctgtctcaaaaaaataaaaaagtgtccccagacacaggggcatgggtgaggcctgtcaggactgctgtggtagctcatggtgtcctgtcccttcttcccaccagggaatgaccgtggctgtgggcacaccccctgtccatctgggcctgcctgtgggagctggacactgccctccccagcagccagaagtcctgaaggaaccgtgtgtgaccctcaagaccagaccgggcctgccacaccaacccttcaaagaccgcagcggtccaggcaatccaacgtgggtcccaaagctaggtgaataaccacgaggagcccacggtcagccccttcccatcacatacgcagggaaatgggtcactttcactttcagaaaacaaagcctggaccgcacttaacttggaggcagataacctaatcagaattcacacacgcctgggacttggagccaaaagcacccgtgctcttacctgcctttgtcctatttcctggcgggaaatacagagggcagacaggtcttggcccgcagccacagcccctttaccccaagatgtgactcggtcagccacacggcctcacagcctcctcccaggccctcagctgtggccacggcagccaggcaggccgacccaaggacaaaagccacgggcagtgtcctgggagagaacccggccttgaccacaggctgctggacacctcctgtgtcccccccttaatcctcagaggcacggtgcccaatgcctgggccatattccagattccatccgttctttttgtttcatttacagacagtccccgacgtcacgatttttggactttaccatggtattaaagcaacaggcaggcaacagaaactgggctttgagtcccacacaacctccctggttttcagcacggtattcaataaattacatggatgccccacactttattatcaaacaggcttcgtgtgagatgattttgcccacctgtaggctcatgggagtgtcctgagcacgtttgagggaggctgggctgagccggggtgcctggcaggaaatctgcaggaagtgcattttgggtttttcagcttttttttttttttttttttttgagatgaagtttcactcttgtcgcccaggctggagtgcaatggtgcgatctcagctcactgcaacctccacctcctgggttcaagtgattctcctgcctcagcctctcaggtagctgggattacagacatgcaccaccaccatgcccggctgattttgtatttttaaaagagacggggtttcaccatgttggccaggctggtcttgaactcctggcctcaggtgatctgcccccacttggcctctgaaagtgctgggaattacaggcgtgagccacggcaccagcctgcattttggacttaggatattttcaacttacgatgggtttgccgggctgcatccccaccgtaagctgaggagaacctgtactttctattggtgcctgctgatctacggagtttttaaagtacgatttaaaaaaataataatccttatcaaggataagtgattgcgttacaggacatttgaaaaacagagaaaaggatttaaaaataccatcgactttctctttttgtgacaagaagactcattagcatgtcagcacactctcaggcacacatttccccgagtgttaggagttctgttgcacagtttgtaactgtatctttttaaattgggcatcttatttttattgtcaaatttagacatttataaggctgctccttcctaaaaaaagaaaatgagtaacttatttacttgaagtcaggatgactggggataatttatgtacaaaattgcatacctccagccctggcaaccgctgtgccgccttctgtgcctatagctctgccatttctagaatgtcatataaatggaatcgcgcagtctgtagcttttcttgtctggcttcttccacttggcatcatgcttttgagacccacccatgttgcaagatcagtagtctgttcctttttattgttgaatagtattcccttgcacggatacatcagatgtatttgtccatccaccaactgatggacatttggcttttacctttggaataccgtgaagaaagctgctgtggctgtcctgaaaagatctttgcatggagacgtgtttccgtttctcccgggtaaatacaggcgcatctcgtttcagtgtgcctcgctttctcctactgcgtggaatcgcttttgtttgtttgtttgtttgtttgtttgtttgtttttgagatgagtttcactctgtcacccaggctggagtgcagtggggcgatcttggctcactgcaacctccacctcccgggttcaagcaattctcctgcttcagcctccagagtagctgggattacaggcacatgccaccatgccctgctaattttttgtattttttagtagagacggggtttcactgtgttagccaggatgatctcgatctcctgacctcatgatccacccgcctcagcctcccaaagtgctgggattacaggaatcgcattttttacaaattgaaggttgacggcagctccgtgtggagcaagtccaccggcaccatctctccagcggtgcgtgctcacttcctgcctctgcaccacatgttggtcgttctcataatatttcaaactttttcattgtcatcgtccgttatggtgatctgtgatgagtgacctttgatgttaactattgtaattggtttttggcaaagccacgaactgcccttgtttaagacagcaaactgaatcaagacatgtcgtgtgtgtactgactgctcgccggctggcgttcttccatttctgtccctctccttgggcctccctattctccaagactcaacagtattgaaattaggcctacaatggccactaagtgctcaagtgaaaggaagagtctcatgcctctcactttatttttattttatttatttatttttgagacactctgtcccccaggctggagggcagtggcacgatcttggctcattgcaacctctacctcccgggttcaagcgattctcctgccccagcctcccgagtggctgagattgcaggtgcctgccaccgtgcccggctaatttttgtatgttagtagagacagggtttcaccatgttggtctcgaactcctgacgtcaaatgatctgcctgcctcggcctcccaaagtgccgggattacaagtgtgagccaacgctcctggccgcctctcactttaaatcaaaagttagaaatgattaagcttcatgaggaaggcatgtcaaaagctgagataagccaaaagctaggcctcttgcaccaaagggatagccaagttgtgaacacaaaggaaaagtttttgaagaaaatttaaagtgctgctctaatgaacacacaaaagaaagggaagcagcctaattgcgcgtctggagaaagttcaggtggtatggacagaagatcaaaccttccggccgggcgcggtggctcacgcctgtaatcccagcactttggaaggcccaggcaggcggatcacgaggtcaggagatcaagaccatcctggctaacacggtgaaaccccgtctctactaaaaatacaaaaagttatccaggcatggcggcaggtgctgaggcaggagaatcacttgaacccaggaggcggaggttgcagtgagccgagatcgcgccactgcactccagcctgggcaacagagcgagactctgtctcaaaaaagagaatgcacctggtgggcatgctagctcaagtaatctcagcactttgggagggcaaggtgagagaattgcttgaggccaggagttctagaccagcctgggcaacatagcaagagcctgtctctaaaaccgaaaaaaggaaagaaagaaaatgtacctggtcacccaagagttttgatggagctggagctgtgcaagatgaatgttgtttccacacctgtaacacagcatttattctgcaacccatgggttgaggagtaatttcaactttcaagtcttactattgcagtaatacagtctgtaaagctatagctgtcatagatagtgattactctgatggatctgagcaaagtaagttgaaaaccttctggaacagactcaccattctagataacgttaaggatattcgtgattcatgagaggaggtcaaaatattactcttggtttttttgaggtggagtcttgctctgttgcccgggctggagtgctatggtacgatcttggctcactgcagcctctgcctcccggattccagtaattctcttgcctcagacttctgagtagctaggattacaggtccttaccaccacacctggctaattttttatatttttagtagagatggggtttcaaccgtgttggccaggctggtcttgaactcctaacctcaagtgatatgctcacctcagcctcccaaagtgctgggattacaggcatgagccacctcagcctcccaaagtgctgggattacaggcatgagccaccgtgcctggcccaaaatattactttttttttttttttttttgaggtggagcttctcttttgtcgcccaggctggagtgcagtggcacgatctcagctcactgaaaactccacctcccaggttcaagcaattctcctgccttagtctcccaagtggctaagattagaggcacctgccactacgcccaactaattttatttttttaaggttggaattgcttttattggggacagatgtgcaagtccccgctcatggtcaggttagtgttctgcccttgcagaggtgccagcagcctgacacctccatctgccgcccgccccgggttagtggaacatgcaaagctcagagggtggaggcaggggtggtcgctgctgaagccagacgtccagctaatttttgtatttttagtagagacgggttttcaccatgttagctaggctggtctcgaactcctgacctcaggtgatctgcctgcctcggcctcccaaagtgctgagattacaggcctgagccactgcgcccggccccaaaatatcacctttaatggcaaaactgcaattacttttgcaccaacctaatatcaacattaacagaagttgattgtaacgcctgtggatggctttgagggctcaggacttcagcgcagaaagtcactcccgatgtggtggaaacaagaactagaatgagaagtggagctgagatgggatggaattgctgtgttcatatgatcaaactttaatggatgaggagttgcttcttacggatgagcgttttcttgaggtggaatctgctcctgtgaagatgccatgcgcattgttgaaattaacaaagaatttagaatattccataaacttggttgatgaggcagcagcagggtttgagaggactgactccaattttgcaagaaggtcttgcgtgggtaaaatcctatcaaacagcatcacatactacagagaaatctttcataaaagaagagtcgatccatgtggcaatggatgtggcaggaagagtcaatccattgtcttattttaagattgccgtccaggtggggtgactcacacctgtaatcccaacactttgggaggccaaggcaggcagatgacctgagctcaggagtttgagaccagcctgggcaacatggtgagacctcatttctacaaaaaatacaaaaattagccaggtgtggtggtgtgcacttgtagtcccaggtactcgagaggctgagggaggtggtggcttgagcctaggaggctgaatttgcaataagccaagatcacaccactgcactccggcctgggtgacagagccagagtcagagcctgtctcaaaaaaaaaaaaaaaaaattgccacagccaccccagccttcagcaaccaccaccctcatcagtcagcagccagcaacatcaatgcaagaccctctaccagcatactttatcaagtatgacttgataaacacttaggtgattgttagcattttttagcaataaagtttgttttttttttcttttttaaaatagagtctcattccattacccaggctggagtgcagtggtgtgatctcagctcattgcaacctctgcctcttgggttcaagggattctcctatctcagcctcctcagtagctgggattacaggtgcccaccacgacacctggtatttttagtagaaatagggtttcaccatgttggccaggctggtctcgaatttctgacctcaggtaatctgcctgcctcagcctctctaagtgctgggattacaggtgtggaccaccacgcccagcctaaagtaagtacattctttagacatgatgctattgcacgcttgatagactacagtaaagtatgcaccttctgtatgcactggggaaccaaaaaagattgtgtgacttgctttactgtgatacttgcttaattgcggtggcctgcaactgaacctgcagtatctccaaggttccggctcaacatacattttactttataacaaatgcttgccggccgtggtggctcacacctgtaatcccagcactttgggaggctgaggcggatcacttgagctcaagagtttgagaccagcctgggcagcatggcaaaaccccatctctacccaaaaataccaaaaattagctgggtatggtggtgcatgcctgtaatcccagctacttgggtggctgaggcaggagaatcccttgagcctggtaggtggaggttgcagtgagccgagattgcgccattgcactccagcctgggtgacagagcgagactccgtctcaaaaataaacaataaaacagctgctgcggtgttttcccaagtgactggttccaatttgcattttctccagcaatttatgagagtcccagttgttccacatcctcgccaacatttggtattatcagtcatctaattttagccatcaaatatagccattagcaaatgtgtggtgcatcgccttgcggtctgagcctgcgtgtccctaatgactagcgatggtgagcatctcttccccggcttattcgctattcctgtgccttctctggtgaagcaacttctgctcatttttccgctgagtggcttatcattgagttgtaagagttcttcatatcttctggagacatcttttatcagacgtgtgctttgaaaatatttttgtcccagtctgtggctttgtcttttttacctctttacagtgtcttttgaagagcaaaagttttaaatttttgtgaagtccaacttattaaatattttctttcctgattcatgctttttatgtcttctctaagaaatctctaagggtcaggccgggcacagtgtggctcatgcctctaatcccagcactttgggaggccaaggtgggcggatcacgaggtcaggagattgagaccatcctggctaacacggtgaaaccccatctctactaaaaatacaaaaaattagccgggcgtggtggcgggcgcctgtagtcccagctacttgggagggtgaggcaggagaatggcatgaacctgggaggcggagcttgcagggagccaagatcacgccactgcactccagcctgggcaacagagcgagactctgtctcaaaaaaaaaaaaaaaaaaaggaaagaaaaagaaatgtctaagggtcacgaagattttctcccaagttttccactaaagttttccaggtctcgcttttaggcatctggtccatttcaagttcacgtttgttgtggtatgagcggggtccaggctcaggttttgtgtgtctctctctagttgtcccagcaccacttgttgaaaagactgtcctttccgtattgaaatcctgtgacacctttgtcaaagatcaatgtattgtgtgtgtgtgtctgtttccagactctctattctgttccgttgatctttttgtcattctttcaccaataccacattgtctttctaactagagctttatggaaaatcttgaaatcagatagtctgagtctttgatgttgttttacaaaattattttggttactctaggtcctttaggtttccatttaaattttaaaacttgcttgtcaatttctggggaaaaaatgccttctgggatgtaactgaaattacattgaatccatagatcagtttgaagagaattgaggccttaataatattaaatcttctgcttcatggacatggcaaatctctccagtatcagtatctttttttttttttttttttgagtcagagtcttgctctatcacctgggctggagtgcagcggaacaatctcagcttactgcaacatccgcctcctgggttcaagtgattctcatgcctcagtgtaccaagtagctgtgaacacagccacacaccaccacgcccggctaattttttttgtatttttagtagagatggggttttgtcatgtgggccaggcttcctttctctattgatagtgtcttatcctttgaataagtttttattcaaatagtcagaaagtactttcttcttggactagaataataccttccatatttttctcacatctctccccagtctttcaattctctttcccaagcaacctgttactgtttcataaaggtctttccagatagatttcgttcatacatatgcattattctcgggtgtttatctctccacttaaaaatcacccgcggccgcttagtgtgtcccgctctgcagcttggtgtttcttgtgctgtgtcttagagttattccatgtcagaacacatagaaatcaccgttgttctttgcagttctcttcacactgtgttctaaatgatgcctgtgccataatttaatcatcctcatcgatccataatgaggccctttcctgttttttggctttttctgatctcatcagtggatcaataaatatccacacacattaaaaatagatactggatcaccaggcacggtggctcatgcctgtaatcccatcactttgggaagctgaggcaggtggatcacttgaggtcaggagttcgagaccagcctggccaacagggcgaaaccctgtctctactaaaaatacaaaaaaaaaaaaaaataggcaggcatggtggcacacgcctgtggtcccagctactcaggcagctgaggcatgagaatcgcttgaacccaggaggttgcagtcagccgagatcgcgccactgtactccagcctgagtggcagagcgagactctgtctcaaaaaaaaaaatactggatggccaggcgcagtggcccacacctgtaattccaacactttgggaggccgaggcaggtggatcacttgaggtcaggagttcaagaccagcctggccaacatggtgaaaccccatctctacaaaaatacaaaaattagctgggcatggtggcacacacctgtaatcccagctacttgagtggcttgaggctgcagtgagctgagatcatgccattgcactctagcctgggtaacagagtgagagactgtctcaaaaaaaaaaaaagaaagaaaggaatgaaaggaatgtttaaagtaccgcagaacatctcagaataataggaaaacatgcctcacacacacaaaattcaaatcctcatgctgaggcgtaagaatgacttgaacccaggaggcagaggttgcagtgaggcaagatcgtgcctctgcactccaacaaatacaggatttgaatctgattatttcatttgaatcagtattttagatctgattatccgatatctgtgttttagagcttgacgttaattacaggtatctcatcgcagcatgccgaggggaaagacaatagaatttgaagtgggcccactggtgttccctcagccacgctgtttcctgcagaccttgggctagtgattgaaatgctctgagtctcaatggccacatctgtaaagctggactatttccttcctaggattattgtcatggttaaggaaggtgggcagatgagaacccctagcccaacgtctgacccatgcgtcactttccttctccccataatcacagtacaaaagagttgtcaacttgggctttcaatagataatagttctcttgatctatttgaaaataatagtcaagatttggctattggctgcaaaaatacagtgagggagaaggaacaaggcccagtgttcaatagcatgtcacagtgactacagttcacggtaagttagtgtatatttctgaatagctagaggaaaagatttggaatgttctcaacacgaaggaaggatcatgtgtgaggtgatagatggccggttcccctgatttgatcatgacatgctgtatgcttgtgtcaaaatatcgcatgtacctctcaaatatgtgccaatctatccataaaaattttttaaagatttggctgctattaaaagagttggtttcctgctgggtgcagcggctcacacctgtaatcccagcactttgggaggccaaggcaggcacattgcttgagctcaggagttggagaccagcctgggcaacacggtgaaaccccatctctacaaatagagtttaaaaattagccgggcatggtggcgcacacctgtaatcccagccactcaagaggttgaggcatgagactcgcttgaacccggcaggcggaggttgcagtgaaccgagatcgcaccactgtatttcagcctgggttacagagtgagactctgtctcaaaaaataaataaataaataaataaataagagttggcttcctaatttatttctctgtgcattgagttcgccttagtgagctccctcgtgtggggcgcagctctgtgcactggctctctgatgtctcacacgtaactggctctccccgctgcatttctacagaggatgccagcatcaagccaaatccaccgacggcgagattgaggcctataagaaatccatcatgaaggaggaagaaaagaacgagaagctggcgagcatcctgaaccggacagagacggaagccacactgctgcagaagctcaccacccagtgcctgaccaagcaggtggccctgcagagccagttcaatacctacaggctcaccctgcaggacacagaggatgccctcagccaggaccagctggtgaggccgggcccgccccacaggtcacacctggcgcacggtggtgcctcttcaggcacgtgcaccctgtggctccttgtctccaggaacaaatgatactcacggaggagttgcaggccatccgccaagccatccagggcgagctggagctcaggaggaagacggatgctgccatccgggagaagctgcaggagcacatgacctccaacaagaccaccaaatacttcaaccagctcatcctgaggctgcagaaggagaagaccaacatggtaggcccctgccccagggaggggctgtgcgaagccccctgcagcctgggcatatgagggcaagccgtcctggaggcggagagggcggagtcagtgtgagcagagggccctcctgtgctcactcctttccatggtgttcaggttgtaagggtgatacatttttactgtagaaaacctagaaataggccaggcgtgagccaccgcatggccagctgccagccaaaggctgatttccctggggggacctggagtgtgacttcgacgtccatggcagggaacccccaattgtgagctcatgttcgcatcccctgggatcttgctttatcctttatcacctgtggtgggggtggaggggacttgtgtccttagaaaaaacaattccttacttgaattgttttttctttgcctcttcccgaggggtgaccgcctccccaacaccccgcctcaagcaggcccctttggaggacccccagaggctaccacaggctccaccatttccagagcacatcctagcagtggggcctgcccaacagtccccattttagtctcagaggagggtgacagattcccgatgccaagctctgccggttttgccctcctgaggggtgggaaaggagctggccaggcagagctgaagggcgtggtgggtgtgaaggagcccatccagccgtgctgctaccagccaagtccagttcccaatccccaggcccccgggcccccgccgagcccctgtctgggcagcccgataggtcatacgtgttttgctgccagtttccagaagagggcagcaaagagtcttggaccaacacattcgtctattacgacaattttccaaccgatgccagtccagctgctgaaaagagtacccccgacacgatgtttgaactgctcaaagcctcatgggctgatagaaggtggggtggggaggcatatctgggaggaggagcaaagtgtggatgggcgggaccacccatccggagctggggtcaaccacggggtccaggcagttaatccagggatggtgtagatgcctagggggagccagggtgggctccacagagaccacaaacagccaggagtggagcgggggtgcaggcccggctgtgacggggagggactgaaggggacttggagccatagcccctgcagggcagttggggaggggggaggcagggagtccttggggggcccagatctcagggtgaacttggcagaggaggaggctgcgagctgacattgccacacaactccagatgccggaagcttccactccaggtgggcagggtctgggttccaccacctggggacattgggtctcctgggaagccgcccgtggtggccagtgagagacatggagcccacaggcgtggcgggaggagaagctcagatggccctgaggaggctggggtaggcaggagccacagtcgtgagagagccaaggccttgtgtggcaggagccgacgggcaggggtgctcagggcagacacagggcccgaggccacctgttagaaccatgccctggggaagaggaccctgtcctggtggtgacagcatctccctgttcccagagcagctttggccacaccattgcagctgtgactgccactgcctcactcctgattatcacaaacgtcctctcgataaaccccccgttgccagaagggatccaaagtctgtctaatgcctccaaagagcccacagaggaggccagcactggcggctcagacctgccggacagcaggaggggtcagaacgcatggaggaaccagtgtctaacaattgcttcttgcttcataaactatgctgcaaatgtgatagagtacagcacagccattacagcttacagagcacaggaacataagacccgacttaccagattaaaaagcaggttagcacccagtgtgtagggtgtgatcctatttttattttggagaattatatagaaaagactgggaggaaaaatggattcagatgggaatggtagctaacttgtgtcagaattgcaggcaattgaatgtgttctctgtcctggcctgtattttcacatttcctcacaatgtgtgtgctacgatttaagaagtgtgttagtctgatctcacactgctgtaggaaatacctaagactggataactgataaaggaaagaggtttaattgactgacagttctgcatggctggggaggcctcaggaaacttacaatcatggcaaaaggcgaaacaggcacctccttcacaaggcagcaggagagagagtgtgtgtgaagcaggaaccgtcaaacacacaaaaccatcagatctcatgagaactcactatcatgagaacagcatgggggtagcggcccccatggtccagtcacctcccacaggggccctcccttgacatgtgggattatggggacacaattcaagatgagatgtgagtggggacacagccaaaccacatcaataagaaaagctaataccatgatctctcttttctgtaaaaagccaacatctgggttccaacaagtaggtcccttgctgggtcctggagacagtgggaaatccagcctcctgcactcgtgactgtgcgtttggaatatctccagaggaacatcccgaccgtcagggaacggtggatcagcaaactcgtcccgggccttgggtgggggcaatattcacaggtatttcttttcatcaattcagatgacacatctttccaaaatcaacggtgacattgcccagaccaccctggacatcacacacaccagcagcaggctggacgcacaccagaagaccctggtggagctggaccaggacgtgaagaaagtcaacgagctcatcaccaacagccagagcgagatctcccggcgcacgatcctgatcgagaggaagcaagggctcatcaacttcctcaacaagcagctggagcggatggtctccgagctgggggtgaggtcccaggcagggagacgtggtccccggctgactgtggtgcctggtggggcagagccccctcagatcccccacggtcagacatgaactcctggaaggcacagaactgcctctttccctacctgctttacagacaaaatggcacgtgtgccaagcgctctaagtcacatttttctgcacaaggccagagagtattccggctttgtggccagttggtctctctggcagtgacacggctctgcctccatagcgagaaggagcataggtaaaacgtaaaggaatgggcacggctgtgtccaatcagatgttattcaaggccactgaagtctgaattccaaataattttcacccagcacgaaatattctgctgctctaagaaaagtggcctaatgcgtttgaggcctgatgccatatacgtcatccaggtccctgtactctcaaagcccctttgggttccagaggccccacccaccctgccagcgcacccaccatggggaagctagagggggctccagagccccttagccatatttcctccagcggggtctgtggcttgcggccctgctgagagctaacttgagcccctcggccttcgtccagtttcatgacctcagggttccaggccctctgcagcccactcacaaagacctttgagcccaagaaggctaattttgctttttttttttttttttttttctgagacggagtcttgctctattgcccaggctggagtgcagtggtgccatcttgctcactgcacatctgcctcctgagttcaagcgattctcctgcctcagccttccaagtagctgggaccacaggtgtgcaccagcacacctggctaatttttgtattttgggtagagacggggtttcaccctgttggccaggctggtcttgaactcctgacctcgggtgatccacccgcctcagcctcccaaagtgctggaattacaggcgtgagtcactgcgcccagccctaattttgctttttgatgaatatccggtctagggggaagaagtggggcccctggagcttgaaatcaaaaggctgagcaagctgatcgacgagcacgatggcaaggcggtccaggcccaggtgacctggctgcgcctgcagcaggagatggtcaaggtgacacaggagcaggaggagcagctggcctccctggacgcatccaagaaggagctccacatcatggagcagaagaaactacgagtagaaagtaagagccgccgtgcccggccctgcagtgatgctgagacgagctctgggacgtgggcacctcccaggggaggggcactcagtggggcacgtcgctggatttgcacgcagccttaaaagcaaataacaaacgcgcatgctccctgtattttgtaaatgtgaaccactgcctgcccagctgcccagttcgcagtcacagcgggagggttgagaaatgtcacgaaatggctccaagctcacggacttcagagctctccttgagagaggagcatggaaggttatcatccccgccaagccagggcactcaggtggaaacactggcacgggaaaagccagggtcctgccaggcaggctcctggtgctgtccccacatcacctccagttgggcttagaaaaccattccaccggggctccccaacccttctgaggcccaaggggctgccaaagcaccagggtgcctggaatgatggaggcgggcatccttcctggaccactctccacccacatgtccacctgccgagacatcccgggtcctgcccggtcttgggtcggggatccatgctggtcaggcctgcagcagagcccccatgggaaatgctgcccagacacatcatgtgcccttctcggaggtcctgctgcctctcgccctgcccttcttgggttgcccaaacccgtctgttggtgagtagcaagtcccaaaagaccctatggagctgtcagctgagtatcggtgtcccaaggcaagagctgccgaaataccatgctgtgagatggggaggatcacccatggagagggcagagagaggggctcacatgcccatgtcctggggtagtcagggcacaccatggggacagcaggaggagctggagaagccctgtgaggagtggccagcggatgaaccagctgtggcctcttgtgccctccacccatcttaacatcaagaagagctgttgttttctgcccctacccctgagcttggctggggcagggcaggggtctaagggcctccctctcctggagactcacagtgtctgagcatcaaccaggtcccggtgctccacagatttgcaagtgtctgggggagggagcctggccctcccacacgccctgcccacacctgctggctgtccccacaggcaggtcctctcagttccgttggaggaccaggctttgggagcttagcagccaaaaagagaccccctgtcctctcctctcctctgtcctggcagggacgagattcaggcaggagcgccaggaacgacaagagggaggggatgaagggagctacagggagagacaaaacctggctcacctctcggacactgctgcctgcgggcgaggacccgtaccctcctggggtctctccctgagtctctgttttctgccataggcaagattgagcaggagaagaaggagcagaaggagatcgagcaccacatgaaggacctggacaacgacctgaagaagctcaacatgttgatgaataaaaaccggtgcagctcggaggagctggagcagaacaaccgggtgacagagaatgagttcgtgcgctcgctgaaggtccggccgtgtccacgcagtcccggggctcaggacgatggagggcgggggtacggtccttgcggtgggcgttctgcaccaggatgtaatttccacacccgttcaagatgcttgtaggggtattagaaatccagcctgcagccctgccctcggtgccgggatagagggcaccagccccggcatccacaatcccatggccctccccacagctgtcccgccccctcccccatgcaggcctctgagagggagaccatcaagatgcaggacaagctgaaccagctcagcgaggagaaggcgaccctcctgaatcaactggtggaagcagagtgagtcccagtctccagccacacgtgggtcatgaaggtcactgcacctacaggcctctgtccgttgaagaccatgtaggaggccaggtgtggcagctcacacccatatcccagtgctttggtcattttttgttgttgttttgttttttgttttgttttgttttgtttttagacagtcttgctctatcccacaggctggagtgcagccgtgcgatctcagctcactgcaacctctgcctcccagcttcaagtgattttcctgcctcaacctcctgagtagctgggattacaggtgcccgccaccatgcctcactaatttttgtatttttagtagagatggggtttcaccctgttggccaggctggtcttgaactcctgatctcaggtgatctgcccacctcagcctcccaaagcgctgggattacattcatgagccaccgtgcccagcaatcccagtgctttgggatgccaaggcaggaggctcctttggggccaggagttcaagacaagacggggcaacacagtgagaccccatatctacaaaaatgttttaaattggccaggcatggtggtgcatgccggtagtcccagctactcgggaggctgaggtgggaggatcgcttgagcccaggaggtcaaggctgcagtgagctaggattgcaccactgcactccagcctgggcgacagagcgagaccctgtctctaaaagaagaaaaagaccacctgggcatgggtctggaacccaccctagtggatcccagattccccacagagtctgtctaccccccttggtggcagttcttgagccaaacgagttactgctagaaattgaagggtttcctttgtgataaagtttttaagtatccattattttatggtgtctgattattaaagtaacacacacccagctctaaacattttaaactatacaatgcgtgcaaagtacccagggaaaattgcatataattccaacgcccttcacttcccagaaaaccaatgtgtagctatattcctttcttgttttgctctgttttttacacaaatgggattgtttcagaagttcccccttgaagcactttagtattttcatggccatctttccgtgtcacacacgtgggcccatatctccctgtggaaagggtgcggagcaggcgtggtgtggaggcaccgtcctttcttcagcgtgctccggaagggatgaatagcgcagggatcgcctgttccttgcggtttgatagaatctaggcaaaaaattatctgggaccaatgctttggggggcttgtatctttggtgacatttaaatagcttttagactattggtgtattcaggctttttactttttcttaagtcagcttctatcaattatactgactttctcagctcctacagttatatatccctgttctctctctctctgtctctctgtttcttccccacccccatctccctccctccccctgtatgccagaggttggcaaacgtttgcataaggagcccagtagtgaacacttcaggctttgagagcctcacgctttctgtcgcagctgcttggctctgccattgcagcttgagagccttgtaaagccttagagtgtgagctcaccgaagcatcagaagaaaactcctaatttcttacactgcctctcctacctctaaagacaccagattatgctttgggagaaaaaaatccaactggcaaaagagatgcgttcctcagtggattccgagatcggccagacggagatccgggccatgaagggcgagatccacaggatgaaggtgaggggaggagagcggcgtggcagggcctgctgggtgccagcccttgggctctggagacctggccacaccaaggcctcggctctcccggggctcctgtgggaaccacactggccacattggctggtggcaatgggtgagatttccagggagcgacccgctccagcagagtgacctgcactccagccgagcactggcaaagcgcacgtcccccttgacccagcttttaccacacgcttgcttttaatgtgcagaaatattgcagaacaacacaggacgcacacaggcacgtgcacgaacaacacgggacgcacgcaggcacgtgcacgaagaacacgggacgcgcgcaggcacgtgcacgaacaacacgggacgcgcgcgggcacgtgcacgaacaacacgggacgcgcgcaggcacgtgcacgaacaacacgggacgcgcgcaggcacgtgcacgaacaagggacgcgcgcaggcacgtgcacgaacacaggacacacacagcacgtgcatgaacaacacaggacacacacagcacgtgcatgaacaacacaggacacacacaagcacgtgcatgaacaacacaggacacacacaagcacgtgcatgtcatctcacaaaacgctgttttattcctactccatgtaatcacagcacgctggtatttttaaatgccggttgtaaccctcaaactttgtgaccctctaacgtatcccactgtgagacagtctcacaccacagaagggctcagagagcacccccatctcatccttcacagccgcgttgtctctccatggtcacaattagatttcattgcctttaaaaggctggtaattaaattgcaagtggtcatcaagctaaaggttcagggccttaaggataacagtaagagcagttcataaaataaatgggcctcactttcaccatgccatgctaaatagaaattcctctgctgagttatttttcagatcaagtgcatatgctaataagatgttgtgtttaaaaataccaaatttaattgacttttcatattacagaagccacatgtatttgctggagcaagacaagctctcctccacagagtgggggccaaagagaaggtccgggctgctcctccctgtcccttcttccccggctccccctcctcagccagggcgactgtgtcagccgctgcagggataaggcctctcaccttctcggatctcacacaaatgcacaggcagggcttgccttggccctacatggttactaacccattctttaacagttacaatatatactatggatatttcacaatttattgatccagtcccaggttggtgaaaattcaggttgtttccaatttgttgttggtgttattgttttgtcctagacacaatgtgtgttagggttctccaaagaaacagaaccagtagactacacacacacacacacacacacacacacacacacacacacagagagagagagagagaaagaaagagagatttactatgagaattggctcttatgattatgagggccgagaagtcctagtatccggcatctaatctgcagacccaggagagcccatgattcagtcaagtctaagacctgagaaggaggcaacggtgtcatcccagcccagtgttcccccacccccaccccgtcccaccaccttcttctgccttttctcctcaggccctcaacagattggatgatgtcacccagcctggcaagagggatctttactctgttcaaatgccaatcatttccagggacaccctcacagttctacccaaaacagaaatcatgtttttccagctatccaggcattccttagcccagttaggttaacccaaaatcagccatcacacagcattataatcacatccttccttactggttcttttttttttcttctagactatgttcccaaaggtgagattactaggtcaaagggtgtataaattctgactgtaacagcctgacagattacttgtctaaaaagcacatggcggcagtcatatctgtaccttcttctcagttctggtgttatttatctatctttttttttttttaattgaggtttttcagctgagtggaagctcacagcttagggcattcagccctataaggattttctgggtttttttgttttgttttgtctgtttgttttttgttttgtctttgagacagactctctgtcattcaggctggagtgaagtggtgggatctcggctcgctgcaacctccgcctcccaagttcaagcgattctcctgcttcagcttcccaagtagctgggattacaggtgtgtgccaccatgcctggctaatttttttgtattttcagtagagacggggtttcgccattttgcctaggctggtctcaaacttctgagctcaggcaattcgcccacctcagcctcccaaagtgctgggattacaggtgtgagccactgtgcccagccagccctacaagttttgatagagacgtacaatcatgtagccactgccacatcatgatatatttcctcatcctcgaattccctcatgccctctgtagtcagctcaccgcataccccagccgccatgacagccaccagtctctctccatgcctgtcgttttggcttttccagaatgtcacataaatggatcaaatagggtgagacatattgagcctgactttccttgcttagcctcatgcatttgagattcttctgtgtggtgaagcccaattacccagtctgttctctttttttagagacagggtttcgctctgtcacccgggctggagtgcagtggtgcaatcatggctcactgcagccttgaccttgtgggctcaaaggatcctcctgcctgggcctcccaaagtgctgggattacgggcacacaccacggcacccacccctcagtctgttctttcatggatcgtttcagtagcttatctgaggagcctctgcctagctgaaggtcacgaagagcttctcttctgttttcttctagaagcttcctgcttttaggttttacatttaggtccataatgtattttgagttaatttttgtgtatggtgcaagttgtggactggggttaattttttttgcatttggatgtccactggagtcagccctgcttgcttcctgaaaagactgcccttcctccaccgaactaccgtccagtccttgttgaaatcagctgacacgtttgtgtgggttcgtttctgggctgttttgttctactgatttctgtttctgtcccttcaccaatgccctgctgtcttgatttctgtaactctatacttacgaaattcctccgacttcctttttttttaagacagagtcttgctctgttgtccagactggagtgcagtggcactcacatctcagctcgctgcaacttccacctcctgggttcgagcaattctcctgcctcagcctcctgagtagctgagactacaggcatgtgccaccacacccagctaattttttgtatttttagtagagatggggtttcaccatgttggccaggctggccttgaactcctgatctcagatgatccacctgcctcggcctcccaaagtgctgggattacaggtgtgagccactgtgcccggccagctgattttaatattaggctgttttcttatttctcttttttttttttttgaaacagtctcgctctgttgcccaggctagagagcagtggcacgatctcagctcactgcaacctctgcctcccggggttcaagtgattctcccgcctcagcctcctgagtagctgagattacaggcgtgcaccactatgcctggctaatttttgtatttttggtagagacgggatttcaccatgttggccaggttggtctcaaactcctgagctcaggtgatccaccggtttcggcctcccaaagtgctgggattacaggcgtgagccaccgcacccggcctgttttcttatttcttaacattttttaggagttccttatacattcggttattaacccctgtcttcaatacctattaaaatagtggctctgacctatcattgtctttgccctctgtttagggggtcttttgccacacagactttttagtgtttcttagtgtggctccaagtcactttatggtacattttaaacctgagtaagcttggtctcccttcaccctgcttatcttcgggattcttgcctgttttttcttttaaatcaactttaggcataactttcataagataaaatatgcttattttaaacgcagagtttgggctgggtgcggtggctcacgcctgtaatcctagcactttgggaggccgaggcgggtggatcacttgaggtcagttcaaaaccagcctggccaccacggtgaaaccctgtctctactgaaaaaaaaaaaaaaaatagccaggcgtggtggcaggtgcctgtaatcctaactacttgggaggctgaggcaggagaattgcttgaatctgggaggtggaagttgcggtgagacgagattgtgccatcgcactccagcctgggcaacagaaggagactgtgtctcaaaaaattttttttataaaaaggctgggtgcagtggcttatgcctgcaatcccagctttgggaggccaaggtgggcggatcgagaccatcttggccaacatggtgaaaccccatctctactaaaaatacaaaaattagccaggcctgggggcagatacctgtaatcctagctactcaggaggctgaggcagaagaatcacttgaacccgggaggcgaaggttgcagtgagcctagatggctccactgcactccagcctggtgacagagcaagactccgtctcaaaaaatttttaaaaaagcacagtttggtgggttctaacacgcgcacacatctacgtagccactgacgccatcaagacatagaacctttctatgactccagaaagttcctgtgcacccccgcagccaatcctcacgctacaacccagtccccagccccaggtcctccacccaagccaaggtgcattgtcacaactaagaaattaaccttcatgcaatactgctaaccaaactacaaactctaatcagatttcaccaattttctcaatgagatttttttctgctgcaggatctgaccctggcttagttgcttttagttctcacatctccttggtggcctcaggtctcggccatttctccaccttgcactgtctgcctgtggattccgggttcccacccagggctgctgcctccatgtcccttgttcctcctggcggcacaggcctcactgtttccccgccgatccccatgcgtgtcaccggaggatgagcgaggccagcgccccggccactctctctgcagctgcagctcaggcctgccccagccccagcccctctgtcctgtctcccaggtcaggctcgggcagctgctgaagcagcaggagaagatgatccgtgccatggagttggcggttgcccgcagagagaccgtcaccacccaggccgaggggcagcgcaagatggacaggaaggcgctcacccgcaccgacttccaccacaagcagcttgagctgcgccggaaaatcagggacgttcgcaaggtagggagcagcggaaaggaaacagggcgcctgctcctctctctgggattcaaggaacactccaggaaggcgtcttgctgggtccggggtgaggatgcagaggctgcagtgggggcgtgctcagcactgctaacctgctgctgggtgctgggtctggggtgaggatgcagagagaccatccccagttctgctaacctgctgctgggttcggggtcaggggtgaggatccagaggctgttagaggggcgtgctcagcactgctaacctgctgctgctacggggcctgtctgggagactgcagaatgcccgcaccggacagagctgctgacacccagagacggccgtgtttcagcccctccctgcatatcggaggtggcattgggaaggcatagagttctggggaagaggccagctcatgctggggagcccgagtgggcaccggggaccagctgatgggagcggggtgggcgcctcgagagcctgcatccgcataccccaggccatgtccactgggcctgcactgggagggcccagctggtgctgtccggtgcttaccacctcaacggttgccagccaggggccctgcactcacacttcccaggttggccccacagccccgctgacccgctgtgtgacctcggagtatgtgggccttgccagacctgcagggcctcgtctgctggggggtggaggggcagagttaaatgtgacagcaaccacagccgtgggtggggaggtggccttggggacagctgacagcatggcttggagccacgctggaccattcctgactggggcatacggtctgacctcccagagccttggtttactgacctgtgaaatgggtgcccacctctcagagtcacccagagggttccctggagagtgctgaagtcatccctgtagggaaaggctagccaaaaatggcagacatgcatgggctgctcatttggaagtaactggaagtttctggagagaggcggcagagtggcctcttctcagtccttttccactacattggctactcctgatgtccatccctccctcagcttcctagcccggcccctgaccactccttgctgccctgggcaccccctgagtcccctgccaggaccccatgcccacccctcacctcctgtctgctccaagccacactcaagttctccagccccaggccctgcgccccacacgacgccatcactgatgggtccttgtcctcacccctgccagccccaccccaaagatcttccgtgtccccagccagccctgagagtcactgtgtctcctgcatcaccccctggaccatgtcagctgccaaacactgcctgcccggcttttctttctcttaattgtgctgctttccccgaaggcggaacgaacaccacacagatggccccagcctcgctcctccctcagcagaggcccccaccctcctctctcccaggctccccagcctgcctctcggcccttacagcctcagccctgcccttggcacacggctgctgaactgtgccagtctcctgcctggggacagacccactgcacggggagccccagaaccactcaggcccccatctctctgccacacctgccttaaaggagcagtgtgcagtgtgggctggctgggcctggcatctcccaggcctcgcctctccagccctcccattcctctttgggagcctccctggatggagtgtgtggaaggtgcctggcaggtcctcccagcctgactcttccctgtccgccaagtagccgggctgcaggggcccagcatggtcctgtgattctcctaggccaccgatgagtgcaccaaaaccgtcctggaactggaagaaacacaaagaaatgtgagcagctccctcctagagaagcaggaaaagctgtcggtgattcaggcagacttcgacacactcgaggccgacctcacccggcttggggccctcaaacgacaggtaaacgtgtcccaggaggtccctggggatgacggccatggaacatgccactcacacagaggtcctgcgtcccctctgtgcgagtcacggcctctcctgatcaggtcacggcctctcctgatcccaggccagtaatagcaccaccggctgctcacatgtttgtggctttgtgatttgttccactgacaaatgttgatggagtatctgttatgggctgggctcatgttcagcgtgcgagggttacaaaatagaacacaaaaaacaaacattcctgtgctcttagaggttacctcctggggcaggaggacagatgatgagcaaaataattttaaaagatacagtgtgttgtagctaggcatggtggtacacacctgtggtgccagctactcaggaggctgaggtgggaggatcgcttgagcctgggaggtcgagactgcagtgagccaaggttgtaccactgcactccagcctgggtgacagagggagatcctgtctcaaaaagaaaagaaaagaaaagaaaagaaaagaaaagaaaagaaaagaaaagaaaaagggaaatggtgtgttaggtggtggtaaatgctttgaaggaagataaaccagagaaagaagcgtcagggtcattggggtgaactgagggattgacattttgagttagggtgatgcgggaaggccctgcggagcagacattggagtccagacctgaaggaggggacagcccacaaaaccaccccaggtggacaggacagcccggcaaggcagaagcctgagactgcgcaagggctactagaggccagtggggcaggctggggaggttagggtatgtaagacccaggcagagaggggcggcccagactgtgtgcggccttagggagagcacaatcatgactttggacttttctcttggggaggtgggcacacagaggagggcgttgggtctgagaggtgacttgggctttagcgggctcccgcgcgctctaagattgcatgtggatgaagcatggatgcggggggcacctggggctatttgcagtgcttcagggcggcccctgtggggctggcgagaagccatcaggctctgcatatgcgttatgccaacatcgcccgatgggattcctgctgggttggctgtggtgtgagcagagacggaggtggagaatggctccaaggttctggcctggccaactgagatgatgaggggaacgtgcctggcactgggcctgacacacggcaggtgtcaagaaggttgcctaagccgggcacggtggctcatgcctgtaatcccagcactttgggaggccgcagcaggtggatcacttgaggtcaggagttcgagaccagcctggccaacatggcgaaaccccatctcaactaaaaatacaaatattagccaggcatggtggcgggcgcctgtaatctcagctacccgggcgtggtggtgggggtgggtgcctgtaattccagctagttgggaggctgaggcaggtgaatcgcttgaagccgggagccagaggttgcagtgtgccaagattgtgccattgcactccagcctaggtaacagagcgagacagcctcaaaaaaaaaaaaaaaaaatgccggcgggtcacagtggctcacacctgtaatcccagcactttgggaagccgaggcaggcggatcacgaggtcaggagatcgagaccatcctggctaacacggtgaaaccctgtctctactaaaaaaaaaaaaaatacaaaaaattagccgggcctggtgacgggcatctgtagtcccagctactcaggaggctgagacaggataatggcgtgaacccgggaggcggagcttgcagtgagccgagatcgcaccgctgcactccagcctgggcgacagagcaagactccatctcaaaaaaaaaaaagaatgcctcctagatggtgatgatgggtgacccataaagcaccgacccagtgcctctcagcctcttccctgagatccaggggcgcaacaccttcacgccgtcccttttcaggcgtaggtctcgcctcctcttcggcatttcctggaatctgagtttgtggggggccagcaggtgtctttcttctggtttgcatagccctatatggagtctcttttcctacccagaacctttcagagatcgtggccctgcagacacgccttaagcacctgcaggctgtgaaggaggggcgctacgtgttcctgttccgctccaagcagtccctagtgctggagcgccagcgcctggacaagcgactggctctcatcgccaccatcctggaccgcgtgcgggacgagtacccccagttccaggaggccctgcacaaggtcagccagatgatcgccaacaagctcgagtcaccagggccctcctagggagcagcctggactccgccttgcaaggcctccaggaagagatccggaattgtgtttgtcatgagggacttggaatcttttgtgttcctaaaaaccacatgtaccctcagaagggcatcgtttaagagaaataagccagccccacccataggaatctttttagccactcagcaatttaataaaccaggtaaaatcctagcgtttcccatggcatcccatcgcaaagacagagcctgtgactgcagacccacacacccacactcccacactgggcttactcgtccaggtaacactttggtttgcagcactcccaaatctgcacgtgcctctcacaacacaacgctgccacaggtccacaagctggtgggctgagcagaggtgggaaagttaaggcagctccagccagcctggcccgggaggctggtccccccagcacttccctctactaggtgcatctgaaaacccacaaaccaccttctttaccagttttcccatccccaccccttagaactctcaggtcccttttcctgcccccatgtccccatttgagttaaattcagatccacagcttgcaggagaaagtcagtggccccagacacacgtaacagggtgagcactgaaataagagcacgctggggcgtccacaccaagggactacgccccagtctgcccacctatcttttctccatcattaacccagcgctctttctccctggacttccaagtaccaatgaccttggggcttctttgcagtttaaagggaaaatgctctacaaaataatttcactttcaaacatttcagcagaagaataaaatcttttttctgaatatctagtaa

SEQ ID NO: 1150 - DNA, 17331 bp, Homo sapiens
gacttcctcttcctctcagggcaggtgcagctgccacagtgagacgggcaccccgacccgggcatggaggggggcaaggggcccaggctcagagacttcctgagtgggagtctggctacctgggtgagggggcaggtggcagcgggttggggaggggaagtgagccccagccaggggctggtgttggcgctggccgggggagggtgaggcagaaccaggccggaggggagggctgggttcaaatgtgggggatggagatatggtgtggggggctgtggtgagggaagaggggacagaggcactcagaggacgggtgagaaggggtgcttgggctcactggggcaggtcggaggggctcagggttcactctgctggtcggctgacccctctgggctcctcacaggcgctgggactggccgggctggtcggggaggcggaggactcggagggggaagaagaggaagaggaggaagagccgcccctttggttggagaagagattcctgcgcctcagcgatggggccctgctcctccgggtgctgggcatcatgtaaggggcatcgggccggggcggtggcggggaaggatctgagaggaggggaagcgggtgggcggagcctgatgctcagtgggcggggcctgagggacggtgggcgaggcctgttgacgggaggcgggtcctcgagcccacctccggctcatagtgcccccagctcccgagggggacctcggatgctcagaggccttgacggacctgctgcctggcgagtgtggaacctgaaccacctgtggggccgactgagggacttctaccaggtaaggggtctcgagggaaaggcggagacaggaggggaagaggagccccttcgggaaggcgcctcatatagtctgcctctctgcctccaggaggagctgcagctgctgatcctgtcgccacccccagacctccagacattgggatttgaccctctctcaggtgctctccccacccacaccctcctgcctctgcccccgcactactctaccttccccgccccagttaaccccttgtggcatgtgccttgcagaagaagcggtggagcagctggaaggcgttcttcggctactgttgggagcgtcagtacaggtgagccggcggtgggaaggaaaggttagggtcgagctttggcggtagaggagggagatcctgcaccagctccccttcctgtctcccctcagtgtgagcaccgggaactcttcatccgccacatccagggcctcagtctcgaggtccagagcgagctggccgctgccatccaggaggtactgagacggttcggcagcccagactggtatggcacctgggacgcccttgccacaccgcggcttccactgaactgctcttcctgcgccccaggtgacccagccgggggccggcgtggtgctggcactgtctgggccagatcctggggagctggcacctgccgagctggagatgctgtcccggagcctgatggggacactgtcgaagctggcacgggagcgtgacctgggggcccaggtaggggcagcaggggcatcgtggactcaggttggggaactggaggaccatcagggagccggttgtgcaagggagatggaagtttggggcccaggcatggggttgtggtctgaggtcttgggccatcagtgatgtcacaaccagatggcccaagaccccagaccacaaccccatgtctggtgttgtggttgggggtcgatgtgcagaggcattggataagttagtcctgacccttgacccctgacctacagcggctggctgaactgctgctggagcgagaacccctctgcttgaggcctgaggctccctctagggctcccgccgagggcccctcgcaccatctggccctgcagctggccaacgccaaggctcagctgcggcgtctgcggcaggagctgtgagtgtgcgcagcctgggaaggggactgagtggagaggggcagattaagcctggatgggaccctagccctggtggctacgggaggggtcaggcctgggaagggctgggggttgtgggcccccagaccctccctagactccccttccctccagggaggagaaggccgagctgctgctagactcccaggccgaggtgcagggtttggaggccgaaataagaaggctccgccaggaggtgcgctcacatgctccccgccaccgcggcattccctaacctccccgcacccggtcccattgcctccctcccaacccggctccttcccgtccctaatccctctggcccgcggctggctgttcccagctccacaccgtctggcccaggcccaggcgctgtcgggacaggccaagcgggccgagctgtaccgcgaggaggcagaggcgctgcgggagcgggccggccgcctgccccgcctgcaggaggagctgaggcgctgccgcgagcggctgcaggcggctgaggcctacaagagtcagctggaggtgaggcggagacggagccgcggggcggggcgtgcgcgagggggcgggccaggaggaggggcgagattgggtcccgagggcagagaggcaggttctctggaggggacagtcacaggtggagaaatgggtgaggacaaattcagggaggtggcgtctgggaaagggcctccagaggatggggcaggtgtaggggagtgggggggctgtgtaagtgatgcagccttggaaggagggctgttcccgggggggaggggcggggcatggacagaagggcggggcctgcacaaagggcggggccaggggcgagggagaaagtacctgaagagatcttggtgggaagaagatggaagggagtggcggggcctagagactgatggggtgcagggtgggggagggaggcagggtctgtgacaggctgaggggaaggagtttgggaccctcaggcgctggagtgcatgggggctgcgtggctaccggttctccctgctctcccaccaggaggagcgggtgctctcgggggtgctggaggcgtccaaggcgctgctggaagagcagctggaggctgcccgagagcgctgcgcccggctgcacgagacccagcgcgagaacctgctgctgcgaacccggctgggcgaggcccatgcggtaaggtagccagagtgatcccacttgggttgccccgtcaccccatgaccccattgattccctagtggtccctagtgattcttgcaacctctgctcttggtgacctctagtgaccctccgacctacacactcggcctggccatggtgtggagggcttgtctgacccttccctcacccccaggagctggactctctgcggcatcaggtggaccagctggctgaggagaatgtggagctggagctggagcttcagcggagcttggagccacctccaggatcccctggggagggtgagggaccccactggaagggctggggtgggggcttcctatgctttccagcagtgtactggggagagcctctgactccctcccttctcccaagcctctggggtgtgtatgtgaggagccaggcagtaaaggaggggtcctgacctcatctctcatcctcagcacccctagcaggagcggccccctcgctgcaagatgaggtgagggaggcagaggctgggcggcttcggacccttgagagggagaaccgggagcttcgggggctgcttcaggtgcttcaggggcagccagggggccaggtaagtcccctcccccagggtcctggccggcccttcccctagtccctccctgggcctgactgtccctctcgtatgccctcagcaccccctgctggaggcaccgagagaggaccctgttcttccagtgctggaggaggctccccagactcctgtggccttcgaccacagccctcagggcttggttcagaaggcaagggatggaggcccccaggccttggacttggctcccccggcattagactcagtgctcgaggcatcagctgagtgtccccaggcacctgattcagacccacaggaggcagagagtccccttcaggcagctgccatggacccccaggcctcagactggtccccgcaagagtcaggctctcctgtggagacacaggagtccccggagaaggctggccgtagatcctctctccagagccctgcctctgtggccccacctcagggtccagggaccaaaattcaggccccgcagttgctgggaggagagacagagggaagagaggctccccaaggcgagttggtgcctgaggcctgggggttgagacaggagggccctgagcacaagccagggccttcggagcccagctctgtgcagctggaggagcaggagggcccaaaccagggcctggacctggccacgggacaagcagaggccagagagcatgaccagaggctggaagggacggtcagggacccagcctggcaaaaaccacagcagaagtcagaaggggctcttgaggtccaggtctgggaaggcccaatcccaggggagagcctggccagtggtgtcgcagagcaggaggccctcagggaggaggtggcacagttgaggagaaaggctgaggcccttggagatgagctggaagcccaggcccgcaagctggaggcccaaaacacggaggctgcccgcctctccaaggagctggcccaagcgcgaagggcagaggccgaggcccaccgggaggcagaggcccaggcctgggagcaagcccggctgcgggaggcagtggaggctgctggccaggagctggagtctgcgtcccaggaacgggaggcgctggtggaggcgctggcagcagcgggccgggagcggaggcagtgggagcgtgaggggtccaggctgcgggcccagtcggaggccgccgaggaacggatgcaggtgctggagagcgagggccgccagcacttggaggaggctgagagggagcgccgggagaaggaggccctccaggcggtaggtcaggttggggctcaccgctggggttgggaagcagagttccaggctgttgggagttactgattccatcagcagctgttcagtgggtgcccagcactgagctggggctggagatagaaaggccaagtccacccctgccttccaaaggtgtgcctggcctggggcacagagccatgtccactgtgtgatgggggcgctgtgggagggggtgggactgcctagtacacatcttggctctctggctgcagcagtagactcacctccaccccaggcatccttctgtaaaacaggggtactattcctggccacctggggtggtcttaggaggaccttgggagacagtagctgtaaaggtctggttcatgctggcaagggtatgttgtaagtgttcaagcactggttattcagagccaagtgctacgagagcccatgggagggtgagctgatgcccaagtggaggcaaggaggctttaggaggagtgaccataatgtcactaggtggggaggacattttgtccagagggaatggcatgtgcaaagacaaaggcattaaagacgctcaggggctgggtgtggtggctcacacctgtaatcccagcactttgggaggccgaggtgggtggattacttgaggtcaggagttctataccagcctggccaacatggtgaaaccctgcctccattaaaaatacaaaaatcagccaggcgtggtggcaggcacctgtaatctgttacttgggaggatgaggcaggagaattgcttgaacccggaaggcggaggttgcagtgagctgagattgtgccactatactccagcctgggcgacagagcgagactgtctcaaaacaaacaaacaccatccaatgaaacaacaacaaaaaaagaatgctcagggcccaggaggaagggatgatgagggccagctttgaatgtgttggtcctccctccccaggcagggaaagccagggtagaactgtgtggggctgcgcttgaggagggtcaccttggtggacaggggagcttggggctatcaggacgcagtagccatggtgtaagtggcagaggaagctgactagggaggcatgggagtgggtgtgagaggaggactggacacttttttctttttgagacagagtctccctctgttgcccagtctggagtgcagtggggtgatcttggttcattgcaacctccgcctctcaggttcaagagattctcccacctcagcctcctgagtagctgggagtacaggcacacaccaccacgcctggctactttttgtatttttttttttttttgagacggagtctcgctctttcgcccaggccagactgcagtggtgctatctcggctcactgcaagctccgcctcccaggttcacgccattctcctgcctcagcctccggagtagctgggactacaggcacccgctcccgcactcggctaattttttgtgtttttagtagagacggggtttcaccatgttagccaggatggtctcgatctcctgacctcgtgatccacccgccttggcctcccaaagtgctgggattacaagcgtgagccaccgcgcccggccaatttttgtatttttagtagagatggggtttcatcatgttggcctggctagtttctttcttttcttttcttttctttttttgagacagagtctccctctgtcaccaggctggaggcgtgatctcggctcactgcaacctccacctcccaggttcaagcgattttcctgcctcagcctctcgtgtagctgggactacaggtgcatgccaccatgcccagctaattttttgaatttttagtagagacagggtttcaccatgttggccaggatggtctcaatctcttgaccttgtgatctgcccgcctcggcctcccaaagtgctgggattacaggcgtgagccaccgcacctggccaacacacttttacttattcatttaaacatgtttacaggcatcttcttggtgccaggccctgtaccaggctctgggcacacagcagtgaccacgaagctagcaatccagtgtttgggcgtggcttcagcttccttccaagctaaggaaggggttagggcttttgccatgggggattgggcagccactgaaggctccccaatgggcaaagtgagcaaagtggtcaggtctgcgtgtgaaaaggcgcgaggaagggtgtttgggccaatgggccccagtgctaggggacctgtgagattgcaacacaggtaggaactgagtcatcctgcacaggcagtttccagtcccatttctgtacagacaaggaccctgaaattcagggaggaagagtaatttgctcagagacccattatgaggatggggggtggggagaacactgctgggtagacatggggtcaggcgttgtgcaagacaggcccagggtaagggggttctggcgaatgtgagagggaaggtgagagaccatctctggggtccactctgtggggtgtggctgagatgctgtctagccgggcgacctgcctactttccagctgtgtggcttggggcaagttacttaacctctctgagtctcagttttctcacttgtaaaactggaataaaaattgtacctgccttggctgggcacagtggctcacacctgtaatcccagcacttcgggaggctgaggtgggcggatgaccggaggtcaggagttcgagaccagcctggccaacatggcaaaaccccaactctactaaaaacacaaaattagtcgggtgtggtggcacgcacctgtaatcccagctactcgggaggctgaggtaggagaattgcttgaacccaggaggcagaggttgcagtgagccaagatcgcgccactgcagtccagtctgggtgacagagcaagactccgtctcaaaaaaaaaaaaaaaaaaaaaaaaattgtacctgcctcacaggatcctgtaagataatgagcgtagggagcttggggcaatgcctggcacctagaatggacctgttccatgggagggaatggcagcaggtaggcagtgaaggtgagggtagggctggcgggctggaagagccggctccaaggactgagagggtgggggaagctagggacaaagggggaattttgtgagatttcctggttggagcaggagaaggtggctggccagggggaggtcagggaaccagggggtctcaggttgtccactgggtggggaagcctcccaggcttgggggagggggttctaggagggctgtggccagggcccggaggagggcagggcaggggctgggcgggaggttctattcaccgtgcctcctaccccagtacttgcgctagtggctgtcagccagccaggcagcagtgcctcatcggacttgtagtttttcagggagaggtggtggccaagagtgtcaggaggtgcagtgccccttgggcaaggcctaggtgcagttattaagccaggaaggtagttttcagcagcaaggcttgtaggcttggtttccaaggcaggatttggctggcagctggtcatgggcagctgtccccgaagcttcatcctgccaggccccccatgtggcagaatggtttggtctccctccctctggggcacacaggccagaatgggcctcccgtctccttccaaagtggtgcagcccaaccgccaaaggccacaggtcacctagctggcagcatcctggcgccccctgcccccccagcccccactgtcagctcctgacttcctgtccctccagccctccgtggccttttccctgtagccaaggtctctcacccgacccacctctgctgagcctctctagctgtctcgctgtcacatggctggggtggcagcccaccgggcgcatccacctttcactgcgcacatgaagaaccgtgggctcagagaggtgacggcacttgcccaacatgtgtcacctaccgactcccagcccaggggccttcctcatgccctgccaggcttacaacacccagctctttcatgcccaatttcaagggccccaggctttgctcccattttatagatggggaagtagagcccaaaggcttaatgatacgtgcccaggatggcaggtcaaggacagaaaggcagctctcttgactctcaggcctctgtctccggctgtctcctgcccccttgccctgagcctgctctgcttgccctcaggagctggagaaagctgtggtgcggggcaaggagttgggggaccggctggagcatttgcagcgtgagctggagcaggcggctctcgagcgccaggaatttctgcgagaaaaggaaagccagcaccagaggtggggacagggctgaggggaagaatgagggaggcaggggtgtggtggggcgagggtggggtggggctgggtgctaaggattctcctggcaggtaccagggcttggagcagcggctggaagctgagctgcaggcggcggcgaccagcaaggaggaggcgctgatggagctcaagaccagggccctgcagctggaagaggagctgttccaggtgatgcctgcccgcctgggagctgggggccatgccaccctgccctccatcccatgagcagatgccagggtcatctgtcctcctagtcttgcctctggattcttggctagctacttgcctcactccccatgtggggcctgttggagagagcactgtgctgggagtcaggtggccgtgttgacttatctggggtctcattttccccattctgcacatggacagaacttctgctgtggatgactgctccgcctgtctcacccgaggtcctccactgcctagggagctcagtgtttggcatcaaggaagccagcgatggtttctgatacccaggctgtgtgcgggctccacacggagggtggggtggtggtggggcccaatcccaggctgccatcctcagggagctcacaggacagtcaggatagaggcaagaaaacaggtgacaataactaggtgccaggggctgtgaggaggccatgcaggggcttgggagggtggtacccagcaagatacccagcaggtgcatgcgagtctatcagggaaggttttgtggagaaggtggggttgaaacagaggcttagagaaggccccacacagcagctcatgcctgtaatcccagcactttgggaggccaaggcaggtggatcacctgaggtcaggagttcgagaccagcatgaccaatatggtgaaaccccatctctactaaaaatacaaaaatcaggccgggcgtggtggctcacgcctgtaatcccagcactttgggaggccgaggcagatggatcatgaggtcaggagatcgagagcatcctgatgaacaccgtgaaaccccatctctactaaaaatacaacaacaacaacaaaaattagctgttagctgggcatggtagtgggcgcctgtagtcccagctactcaggaggccgaggcaggggaattgcttgaacctgggaggaggaggttgcagtgagccgagatcacaccactgcactccagcccgggtgacagagtgtgactccgtctcaaaaaaacccaaaaaaacaaaaaaaaccctaaaaattagccaggcgtggtggcccacatctgtaatcccagctactcgggaggctaaggcaggagaattgcttgaacccgggaggcagaggttgcagtgagcccagatcacacctctgcactcctggctgggtggcagagtgagactctgtctcaaaacaaaaacaaaaaaccaaatagtcttagaggagtagtgggatggagaagtgttatgagcagaaggctctgccgcagagagacagaagttgagaagggcagggtggtgacggtggagcttcaggaaccaggagcagggacttgtgggatccaagggaaggcatgggattggggcggggtggactaggctaaatgctgctggcagggcaggtccataagcgcaggtccttgaggcatccccaaggcactgcggctgtcccgcatgacctcccagggactctccttgcagctgcgccagggccccgcggggctggggcccaaaaagcgtgcggagcctcagctggtggagacccagaatgtgcggcttattgaggtggagcgcagtgtgagtgtgggcccacagtgggccctggggaggtgccccgtgcagtgtgagtgtgggtccacggtggaccctgggctggggggtatcccgtgcagtgtgagtgtggactcacagtgggcccgggggtgggggtgccccatgcagtgtgagtgtgggcctgtggtaggcactagggggtgcccccgccacctggctattgctaacccccacttctgggcagaatgcgatgctggtggcagagaaggcagctttgcaggggcagctgcagcacctggaggggcagctggggagcctgcagggccgtgcccaggagctgctgctgcagagccagcgggcgcaggagcacagcagccgcctgcaggtgggtggtggcccgggtgcccatccctgcccatgtactgccccctcctgctccttttggatcatcctgtggcctttttctatcccagctcccagccagctgccccacctcttccccagtctcatttatccttgtcctctgaccccagccaccattttgcaccatcctccctgccactatctcctcctacctgccgccagcccccacatctacacccatgtcgccctgcgctctcactgtcccagccctcccctccacagggcgccattagtcccattctgccctgtgccccttccggacagcctggcccagccagcctctgccgcctctcccctgctcaccatcagcctctggctggggcttgtactgcctgctgtgcccccagccctttgcctcctccacaactctctcattgtcttgggccctaccgtctgcccttagccccccgcctctcactcgatttccagccaggggttcctccccagcagcccctgcttccctcctccatcctaggccgagaagtctgtgctggagattcagggccaggagctgcaccggaagctggaggtgctggaggaggaggtgcgggcggcacggcagtcccaggaggagacccgcgggcagcagcaggccctgcttcgggaccacaaggccctggcacagctgcagcggcggcaggaggccgagctagagggactgctggtgcggcaccgagacctcaaggccaacatgcgggcactggagctggcccaccgggagctgcagggccggtgagcatcaccaaatgcccagctcctcccctggcaccccctatctgccagagaagactcccctcagcaggtctgactccccatcaggaagcacctccacctccgctctgtgatgccccggccactgctgtgccctctggggtagctgtgctccccacacttctgggttgggctccccgtggggctcacctattgggagtggtgggcacctggcatggcattctgcccaatggcttcctctgggggacctaggcttaggaggtgacagacccccccgccccgggtccagatagtccagccagctgcttgtggtggccataggttcacacagccctcttagccccttgtccatcccaggcacgagcagctgcaggcccagcgggccagcgtggaggcacaggaggtggccctgctggcagagcgtgaacgcctgatgcaagatgggcatcggcagcggggcctggaggaggagctgcggaggcttcagagcgagcacgacaggtgccgcccctgccacagcctctagcagctctcagtggccccatcctgaaagtgggttgggggtgtggggtcctgtctggcctcccctccccggcataacttctctggccagcactcggactggggacccaggtcccttggagagcagctctccttgcctcccaagggctcagatgctgctggcagagttgtctcgggagcggggtgagctgcagggtgaacgcggggagctacggggccggctggcgcggctggagctggagcgggcacagctggagatgcagagccagcagctgcgcgagtccaaccagcagctggacctgagcgcctgccggctgaccacgcagtgtgaggtgtggctggagggccggtgggggtatgggcgtgtggtggggcagaaagcctagacccaggtggtcctgagctgggtcccaccctccgagccatggtgcccccctgccagctattgacacagctgcgaagtgcccaggaagaggagaaccggcagctgctggctgaagttcaggccctgagccgggagaacagggagctcctggagcgcagcctggagagtcgggaccacctgcaccgcgaacagcgggagtacctgtgagtgggccgcctgggagcggggtggggcctgcatcccctttgggcgttcctggggagagcccttagtgagggcctagggacagggttggagctgaccttccaggtcagtccaatctgcggcacgggaccagtgcgtcctcgctgcagcttgtgccttgctactgcctcggcctccctgggcctcacacccacctctcccttctcactcctgccagggaccagcttaatgccctgcgccgcgagaagcagaagctcgtggagaagatcatggaccaataccgcgtgctggagcctgtgcccctgccccggaccaagtgagcagccctgtcacctccctcaggctggacatcctgctaacctctgcccctgccctggcctctgaccccaggcccagctcaggtccaggccccatgaaggtcaacctggcctttgacatccccaggacaccctttgctccctccctcctccctgtcctgaccccctcttgtgccctcttgcccccaggaagggcagctggctggcagacaaggtgaagaggctgatgcggccccggcgggaggggggcccccctggggggctgcgcctgggggccgatggggctggcagcaccgagagcctggggggccccccggagacggagcttcctgagggcagggaggcagatgggacaggtgggtctgggggtcaggtggccaggatggtccctgccccacatcctctgtcccccaccttggcacctgcctcactgcctggcctgcatgcgtgaccccattggccttccctgaggcctgccccccctgccctgatgccaccaggggctcttttccctgggtcctacagggtcacccttggcccacacctccctcctgcctgtgctgtccccgacccagcctgccccatccgcagcggagcccaggatctgggaggtgcagtggactctagggagaggtcattgttcctagactgcagatgaggagactgaggccccgggaggggaagcttttgcccaaggtcatgcagtgagttagtatgaaggccagcacagggccagtgtcctgctgccccactcatttgcctggcttctcccccacctctgcacctcccctccctggccctgggcagcttcacccactggcccctctactccatccagggccctgttcctctgaccccctccctgcatgagcctccgccccccccctctgacccctcccctgcatgaacctcagccccctcttctgaccccctccctgcatgagactcagtccccgttcccttcctctgaccccctccctgcataagcctcagcctccccccctcctctgaccctctccctgcatgagcctcagcctcctcccctcctctgaccccctccctgcatgagcctcagcccccacttcccttctctgacctcctccctgcaggagcctcagcccccccgctcccctcgtctgaccccctccctgcatgagcctcagctccctctcccctcctctggccctctccgtgcatgagcctcagcccccacttcccttctctgacctccttcctgcaggagcctcagcaccccctccccttgtctgaccccctccctgcgtgagcctcagcctccccccattctctgacctcctccctacaggagcctcagctcccgtcccctcctctcaccccctccctgcatgtacctcttgcagggtccccttccccggcacccatgcgccgggcccagagctccctctgcctgcgggatgagaccttggcaggcgggcagcggcggaaactcagctcaaggttcccggtggggcgaagctctgagtcattcagccctggggacacccctaggcaacgattccgacagcgccatccaggccccctgggggcgcccgtctcccacagcaaaggtgagggacaagggtcactgtaccagccagccccccaactctttgtggacccaccagctccttgggggaggaggcttccttcttgtcccctgtgtctcctgcaagctctgtccacttccgcactggccctgggcccagtggttgccttgtgcctcccaggacctggtgtgggatgggagaactccgctgagaccctgcaggaacacgaaacagatgccaaccgagagggtgagtgggggactgtggaaggagtagtattctttgtcctgcctggggcccctggcagaacctcattcatccattctttcattcgacaatgatcctttaccaagtgccaggtgacgtgctggcaggggacacagcagggaacgttctggtgtgaggaggcagatagtaaacaatttgcctaaaaataattattatctacaacagccctgtccactagaaatatggtgtgaaccacatgataattttaacttttccagtaggcttaccagaaaaagtgaaaagagacaggtacaatggattttaataacatttaactcaatatgcctacgctattaccatttcagcatgtagccagtgtaaaaatcatgaatgagctattagacgtgatgttttttttttttttttgagatggaatttcactctttggctcactgcaacctcctcctcccaggttcaaacgattctcctggctcagcctcccaagtagctgggattacaggcatgggccaccacgccaggctaattttgtataattattattattttttttagtagagacggggtttcaccatgttggtcaggctggtctcgaactcctgacctcaggtgatccgcccgcttcagcctcccaaagtgctgggattataggtgtgagccacccagccagacgtgatttttttcatagtaagtctttggcagtttcggaggccaaggcaggcagatcacttgaggccagaagttagagaccagcctagccaaaatggtgaaatcccgtctctactaaaactacaaaaattagccaggcatggtgtcccatgcctgtaatcccacctactcagggggctgaggcaggagaatcgcttgaacctgggaggcagagggtgcagtgagccaagatcacgccattgcactccagcgttggtgacagagtgagactgtctcaaaaacaaaaaacaaaaaacaaaaaaacatagtaggtctttgaagcacgtcacaggccaaccccatctcacctacttagctccgccctgggcagctcagccctagacccggctggaccatcaggaggcgctaatgctctgggaagaaaggagagcaggggaggggtcaggagctcaggagctctgggcaggctggttggagttttagtaactggggtgctggggtgggcctcagagaggatgtgaaattggagcaaagacttggaggggagagtttgtcgtgtggacatacctgagaacagcattctgggcagagggaaccgctgagggaacagcaggcgtggtgcagctggaagcggggggtattggcaggtcgggggtgggcagaaggtgctcgagcctgtgggcctcctgggactctgggagtcctcctgagggaagcagatctcagctgagcctttccctctaggccctgaggtacaggaaccggagaaacgtcccctcaccccatccctcagccagtgacaccgtgggaacagcaggcttgggagtgcagccttctcggcactggagtgtcagcggaggccccaggcagcccaagagctcagggagccagggaccccaaggggagtccttggacaaggaggcctgggccctgagatcctccacggtcagcgccggggcccggagatggagctgggacgagtgtgtggacaggggggatggctggcccccacgagcagctccaggctggagttctggttcttccaggtggctcccgctgaggcagcggtctctgggggatcccccagctgaaggaggctggcaggagttggcaagagaaccccctgccctgtccaggtgggaagctgagtcccagtgctgggggactgtggcctgggctgatcttgagccttaactggacatgaggggcatgagaataaagctgaactgcagcctcctga

SEQ ID NO: 1151 - DNA, 33942 bp, Homo sapiens
  modified_base (14445)..(14445): a, c, t, g, unknown or other
  modified_base (14681)..(14681): a, c, t, g, unknown or other
cataagctggagtggtgaccatatctgtcttcttcaacatcacatccccagctacctagcagagtgccttgggctggtacacgcttaactacgtacatgaatgaatggagcagggctcaaaacatcaatgcctaccagagcctgccaggtaatgtaaatgagaaaagcagactggctgtgaacaatagggagggtgtttgctttctagtctgaaggaagaaggcctgaggaggatacattttccccactttgaggagcaactctgaggttgcacctaatactttcacttctatctattaaccaaaattgagtcacttggacacatccagctgtgagggaggctgggaagtatattttaaatctgggtagctaagagctcagctaaaaattgagggttctattaccaagaaggagaaaatagactttggggacagctaaagcgatagctgagatctgaagaatgaataaaaattacctagatcagtggttctcagagtgaagtgtggcctgcagacccttgggagtccctgagaccctttcaggggatcttcaaggtcaagctattttcataaaaaaatacaggatgttattttcctttgtcactatgttgacattgcaataatgttgcaaaaacaatctggataaaactgctgccttagcataaatgaaggcagtggtgccaaaccatatgatagtcattgcattcttcactgccaggtacttacagtaaaaaaagaaaaaaaattaatgccacttttacttaagaatgcccttaatgaggccgggcgcagtggctcgtgcctgtaatcccagcactttgggaggccgaagcgggcagatcaggatcacctgaggtcaggagttcaagaccagcctggccaacgagtgaaaccctgtctctacaaaaatacaaaaattagccaggcatgttggcgggtgcctgtaatcccagctactcgggaggctgaggcaggagaatggcttgaatccaggaggcggaggttgtagtaagccgaaatcatgctgctgcacttcagcctggatgacaaagcaagactctgtctcaaaaaaaaaaaaaaaaaaaagagagatcaagaccatcctgggcaacatggtgaaaccccatctctactaaagatacaaaaattagctgggcattgtggcgcatgcctgtagccccagctacttgggaggctgaggcaggagaattgcttgaacccgggaggcagaggttgcagtgagccaagatcacgccactgcactctagcctgggcaacagagtgagactccctctcaaaaaaaaaaaaaaaaaaaaatatatatatatatatatatagaatgcctttaatgaagcagtaaatactaattttattaaatctcaacccttgagtacggtgtgtcatgaaatgagaagtagcacacagtactatatgctacagatgaagtacaatgctgtcaaataggggtacttgtgttaattgttggagtcgcaagctgaactagagttttcttttcttttcttttcttttcttcttttcaagacaggttctcactctgtcactcaggctagagtgcagtggtgcaatcacggttcactgcagcctcaacttcctgggctcaagcgatccccccacctcggcctcctaaaatgctgggattataggcatgagccaccactcccagccccacttttttcagactggaaaacgcacactcacatgtgcatctttaaatgatcacttgggctgtggtatggagaatggcgaccagtgaggaggcaggagctgttgtccgagcaagggatgatattggcatcttggattggcatggtggcagtagtggtagtgcagagtgacttgggtagattttggagccatttagaaggtaacatccacaggaactggtaaataaatacgtgggagaagttgggtgaagggggtgtcaaagattacacccaatttattttgcttgggcaagttggtggatggtgagcccctcactgagtgagaagcctggagaagcaggtttggagggtggtagtatgcaggtggtatgcatagttggggatgtgtgttgagtttgctatgtccggtgagcttcccagtggagatgtccaatgggcagacggatactcacatagagagttcatggtagattcgggctagaggaaagcacctgaggcctggccagagacgcctagaggaacagagcctggttaacagtcactcctggtgtctcagatattctctgctcagcccacgccctctcttccacactgggccacctataaagcctccacagatacccctggggcacccactggacacatgccctcagggccccagagcaaggagctgtttgtgggcttaccactgctgttcccatatgcccccaactgcctcccacttctttccccacagcctggtcagacatggcgctaccactaatggaatctttcttgccatctttttcttgccgcttaacagtggcagtgacagtttgactcctgatttaagcctgattctgcttaactttttcccttgactttggcattttcactttgacatgttccctgagagcctggggggtggggaacccagctccagctggtgacgtttggggccggcccaggcctagggtgtggaggagccttgccatcgggcttcctgtctctcttcatttaagcacgactctgcagaaggaacaaagcaccctccccactgggctcctggttgcagagctccaagtcctcacacagatacgcctgtttgagaagcagcgggcaagaaagacgcaagcccagaggtaaggtggtcagactcggcttccttccccggagctgagagggaggggaacgtggggcagatgcacaggaatgtgctctgcccagttgtctgcccacagctctggccaccttctcttgcatttctcttggaactggtcatgagcagcgatttcccactggaactgtgagcttccagaggtcagagactgtgctagactcctctctgcagccccagcgtgcacagctcagtgtccagagcaatgggtgctccttagaggagtagtgacctaaatagcaagatcagagagggagtgaagactggagactatcccaggctgggaaaggcgtggaaggcaactagtcgtgggcagttgaggggagaagactggaagaggggaaaagaggagaaaaagagtgaagaaggggagggaaaaaattagaaagaataaataaatataaggtgggaggaaacctataaaaaagaaatgatgaggaaaaacataaaaacaagaaaaagagcaaaagaagtggaatctagtctagagaaaattcttgcaaaaccaattttccttaacgggacaatctccaaaaattgacaccaaatatcatacttgcagcatttcataagtcgcatgatctatgtaatagtctcttttaactaccttttgtgtttctgtgtgtatttttaaatttttgtctgcttctttgctcttttaagatttttgaacaatgtctaaaggcacttctactctagttagctttaaaatgattcatgaaataggaaagctaaaattctcagaaagtgttgaaactgagcttttgcgtatgaattgccctaaaagttgcagatacatatctttagataaatatgtcatttaagaaacggattcgaaaagaattggtggtaggggtctcatgaggccgggagagttacagaaggatgtgcagcccctcctgggcctggcagggtgtgagggagagtgaggactcactgtccctcctgaagggaagccctgtgccatctcagcctttccgccctcagacctttccagcccctgagacctcatggccttgaagccgtgctatccccagtgtcctctgctttcccctcataggcttcttctgggagagaggtttcctggggtacgttctgatccctcaaaacggaaaggccctgttctcaataattcaaagatttcactctgagtgggatagtgcttcctgaatgccctgctcttgtggtggacatttttatcggggcaaggctaagagcagggcctgatgggggaagtcactgctacttcacattttgaccaataattccttgtgctgtatcagatgctgtaggctgatacaaaatggccgccgccctcaaagtcagatgaaagagcccctgaggacagcgttagagacactcgggagatgatttccctctttcaatgtgggagcacttacataggagaggtctatatctagataaaaactcctcccaccactggtgctagacagagcttgggggcagccctaggctctgaccctggccgtaatggcggggtggtgctgagggcaattggctagaccaattgtcttgcacgttttattttttattattatttttgagacggagtctcgctctcttgcccaggctggagtgcaatgacgtgatctccactcactgcagcctccacctcctgggttcaagcgattctcctgcctcagcctcttgagtagctgggattacaggagcccaacaccacgcccggctactttttgtatttttagtagagaccaggtttcactatgttggacaggctggcctcaaactcctggcctcaaatgatccgcccgccttggcctcccaaagtgctggcattacagacgtgagccaccatactgggccagtcttgcacattttagacactcaataaatgtttgttgaatgaaatacctgtgatgggccgggcgtggtggcccacaccagtaatcccagccctttgagaggccgaggcaggaggatggcttgaacctgggagtttgagaccagcctgggcaacatggtgaaacccccatctctacaaaccccacaaaagttagctgggcatggtagtgtgtgcctgtggttccagctacttgggaagctgaggtgggaggattgcttgagcctgggagacggaggctgcagtgaggcctgactgtgccactgcactccagcctgggcgagagtgaggccctgtctcaaaataactttgatgaaggtggggaatcagaagtaggtgggcaggggtctgggtttgcaaggctctgagtttgagctctgttctgtacctttgaggggatgagggaaggagggtgggcacggttcccccgatgtgggtgtctgaggcgaagaagaggatggcggaggttgcagccaccaaccacaagagttccttagaggggtcacagtctctaggaagtttataggaagctagtcagcagtagagagggtgaacgcggtggggcacatcccgcggctgggcttgagtgggctgcttgggggttatggggagaagataaaagtgcctgtgggaccacagactctcgctgtggtggagctgggccctcttaccctcccaagcctcgcccctcatcccatccctgggggccaggggtgagggcggcaggaacctcaaggctctgagaaagtgcgtggtgtgtgttgccattttggtctcttctctttctcagtctctctttgcctcactttggatctatgctctgtgcatctgtcttgcttctcagaatttcttcttttcctctttttttgtactaccctgcgctttgtgtgtgattgtggattgtgtgtgcatagctgttgctttaacaagctgctccaggtctctctctcccacatctttccctcccctcctcccttgaggctctgtgcattctggggaactctgtccatttccctttgtccatgtgtccctcccaccctgcagccggctccctcacatccaccctgggctgcaggcgtgctcggcaggctccccacagatcaaagcttgtccagggtctgcattgctgccaaaggccaggaggactgtgtacagaccggaaggagctagagcttagtggcagcctgagaggggaagctgaaaaaggagaagaggcaaggggcattccaggggagcccgggagagccagcacggccgcctggtatatgaggcaaagaggaagacagacacagacacagggagctgcaggctgggggcataagctgggggctgggaagcatagatacagaaatgcacagatgtgagctgagaagcaaggagggagagagagagacagaaagagagagagagacgtgccagggcttgagggaccagagagccctcccagcctctctcggagtgctggtatacaggatgctaccgtactagggtaagacacctctggggacgctgagtatgggaatcaaaggccagatctctggggtggcagcggaagcccaaagcaccaaagcaagcatgctggaaacccacagcctcctccacttagcagagccttggggtgagatgaggcagaacagggagctggaggcagggaggtggctgtctgcacatacctcaggaccatggagctgggggagtcaaaacagccaccatatggggaagggtcaagaatgcctctagtcttccccaggcatcttatcagggtaagctgaatttggaccccagagaagggatatcgtttatggagacttcccctctttcatcccctgctcaccaaggacccagtcagtctgggatgggggacagtgggaaccactctttggtatgaggctactcctattctactcttctcactgcagccttcccctagatgcctcccatctgcatgctaacctgtaaacacttcaccatcactggtggctagtctcccttcctcctttttcagaaacctccttcctgacctcttttcttcctacttccccggtttaaacaaaattgtatctatctatcatctatctatctatctatctatctatctatctatctatctatctatctatctatcttttttttttttgagacaaaatctcactctgtcgcccaggctgtagtgcagtggcactacaagtaatcccaagtagctgagattacaggcgcccgccaccatccccagctaatttttttgtatttttagtagacacgggggtttcatgatgttggccaggctggtctcaaactcctggcctcaagtgatctgcctgcctcggcctcccaaggtgctggattataggtatgagccaccacacacgacacccggcttctatctatctatatctatctatctatctatctatctatctatctatcacctatctatctaatctatctatatctgtctatctatctttatgtatctatcttatctattgatctatctatctttttttttttttgagacagagtcactctgtcacccaggctggagtgcagtggcacgatctcggctcactgcaacctccgcctcccgggttcaagcgattctcctacctcagcctcctcagtagctgggactacccaccaccactcctggctaatttttgtattttcagtagagatagggtttcactatgttggccaggctggtctccaactcctgacctaaagtgatccacccaccttggtttcccaaagtgctgggattacaggcgtgagccaccgtgcctggacatatatctatcttttttttttttgagatggagtctcgctctgttgcccaggctggagtgcagtggcgtgatttcggctcactgcaacctccgcctcccgggttcaagtgattctcctgcctcagcctcccaagtagctgagattacagacgtgcgtcaccatgcccagctaatttttgtatttttagtagagatgggatttcactatgttggccaggctggtctcgtactcccgacctcaggtgatccacttgccttggcctcccaaagtgctggaattacaggtgtgagccactgcatccggccttatatatctatcttgtctgtctgactgtctaatctaattcatctattttatctgtttatcttatctatcatctatttatctaatctatctgtctgtatgtctgttttttttttgttttttttttttttttgagatagagtcttgctctgtcgccgaggctggagtgcggtggcgcgatctcagctcactgctgaacctccgcctcctgggttctaagcgattctcctgcctcaatctttggagtagctgggattacaggcccgtaccactgtgcccggctaattttgtatttttagtagagaagggtttcaccatgttggtcaggcttgtattgaactcctgacctcaggtgatctacccgcctaagcctcccaaagtgctgggagtacaggtgtgagccactgtgtctgtccctaaatgtctgtctctatctatctatctatctatctatctatctatctatctaatctatctttctgtctaacctaatctattttatctatcttattcatcatctatctaatctgtctgtatgtttatctaatctatttacctaatctatcaatctatcatctaatctatctaatctgtctatctaatctattttatctatctatctatctgtccatccatctatctacctacctgtctatctcaagcacctaccacgtattaagccctggctacctcctcttccaggcagatggagtaactggaggcagctaacaaagatggagtcacttttcttatcttctcctaaaccaccgtaagaggaccaagcccccacaccttctgagtgccccattcctctccacagattgtgtcttagtgcccagcaggaaacacagtccacctcccatggttcaagagattgtagaaagggggttattcacataggttaagggaatcaatcaatttgaagcacagacactattaacagcaggaagagtcctgaagaagtgaaaatggtgtttctggaacccagagagtgcttgcactctggataaggggccaccccacagaagctgtggaggggcagggctgcaggtgaggatgaacacacagctattgacagaaaatatgcccagggcagggatagagtaggaaaaatatcccagcttctttcccccacccttccatctcatctctgaaaggcacttcccactggccagccccgactggtgctggagggcaagagagcctatgagccatgtgtggctgtcagccccttggtggagagccacagacaggatggagagtggctggcagggccccgtggggatgaacagcttggattggggcgactgggcttcatccaggctgggctggatgtgtgcatacatttcagtgacccgttttagaaacagaattaatatggtgaatagagaaagaagaaatcagtgactttcgctcctccatacaattcaatttggcttaagttagccaaagccataccaagtcctctctctatgtctcagctgctgccaggcttgtggtggccacacagctggctagactgtcatctctgtcctcaaggggctcaagctagaggaggagagttgagaaaccaaatcactatacacaaagtagaaggtggaacacacccaggagcatgtcaacggggtgctgtgggacttcagagtaggcagatcgtcaccaagcttcaacggcaaagatgccactgggggaaagaaggaccaagcttggaagacagagtaagtctggaggcaagatcttgtctcaccagcaggggccaggtccatggtgacaccttccccaggcagtcacctctctgagcccactttatatcctaggcctggattcaaagacacttgagccctgctccagccttcctttgaggtgctatcttggtgcctttcctataatcactgctccagtcccatgtcatctggtccccagttaccacatcaagcttcccgaagctccacacagaccatgccacatctttaccaaaaaatcagcagtgggtcccctcacctccaggacaaagctccagctcttcgacctgcctgtcaatatttgcaatcactgcctgcacaaattagctgggtgttgtcatgaaaggatcacttgagcccaggagttccaggctgcaatgacctatgattgaaccactgcactctggcctgggtgacagagtggatctaaactaaaaataaaaagatttacagtcaagcctcaaaggcttttcccataccttcttccaccatcacctccctgagccctctctttcctccgaagcctcctcgcacatccctaccacctttgcacacctcagaatggggacacctctcccctttcctctccatctaacttatggttttcaaacttgagcgtgatcagttacctggagatttgtgaaaacccagatgactagacccacccccagtttctgattcagcaggtctggggtggggccgaggatctgcatttctaacaagttcccaggtcatgttgccgctgctactgatccaggactttgggaatcgctcctctaatctacagctgtccattccccatggtccattcagagcctctctgccctgcccccaccacccccagtctcgcctgtctgccaagcgcacaggaaactctccttcatccaaaccctggaccaacgccttctgcttggcccactcagaggccttgtagggttggtctgatattggacagagaaatggccctctgctctttctcccctgacctctctgaagggggcctgcccctccacacctgtgggtatttctcgcaaggtggagacaagagactgagaaaagaaataagacacagagaaagtatagaggaataaaagtgggcccaggggaccggcgctcagcaagtgaggacctgcaccggtgctggtctctgagttccctcagtatttattgatcactatctttactatctccgcgaggggaatgtggtggggctatagggtgaaggtgaggagagggtcagcagaaaaacatatgagcaaagactctgtgtcataaataagtttaaggaaaggtgctgtgcctggatgtgctagatttatgtttaactttacacaaacatctcagtgtagtaaagagtaacagagcagtattgccgccatgatgtctcgcctccagacataaggcagttttctcctctctcaaaatagaatgtatgatcggttttacaccgggtcattccattcccagggacgagcaggagacagatgccttcctcttatctcaaccgaatagaggccttcctccttcactaatcctcctcagcacagaccctttacgggtgtcgggctggggggctgtaaggtctttcccttcccatgaggccatatctcaggctgtctcagtggggggaaacctggacaatacctaggctttctcgggcaggggttcctgcggccttccacagtgtattgtgtctctggttaatagagaacggagaatggtgatgactttcaccaagcacactgcctgcaagaacttttctttttttttttttttgagacagagtcttgctctgtcgcccaggctggagtgcagtggcgcgatctcggctcactgccacctctgcctcccgggttcacgccattctcctgcctcagcctcccgagtagctgggactacaggcgcccgccaccacgcccggctaatttttttgtatttttttagtagagatggggtttcaccgtgttcaccaggatggtctcgatctcctgacctcatgatccgcccgccttggcctcccaaaatgctgggattacacgtgtgaggcaagaactttttaaaagtgcatcttgcgcagccctagatccattaaaccttgattcaatacaggacatgtttttgtgagcacagggttgggacaaaagttacagattaacagcatctcaaagcagaacaatttttcttagtacagatcaaaatggagtttcttatgtcttcctttttctacatagacacagtaacaatctgatctctctttcttttccccatacctctcacgctgtatcaggccccaattcttgggaacgtcaccttagaactgtcccacacatttctacagccacttggctcaggccctttgctgaccaggatggttgcagttctgcctttggtgcctcgcctcctccagttctttcactcagcagctgcaggggtccacgtggcaaatctaataatcttcttctctatagaaaatcctctgctggctctctagtgcccaggatccagtcccagcatctcagcacggccttcaagcatttccacgtcctggcctggctccatggtctccccgccaatttgccaccttctccatgcatccttttctgatcccctcctcactcatcccagcaaagaaccccctcctggcctgagcatagcatttcgtggtgtgtatctcagagcatccagttaggggtgtgcaagtttactttgttactggctgatgttgtgaagtcccaagttgttggtgccgcaaacaaaaaattggacatgacacacacaaatagcaaagcagcaaaagtttattaagcacagtacgatccactatggatcaaggatgacctgcgaatggtatcagcatcactttgctatatttcatggccttttctatgtgttttttttctctttttcctcaagctgcctaagctttagccagcatgtgccttttggttgacaggtgggttgcttagtttcttggcctctgtgtgtttacgtgtcatttccttcccatagttttaagtacatgcatgatatgcactctgtaggcatgaaccttaagtagctaattactatacggggtcattttgaggatatcttttctctgtagtacatgtgcatctttttttgcagtggtgcaatcttggctcactgcaacctcctcctccctggttcaagtgattctcctgcctcagcttcctaagcacctgagactacaggtgcatgccaccacgcccggctaatttttgtatttttagtagagatggggtttcaccatgttggccaggctgatctcgaactcctgaccgcaagtgatccacccacctcggcctcccaaagcactgggattacaggcatgagccaccgcacccagcctagtatatgcccatctcttaggagctgctcctaactggtttggtttggatctagccagccatggggctccttattcacttatttatcttctgtttttgctcacctgcctctttctcttgcttctgctcctactcattccttccttaatccaacctccaattccctctgctattctcctgcctcaagttcactaggctggctgcaagggtcctgagggagaggttgtgtatcgcccctgtatactccaggtccagtaaatgtttgctgactaatgattggcatttccctcaggccctgccatttctgtgggctcaggtccctactggctcaggcccctgcctccctcggcaaggccacaatgaaccggggagtcccttttaggcacttgcttctggtgctgcaactgggtaagttctcagacctggggtctcaatgcagatgacgtgggaggaaaggcaaaggtggaggatggggtagagggggacagcggcgacattgagacctgactcctttcttttccacttagcgctcctcccagcagccactcagggaaagaaagtggtgctgggcaaaaaaggggatacagtggaactgacctgtacagcttcccagaagaagagcatacaattccactggaaaaactccaaccagataaagattctgggaaatcagggctccttcttaactaaaggtagggttgcctggctccccatccagggaggaaaacacactatggagtgaaagcctttggtgtctgagatctggtcttagttaaactctgggatcccagagggcttgggttgacagaaactcagtggcattcttatccagagtttctctacaccaactgctggtggcccagggaaaggtggtatgtgaatttcaatattttaatatttaatattcatgaacttattttagtgagttttagaacaatcactatcacttaaaacccgtgatttcttgagtattgttgctacagacctatgtagataatactttgcacagtgactcatatgtataatcctagcactgtgggaggctgaggccggaggattgcttgagtccaggagttcaagaccagcctgaacaacatagtgagactctgtctctatgaaaaaaaatatatatatattttttttggagacaaggtctagttctatcacccaggctccagtgcagtggtgtgatctcggctcactgcaatctccacctcccaggctcaagtcatcatcccacctcagcctcccaagtagctgggactacaggcatgcaccaccatgccaggctaatttttgtattttttatagagacagggtttcaccatgttggccaggctggtctcgaactcatgagctcaagtgatccactcaccttggcctctcagagtgctggaattacaggtgtgtgtcactatgcctagccaaaaaaaatttttttaattaaaaaaaaaaaggccggctgtagtggctcacacctgtaatccagaactttgggagtttgaggtgggcagatcaccggnggtcaggagttcaagaccagtctggccaacatggtgaaacccggtctctactaaaaatacaaaaattagccaggtgtgggggtgcagtcctgtacttccagctactcaggaggctgaggcaggagactcgcttgaacctgggaggcaaaggctgcagtgagctgagattgcaccactgcactccagcctgggtgacagagcaagacttcatctcaaaaaaaaaaaaaaagctgcanatttattattattattattagtttatttatttatttttttgagacagagtctcgttctgtcgcccaggctggagtgcggtggcgtgatcttggctcattgcaacctccacctcccgggttcaagtgattctcctgcctcagcctcccgagtagctgggactacaggcgtatgccaccatgcctggctaattttttgtacttttagtagagacagagtttcacggtgttagccaggctggtcttgatctcctgacctcgtgatttaccctccttggcctcccaaagtgctgggattacaggcgtgagtcactgtgcccggcccagaatcatttttttctacttttttttttttgaggcaaactctcgatctgttgcccaggctggagtgcagtgggcatgatcttggctcactgcaagctctgcctcccaggttcaagcaattctcctgcctcagcctcctgagtagctgggactacaggcgtgtgccaccatgcccggctaatttgcgtatttttagtagagaccggttttcatcatattggccaggctggtcttgaactcctgacctcaagtgattctcccaccttagcctcccaaagtgctgggattacaggcatgagctactgcacttggccttttctcctggttttaaaactattatatgctcattacaaaatatttggtcaatgaagaaaagaatatggaagaaaatcaaatgcatgcatacttctatcactcagagatatcctctgctaacattttgattgattttcttccaatctttttttttttttttctttttgagacagggtctcactctgctgcccaggctggagtacagtggcatgaccacaacacatcacagcctcaagtgatcttcccacttcagccttcccagtagctgggactacaggtgcacgccaccatgttcacctaattttttactttttgtagagatgagacttcaccatgttgctcaggctggtcttgaattcctaggctcaagtgatcttcccgctttggcctcccaaagtgctgggattataggtatgagccactgcatgtggcctattttcttccactgttgttcggcgtggagaatattatatacataattacgtaaatgatatcatactgtatataccttttttcctactccttccttaagttatatcataatgagactaccaattattagactttttttcttttttttgagacggagtctcggtctgtcacctaggctggagtgcaatggcgcgatctcagctcgctgcaacctctgcctcccaggttcaagcaattctgcctcagcctcccgagtagctgggactacagacacgtgccaccatgcccagctaacttttttatttttttattagagacagggttccaccatgctagcaggatggtctcaatctctcgacttcgtgatcagcccggcttggcctcccaaagtgctgggagtacaggtgtgagccaccgcactcggcctagactaactatttaaagtaatctggcaatgtttaacgaatacaaaactctaaaacccttggacctaataatagctattttggaaagtctacttgacagaaataaaattgtgaatattcttttttgttgtttttttgagacagagtctcatttggacgcctaggctggagtgcagtggcatgatctcggctaactgcaacctccacctcctgggttcaagtgattctcctgcctcagcctcctgagcagctgggattacaggtgtgcaccaccatgtctggctaatttttgcatttttagtagatggggtttcaccatgttgaccagggtggtctggaacttctaccctcaagtgatctacccaccttggcctcccaaagtgctgggattacaggtgtgagccaccacgcctgaccagtgaacacttaataatatctatggaaaggtgttattataagaattgcttgtggggccgggcgtggtggctcacgcctgtaatcccagcactttgggaggctgtggcaggcggatcacgaggtcaggagatcaagatcatcctggctaacacggtgaaaccccgtctctactaaaaataccaaaaaattagccaggcgtggtggcgggcacttgtaatcccagctatccaggaggctgaggcaggagaattgcgtgaacccaggaggcggaggtcgcagtgagctgagaccgtgccattgcactccagcctgagtgacagagtgagactccatcacaaaaaataaataaataaataaataaaatataaataagtaaataaaggtcaggagtggtggctcacgcctgtaatcccagcactttgggaggccgaggtggacagatcatgaggtcatgagatcaagaccatcctggctaacacagtgaaaccctgcctctactaaaaatacaaaaagtcatccaggtgtggtggcacacacctatagtcccagctacttgggaggctgaggcaggagaatcacttgaacccaggaggcagaggttgcagtgagctgagatcgcgccactacactccagcctaggcgacagagcaagactctgtctcaaaataaataaataaataaataaataaataaataaataaataaaataaaaagcacacacacacacacacacacacacacacaatgcaaaagacccaccctactacaactaacattatatttaatggtgaaaaactgaattctttctccctaagtgcaggaataagacaaagatgtctgctcttactactcttattcaacataatactgcaatcccttgccagtgcaataaggcaagaaaaatgaaataaaaggaaaactgatcagaaagaaagaaataaaactgttcctatttgtggatgacatgattacatagaaaatctcaaagaatctgtaagaaacttcttagaattaataaatgaattcatcaaggttgcagaatataagataaacataaaaaatctattgtatttctatatattagcaaggaacatgtgtacacagaaattaaaactacaataccatttataattgctcaaaaaggccaggcatggtggctcacacctgtaattcctgcactttgggaggccaaggtgggaagattgcttaagcccaggagttcaagaccagcccgggcaacatagtgagaccttgtctctacaaaaagtaaaaaattagctgagcatggccgggtgcagtggctcactcctgtaaccccaacactttgggaggctgaggcgggcggatcatgaggtcaggagatcgagaccatcctggctaacacggtgaaaccctgtctctactaaaaacacaaaaaattagctggatgtggtggcaggcgcctgtagacccagctactcgggaagctgaggcaggagaatggcgtgaacctgggaggcggagcttgcagtgagctgagattgtgccactgcactccagcctgggtgacacagtgagactacgtctcaaaaaaaaaaaaaaaaaaattagctgagcattatggtgtatgcctgtagtcccagctactggggaggctgaggtgggaggattgcttgagccctaggagggcaaggctgcagtgagccatgatcacaccactgctttccagcctcggtaggagagcaagaccctatctcaaaaaaaaaaaaaaaaaaaaaagaaaagaaaagaaaagaaaagaaaaagaaagagagaaagaaatacttaggtgtaaatctaaaaaacatgcgtagggccaggtgcagtggctcatgcctgtaatcccagcactttgggaagttgaggctggcggatcacttgaagtcgggagtttgagaccagcctggccaacatggtgaaaccccgtctctactaaaaatgcaaaaattaggcaggtgttgtggcgcatgcctgatcccagctactttggaggctgaggcaggagaattgcttcaacccgggaggcagaggttgcagtgagccaagactgttccactgcactccagcctgggcaacagagtaagagtctgtctcccgaaaaaaaaaaaaagaaaaaagaaagcattgaattgtatgctaaaaactacacgatgctgattaaagaagtcaaagaagatctaaatatatggagagacatgctgtactcatggattgatggattggaagactcaacataagaaagatatcaattttccccaaattaatatacaagtttaatccaattcctataaaaataccagcaagattttttgtagatataaacaagttggccaggtgtagtggcttacacctgtaatcctagcactttgggaggctgaggtgggaagatcgcttgagcccaggtgttcacgactgcagtgagctatgattgtgtcactgcattccagctggcactccagcctaagtgacaaagggagaccctgtctcaaaaacaaaaacaaaaccaaaataattttgctctgcaaaatccctattaagaagaagaaaagaggctgggcacagtggctcaccgctgtaatcccagcacgttgggaggctgaggcaggctgatcacttcagcccagaagtttgagatcagcctgggcaacatgaggaaaccccgtctctaccaaaaaaaaaaaaaggtacatacacacacacacacacacacacacacatacacaagtatatacacatatatatacacatacaggtgaatagatgtatatacatctatttattgtgaatatacatctatacacacacgtgtgtgtacacatatatttaaaatttatttttatttatttatttatttttgagacagagtcttgctctgtcacccaggctgggtgcacctgtattcccaacgacacaggaggctgaggtgggagaatcactgagccagggaggcagaggttgcagtgagccaagatgttgcctggttgcctgggcaacagagcgagaccctatatcaaaaaagaagaataataagaaaagacagtttacagaatataagaaaatatattcacaatccacatacttagcaaaggactggtatctagaatatgataaacaactctcaaaactcaaaaccaaaaaaatgaacaattcaattagaaaacaggccgaaaaggacatacagttggcaaataagcacatgaaaagttgttcaacatcattaatcattagggatatgtacattaaaaccacaataggctatcactaaacctatcagaatggctaaatacaaaattggaacaccaccaaatgctgatgaggatgtggagaaactgggtcattcttccaatattggtgggaggctaaaatggcaaagccactctggaaaacagtttgatagtttcttataaaacaaaacatgcggccgggcgcggtagctcacgcctgtaatcccagcactttgggaggccgaggcgggtggatcacgaggtcaggagatcgagaccatcctggctaacacggtgaaaccctgtctctactaaaaatacaaaaaattagccgggcgtggtggcgggcgcctgtagtcccagctactcgggaggctgaggcaggagaatggtgtgaacccgggaggcggagcttgcagtgagccgagatcgcgccattgcactccaacctgggagacggagggagactccgtctcaaaaaaacaaaaacaaacaaacaaaaaacatgcaacaatccagcaatattgcacccctaggcatttatcctagagcaatgaagacttatgcccacacaaaaagctgcacacaaatgttcatagcagctttattcatggtagccaacaattagaaacaatctagatgtccttcaactggtgaatgattacatccataccacgaaatacttttcagcaataaaaaggatgaatcatagtacacaccacaacctggatgaatctccagggaattatgctgagtgaaaaaaagccaatctcaaaaggtaatatactgtattaatccatttatataacattcttaaaataactaattatagaaatggagaacagatgagtgattgccaggggttaaggggctcagggatggggaggggaaggggtatggctacaaaaagcaacaaccttatggcgccggaaatgttctgtattctgattgtgtcaatgtgagcatactggttgagatatagtgctacagttttgcaagttattaccatcagagtaaactggatagagggcacataggatttctctgtattacttcttacaactgcaagtgaatctacaattatctcaaaataataagtttagtttaatgctaggcgtggtggctcacatctgtaatctcagctctttgggaggctgagacgggtggatggcttgagtccaggagttcgagaccagcctggccaacatggcaaaaccggtctctactaaaaatacaaaaattagctgggcgtggtggcaagtgcctgtagtcccagctactcgggaggctgaggcaggagaattgcttgaacccgggaggtggaggttgcagtgagccgagatcacgccactacactgtagcttgggcgacagagtgaggctctttctcaaaaaaaaaaaaaaaaaaaaaaaagcaggcaggcagggccaggaaagcgtataatttttgtagttcaaatgactaacctaaaaagtgaagattggccaggcgcagtggctcacgcctgtaatcccagcactttgggaggccaaggcgggtggatcacgaggtcaggagattgagccactctggctaacacagtgaaaccccgtctctactaaaatacaaaaaattagctgggcgtggtggcacccgcctgtagttgcagctacttgggaggctgaggcaggagaatcacttgaacccaggaggcgaagttgcagcgagccgagatcacactactgcactccagcctgggtgacaaagtgagattctgtctcaaaaaaaaaaaaaaaaaaaaaaaaaaaaaaaagtgaagtttacctttttttttaaatttttcttcttttccttccctactttgtgagataattttcttctttttaaaaagccaagagcttacttctgtaagtaaagattatcttaagacaacttagaaatgtatattattagtattttctatttcattgtaagttatttgtaaatattggttttggtgctaacctagaattccatcaaattaattgtcccctaatatatggccattatcattttgtctaacattgtatcctattaacaatgctgtaagtattatttttgtagctaaattatggtttgcattttaaaattattgttttaaggataaagttccagaaatgaaattaaggatatgaactttttgagcacatcttgtcagcactgagtagtattatttaaaacttttggggggggcaattttataattgaaaaatatatcattgttttaatttgcatttctttcactgcctatgagattaaaacaatgcactactttccaaaaattcttaagtcttttgtgttgatgcttttgttctgtttctatggatctcatcttccttcagaacagctccccttcccaacttcctgatttctaacaataacagtatcaccctccttgttctcccaatttctgaaacacagagtcatgtttttttctctgcttcaatccctggtttcctatcgtcatcaattatgacctttccttgctttgaaagtgttttgggccgggcatgatgtctgccacctattgtaatcctagcactttgggaggctgaggcggctggatgacttgacctgaggatttcgagaccagcctgggcaacagggcgaaacctcgtctctacaaaaaatacaaaagttagtcgggagtggtggcacatgcttgtagtcccagttacttggggggctgaggtggcaggatctcttgagcccacgaggtagatgttgcagtgagccgtgattgcgccactgcaccccagcctaggtgacagagtgagaccctgtctcaaaaaaaaaaaaatgttctagtttcttcctcttctttgttcccatgggaatgccaccatcaccagccaaggctcacatacctcccacctggattacagtgagcttccaggtaatttggtctgctactagtctcgcctacttggatttcccttccccctgctgcagcattgccttccaaagccatgctttgcacatgccacatcctagcccattagactaagcctagaagcctctgcaggacgttcaccctctcagcgccactgctcagtttcccagtggaaacctctgcacccaggaggtttccccacagcttgcctgtgctgcctctctggagcttttctcccttcctgtaatgtccttgctgctccccgtctctagtccattgcctatacctctttttttttttttttttgagatggagtctctctctctcatccaggctggagtgcagtggcgcgatctcggctcactgcaacctttgtctcctgggttcaagggattctcctgcctcagcctcccgagtaactgggattacaggcgtgcaccaccattcctggctaatttttgtatttttagtaaagactgggtttcaccatgttggccaggctggtcttgaactcctgccctcaggtgatccacctgcctcggcctcccagagtgctgggattacaggcgtgagccaccgcacctgccacaggcccatacctcttttaagtcttcattcaataccagttgtcccatgaatttgtcccagactcactcatatgcttagacctttcatattatcttgccatagctttttcaaagtatgggacagcatggacaagcaggccatggttttcttttgaagagaagcaaggaggcagagttattttaggaggagggttatacatttcattttgaaccaattgcgtttggggtgatggcaggatattaacataaacttatttcttggaccattggaaatgtgtgcctagaactgaggagagaggtcagggctggcagtaacaacttggccacaatctgcagagctgactggggatgaggtggaatttagaatgtctgtagaaacggggaagagaaccaaagacagagtctgggacaacacctaaatgtagatgtcagagcaagagttcaagacgaagaaaaacgaatcatacttagaaatggaggggaggaacaaaagaggcggagcaaagtggggcagaaccagagtaggccacgcttttaagaagtttggtaaaggaactgtgaaaggaatgtagttgaatttcagggtaagctggggaattaaagcagtgtgtagatccagggcaaacagcaagtagggcaggaaccactgaaggaacaaataaagggggaggttgggtccaggttgtcttgagtagggaagtttttttaaaaagtgtgaaactgaaggtgtggggtggattgggtgcctgccgtgctctgaggaagcttggggcaactgtgtgctgaggctgtgaggttgtctggaaggggctcctggacagtaagagctgagcagtggggaagaggactgtgtggtctggaagaggagagaaaggagagtgagtgactgaactggtatccaggctcccacaccaaggcagaaagagggagaggacctgggcatctcagggaggcagaggcagtaccaagcagggtgagaggctttagtcttagccacctttgccccattcctccaaatatacattctaagtaaaaacaaaacaaaacagaactgtttgctatgtaaatttagcttctaaagccctgttctacagagattttggagcttccactgcacccagaaaatgcacagctaaagagaaaacttcccttggtgatggttattagattttacaagaagaggccaaaggagacacatacttatgccagaagaactttccagagatagcattgcatagcgaaatagcctgaattatttttattttttaaaacattttttcttttcttttttcttttctttttctttttttttttttttttttgagacagagtctcactctgtcacccaggctggagtgcagtggcgtgatcttggctcactgcaatctccacctcccgggttcaagccattctcctccctcagcctcccaagtagctgggattacaggcatgcgtcactatgctctggctaattttttttttctttttttttttggtatttttagtagagatggggtttcaccatgttggccaggctggtcttgaactcctgacctcaagtgatccaccgccttggcctcccaaagtgctgggatttcaggcgtgagccaccgcacccggccaaaaatttcttttctttaagatgaggcctcactctgttgcccaggctggagtgcagtgttacaatcatagctcactgtaactttgaactcctgggctcaagtgatcctcctgcttcagcctctcaagtagctgggattacaggcatgtgccaccacacccagctaattttttttaaaataattttttttagagacgagggtctcgattggctgcctaggttggtcccagactcctgacgggctgcattttaatcctagctccaccacttacgggagtcaaaattcaaaagatagaaaagggcatataggctgggtgcagtggctcacacctgcaatcccagcaatttgggaggctgaggtgggcgggttgcttgaggtcaggagttcgagatcagcctgggcaacatggcaaaacttgtatctactaaaaatacaaaaattagccagatgtggtggtgtacacctgtaatcccagctactccgaaggctgaggcaagagaatcccttgaactcaggaggcagaggttacaatgagcagagatcgaacactcgactccataaaaacaaacaaacaaaaaaagaaagcaggctgggtgtggtggctcacgcctgtaaccccagcacttcgggaggccaaggcgagcggatcacctgaggttgggcattcgagaccagcctgaccaacaaggagaaaccctgtctctactgaaaatacaaaattagccgggcttggttgcgcatgcctgtaatctcagctactcgggaggcagaggcaagataattgcttgaacccgggaggcggaggttgcggtgagccaagatcatgccattgcactccaacctgggcaacaatagcgaaactccatctcaaaaaaaaaaaagcaaagggcatatagtgaaaagctttcttcctacacatgagtattcacttcctcttcctagaggcaaccaaggttatttttgtgtgtgtgtgtgtgtgtgtgtgtgtgtgtgtgtgttttgggacagtctcactctctcaccaaggctggaatgcagtggtgcgatctcactgcaaactctgcctcccagtctcaagcgatcttgtgcctcagcctcccagtttttttttcttttaaatggggtctcattctgtcgcccagggtggagtgcagtggcatgatcatagctcactgcagcctcgacctcctgggtcaggttatcctcccacctcagcctccggcatagctggggctactggcatgcaccaccacactcagttaattttttttcttttttgagacagagtctcactctgtcacctagactggagtgcagtggtgccatctcatttgtttcactgcaacctttgacttctgggctcaagtgattctcccacctcagcctcccaaggcggctaattaaaaaaaatttttttttttttttttttagagatggggtttcgccatgttgcccaggctgatctcgaactcctgggcacaaacaatctttccacctcgatctttcaaagagctgggatgagagatttccaccatgcctggcctcattttcttttttaatttttttttagacattatagctctttttaatggcctcattttcttatgtttaattcgagaattattcttttcatatacaaagaatatattttctccacctttaaaaacaaatagtagactgtttaacatctcgctttattcagttagtgatgtttcttagatacgggtccaaattagtacacaaagcacttcctcattcctctcttacggctgcatagcagtccactgaatgggtgagctatgatctatttaacctattctttattgatggacatttggttttgtatatacatttgtaattctgtatagattacaaatcaccatccaaagaaattgtactggtttattctcctacaatgtgtgagagttgggtaattacttaatctcaatatgtgagagtttaggcagttacctaatctctctgagtctcagtttctctatctgcaaaataaacaaaacagtgttgacagtatctatttctcggaattattgtggagattactgagatgatgcctgtaaagtatttggcatgtaggagttggtgctctccaaataaggatatgattttatttgtatttgtgagctactgtcccagccaggtaaatggatatgatgagacctccttgccagaccgggtttctctgattagaacgaggagcagatgttgcaggaaattagcaactgatatcagaagagccgtgggcattctcttgccagaggtgccctgtctccagggcgcctcagtccccccccatatgtcttctgctcccaggtccatccaagctgaatgatcgcgctgactcaagaagaagcctttgggaccaaggaaactttcccctgatcatcaagaatcttaagatagaagactcagatacttacatctgtgaagtggaggaccagaaggaggaggtgcaattgctagtgttcggatgtgagtggggcaggtggggatgaggatacctcctgcctggttcccttccccactactcccacccctgcaccaaatccagcctgagctggtgataccgcagcagccccaagaggaccaggctgtcaaactggcctccaaatgtcttaaaacccttcttgatcaggtgagggatgctggtgggcggaggagggaagaggccttgggaaaaggaaagaaaagggaaggaggcaagggaaggagggagagagactggggaagagaggatgaggggagaggaggaaagaagagagagaggaggggagagggaaaccctatcttggctgggggtgcgcagctgggtgctgggaggaaggagatgttgggacggcgataatggagagatgttgttggtttcctgttgtctgcccttctccttggggatggtatgtgtgtgacacagctggcctttccctccacagtgactgccaactctgacacccacctgcttcaggggcagagcctgaccctgaccttggagagcccccctggtagtagcccctcagtgcaatgtaggagtccaaggggtaaaaacatacagggggggaagaccctctccgtgtctcagctggagctccaggatagtggcacctggacatgcactgtcttgcagaaccagaagaaggtggagttcaaaatagacatcgtggtgctaggtaagggaagcccctcttcgcgcagtctcctccctgccccaggggctgacagcccctccctctgctctgactgccctgtttctggttctggtgctgggaggtcaggagtggagaagactaggtcccctagagctgaggcctgtcttgaaggactcactggggccctcatcctcagggggctgattggcagccacccctcagtgtggtggacatggagaaaggaaaggctggggaaggtaaggatgctagaggcccgagtctcctttggaggccccaaaggaggaatgtcagggagcttactttctttgttgcctcagctccacacccctaccaagttggcaaatccacttactcagggacactaacaccagtaagccaaccctgatgatgttctatgttgtacctctggacctctaagccaggccactgtggggagaccaaggtcctaccccagatcctgtcccctgggtgcttatgtgacttaaggtagacataaggtagtgtgccagtttagtgcatgtacgctgattgaaatcctggttctgccacaaccatgtgaccttgggtgagttactaaacctctctgcaccttggtttcagcctctgtgaaatggggatgatgttaactgccatagtgactacctcgtattaagttgaggactgatatacgtaaggcactgaaaatggtgcctggcacagagtaagccctagttaagtgttcgctgttattttgtgaagggtgatgaatacgcctctaaggagtggaggccaaatggcttctgtggtccaggaatcctaaggacagcaaggatcccctgtggctgggctgctctgtgatggcttccgggaggagggaggtggcctgctgtaggaaaatgctgggtggaagaagggagagaaggctggagaggtaggaaggaactgaagtatctgaagtgacaaggtgggtgtctggactcgtcgggtccccttccatctccctgctgcctccacatgccaaccccactcgtgcaccctcatcttcctatctcctcacccagggtctctcccttcccacctccagctttccagaaggcctccagcatagtctataagaaagagggggaacaggtggagttctccttcccactcgcctttacagttgaaaagctgacgggcagtggcgagctgtggtggcaggcggagagggcttcctcctccaagtcttggatcacctttgacctgaagaacaaggaagtgtctgtaaaacgggttacccaggaccctaagctccagatgggcaagaagctcccgctccacctcaccctgccccaggccttgcctcagtatgctggctctggaaacctcaccctggcccttgaagcgaaaacaggaaagttgcatcaggaagtgaacctggtggtgatgagaggtgaggggccaggccagggaggggtgggcaggggaaggagttggaggggcctggcccagggctccctctgaggcaagccaggccccaagaggggatgcctaggccctggtcacctggatgaagtgagggagggccctctgggtttggggctggttttgaactgagacatccatgagccagcctggggctggcttcactgaagatccccaaagcacttgggctaagaaccagggttccagttcttcctataaccaaccctctgtgaccctggctaagccccctcccactgcaggcctgcttcctgacctgtctaataaggataatgaaatctgctctctgtgtgatagtaatgatgataatgtcaagctccaaattgagtttctggcttccttatctccttatcatcataacgactctgcaaatagtaatggctaacacttgatgctcagcacgtgtcgggccccatccaaacactttacatgtatgcctgcctttagtactatctgggtgcaggttgttaagtcacttgcccagagacacacagctgctaagcagtggagctgggattcaaatccaataccactggaccccaaacgctgtttttcctcgtaggactgcatgaaaacctgctctaaaaggctaaaagaaggtcacccatatagagtatcattttaattgttctactgaatctcaggcctttgatctcagcctctcgttcctctgcagccactcagctccagaaaaatttgacctgtgaggtgtggggacccacctcccctaagctgatgctgagtttgaaactggagaacaaggaggcaaaggtctcgaagcgggagaaggcggtgtgggtgctgaaccctgaggcggggatgtggcagtgtctgctgagtgactcgggacaggtcctgctggaatccaacatcaagggtaaggacccaggttccaaggcctctgcctcctgggctgcgggaccttcctgtggttggcagagaccacccagagtcccggcctcccaatgcctgagttggggggttatgggtatggtgtcctctgtggtcccagggtgctttggaggccccaaaaggaggcatagaagtgatgaagtgaggtgggttgtggtcctgggctctaggctgccagttgtaattctacaagttcccactccctcaggtctacagcctagggatggggtccacctgaccgagagcccccctccctggctcctggcttttctccaaatccagacgcacttacacacacactcacacacatacactctcacacacatgcacacactcccatacactctcacacacgcacacacatcactcacacactcgcacacactcatacacacactacacacacatccacactcacacccacactctcaccccatgtactcacacccatgcactcacacactgtcacacactcatacacacacatgtactcacacatgcatgcacacacacacttacacattcacgcacatactctcacccacacactgtcgtacacgtacactcacacacttatacactcacatccgcacacgcattattcacacatgtgcacacacgcgcgcgcacatgcatgcagtcacgcacacacattcatacacgcacacaggcacacattcacacacatgcacacacgcacacacattcacacatggactcacacgcgcacacgcgcgcacacacacacattcacaccattcacacacgcacacacatgcacacactcacacatgcacacacacatgcactcacacacacagcccaggagccagaccacagcttctctctctccagagtgccctggatatggatatgcccaaacataaaaccgattccccagcactggcggcctttgagagcccccaggcacccctcccctctcccccaaccccagggtcaaaccagagactggccaggagggattgcagggcagtcctcagtcccctggcccgtggaggagggcggtgcattgagcacatttctctcccttgcagttctgcccacatggtccaccccggtgcagccaatggccctgattgtgctggggggcgtcgccggcctcctgcttttcattgggctaggcatcttcttctgtgtcaggtgccggcaccgaagggtgagtaaccccacacctggtccccacaaggccctcaaacccctgagtcctctaccaggagatcctgtatatgggaactgattttggcccagctccctctgcccactcgtaagttcccttgctgccctgtcccagatcccactcaagggagagacaggaaggagcagagagttaattccaggatagatggcctgggccatgtaactgcttctcctgtcgcagcttcccccactccccccaccaaggggcacctcccttctggaggcctgggaccctcgtgactccctttcttgtccctggacagcgccaagcagagcggatgtctcagatcaagagactcctcagtgagaagaagacctgccagtgtcctcagtaaggatctgggaggaggggttgagagaggggaaagggggagggggagggagttagagaggagggggaggaaggggagcaaaggggggcaggaagggaggatggagaggaggaaggagttgaggaggaagagctgggaggggtggaggtgaggagatgggggctaaaggggtgtggtggagaggatagaggggtgggaaaagatggccaggagctagaaggaggcagaagtgggaggatggagctgaaggagcagcaggccaggaaaggccctgctggaaagccactggagctgtgctgcgctggaaaggccattggaggtgctagaacgcaaaggggttgcagtggggacagacctgctccccttcttctttgttcctgcagccggtttcagaagacatgtagccccatttgaggcacgaggccaggcagatcccacttgcagcctccccaggtgtctgccccgcgtttcctgcctgcggaccagatgaatgtagcagatccccagcctctggcctcctgttcgcctcctctacaatttgccattgtttctcctgggttaggccccggcttcactggttgagtgttgctctctagtttccagaggcttaatcacaccgtcctccacgccatttccttttccttcaagcctagcccttctctcattatttctctctgaccctctccccactgctcatttggatcccaggggagtgttcagggccagccctggctggcatggagggtgaggctgggtgtctggaagcatggagcatgggactgttcttttacaagacaggaccctgggaccacagagggcaggaacttgcacaaaatcacacagccaagccagtcaaggatggatgcagatccagaggtttctggcagccagtacctcctgccccatgctgcccgcttctcaccctatgtgggtgggaccacagactcacatcctgaccttgcacaaacagcccctctggacacagccccatgtacacggcctcaagggatgtctcacatcctctgtctatttgagacttagaaaaatcctacaaggctggcagtgacagaactaagatgatcatctccagtttatagaccagaaccagagctcagagaggctagatgattgattaccaagtgccggactagcaagtgctggagtcgggactaacccaggtcccttgtcccaagttccactgctgcctcttgaatgcagggacaaatgccacacggctctcaccagtggctagtggtgggtactcaatgtgtacttttgggttcacagaagcacagcacccatgggaagggtccatctcagagaatttacgagcagggatgaaggcctccctgtctaaaatccctccttcatcccccgctggtggcagaatctgttaccagaggacaaagcctttggctcttctaatcagagcgcaagctgggagcacaggcactgcaggagagaatgcccagtgaccagtcactgaccctgtgcagaacctcctggaagcgagctttgctgggagagggggtagctagcctgagagggaaccctctaagggacctcaaaggtgattgtgccaggctctgcgcctgccccacaccctcccttaccctcctccagaccattcaggacacagggaaatcagggttacaaatcttcttgatccacttctctcaggatcccctctcttcctacccttcctcaccacttccctcagtcccaactccttttccctatttccttctcctcctgtctttaaagcctgcctcttccaggaagacccccctattgctgctggggctccccatttgcttactttgcatttgtgcccactctccacccctgctcccctgagctgaaataaaaatacaataaacttac

SEQ ID NO: 1152 - DNA, 56506 bp, Homo sapiens
gtaggcggtgcttgaacttagggctgcttgtggctgggcactcgcgcagaggccggcccgacgagccatggttgctgggagcgacgcggggcgggccctgggggtcctcagcgtggtctgcctgctgcactgctttggtgagtgaagcctgccccaggggccccgcgccggccggcgggtactgggcagcacccaggctgggtggacgcgccgggctcgaggcggttgccgatcagagacgggtggggacgggtcgctgtgggccgggaacaactcagccgtgggagccttttcaggaagagaaagttgttatttcatcgccagtgtccctcatggagtcagcaaggaactgtgtggccttagggaaggacgggctccggcccgctagcctctcctgcggggcctgcgcccccccgccggccccctcccgagctccagtgaccaagttccttcctgggcttccccagtaacgtcgctgagcgcttcagcggactgcaaaatttttcccagccgtgaacgcgcccgggacggggagcgggcgcggatgccacctgctcgagggcgacgcctgctgccctccccgcgcggtgccgtccccgcccgcgcggcgtccgccgtatcagcagagaggacttttcagaatcgccccacagcgaggagcgggtaggcaactaggaagcccagtcggcagcggcctcacgttgggattcctaagtggtgcgactcctgctcctttttcctcccctcaaatcctaaaaactagtatcagaactggttccatcctctccgtgtgttgtcagccaagtcgtcacaacaacctcaggaaataggtccccttcttcccattttgcctccccatcctccttcaccctccacacattggccccagtcaggccatagcaaaaccccgggagtacagcagtaacctcccagcgagttcaactgtacttgaggggttctcatggctggctcctgcaccccactgccagccctccagcccgtccgtccgtttgctcagcgtccgctgcctgcccgggaggtgcgcgtgtgcatctatggaagacagccaagggggaggggttgagatagactcaaaagtacccgcacgatcagataagtcagtgttgtaagaggcctgggctgggcgtggtggcttacacctgtcatcctagcactttgggaggctgaggcaggtggatcacttgaggccaggaatcggagaccagcagggccaacacggtgaaagatcggctctacaaaaaatacaaaaattagctgagcgtggtggcgcatacctatagtcccagctactcggaaggctgaggtgggagaatcacctgagtcccggaggcagaggatgcagtgagctgtgattgtgccactgaactccagcctgggtgacagaatatgacctgtctcaaaaaaaaaaaaaaaaaaaaaaggtgagctgtgagggtacagagggaagaagaaggcagtctcttttgtgaaatcaagtgtcttttgtgaagcagtcttcatgggagggaggatatttgagcccagccttcaaggactggtgatgtgtggacatgtgataatgtgggaaaagattgctgagtgtccccttagggagtctggattctctgagctgagagagcttctcctgggccttacaggatcaggaccatgcgcctgggaagaagaatctgttagcaacaaagaggaaggctgcagtcaggaggaattggaggcagggaggccagaaggccagggtggactaccatcacagggcccaaatagctctggggagttcatgtgcgggtggctggggaaaagaagagatacaaacagggattaattgaatggatggggtaactctcctccaggcaagctggtccctcattccctggcaccttgggtcactgctgcctgtacctgtgttctcccttccactgcaaacccagtttgcccaagctccacctccaacagattatttgaactgtcccttcctggtgatctctctcacctaattcatgtattcattcagaagtcatttgattcagcaaacatgtatttataaactgctctgcataggccttaaactaaagacaagactgaatgggtatatccccttttggggacccaagcctgcctcattagggaagctgcaaatgcagtgattaacagcatcagctctggggtcagatgcctagctttggatcctggccccactcctcacctgagtcatgaacttgtgtgagttccctaacttctcttcacttcagtaccttcacttttgaagagagtaccactcacatgagggaaaggagaataataaacccacttcatagaattactgggaacatcagtcatgcaataaatatttactgagtgtcaattatatgttaagcactgcacaatggacgggggatacagcaagctatgcacagttccctgcctttgtgaagctcaccttatagtgagggagagagacagtaagtaaatgagtaaaaacatggatgctggatggtgataaagtaaacatttactagtacagagatgagtaaagcaaagaaaggggtgatggaagtcgttaatacttcagtttagggttttttttgaaattttagaacaattaaaatctttaggacagttgcaaaattagtacagtgaacatttgcgtactttctccttgaatcaccagttaactgtcacattagttttctttgttatttttgccatctgttatttttgccaaaccatttgagagtttcagatctcatgacacctcacctgtaattctttatcatatgtctcataagaacaagagcattctccaacaagtcacagaatcatcataatctggaaatgtggcattgatacaatactgtttcctggtagagaacccagaagccagtcctgcaccacatacttcatttgataatcatgcctttttaaccccctttaacctaaaactgttgcttttttttttttttttttttggtactttaagacatcatcatttttgaagtgtctgggctagttgctttaccgaatgtccctttggatgtggattgcctgcttgtttcctcatgatcagattctggttgtaactctttgtagcaggaatacttcatagctatgttgggtccttctcagtgtgtcacatcaggaagatgtggtctgtttgtcacattattggagatgttaactttgacatttggttaaagtgaagtttaccagatttctccattgtagaggcaccattttacctttgtaagtaataaatgatgtgttaagtgatgttttgaggttgagtgaatatcctgttctccagccattgttcattcagtggttttagtatcctatggtgattcttcccagaatccattatcactaaaatattttattttattttttgagacagggtctcactgtgtcacccaggctggagtacaggggtgctatcacagctaactccagcctcgacctctgaggctcaagcaattctgccacctcagccttctgagtagccaggactacaggtgcatgccaccatgcttggctaatttttttttagtttttgtagaaacagggtttccctatgttgcccagactggtcttaaactcctgggctcaagtgatcctccctccttggcctaccgaagtgttgggattacaggcatgaaccaccacatccagccactaaaatattttcaaatggtaattttcttcccccacccttgtccctttcttctccctccctcccttccttccatccttcctctctcccctcccctccctccctcccctcccctccctttccctcccctccccctcccttcctgtcccttcccttcccttcccttcccttcccttctttccttctttgtttcattgccttttctcttttcttttgagacacagtctcactctgttgcccaggctagagtatagtgacacaattatggctcactgcagccttgatctcccagactcaagcgatcctcccacctcagtttccaaatagctgggactacagggacatgccttcacgtccacctaatttttttgtattttttatagagacggggttttgccatgttgcccaggctggtcttgaactcctgggctcaagcaatcctcccaagtcagtttcccaaagtgtcgggattataggcatgagccacccagcaattttctcttctgtttctctctatatatatatttattagtttacattgttcagtaatggatagcttttgcacacacatcctccctttttttcttttattttagaaggttatgtggactcatggattcttttttaaatatggcattcctgtcatccattttgatgctcggcaaccccacatttgacaagtgggaacaccttcaagcttcagagtccttttgctctgtttgttcctgtttgattttaaacacttccttactttctggcacagaaagatgttctggactcatcttgtagtgttcctgcctcagccttcgaatcattaggttccctggtttcttttagtgagagatggtatttagaaatcaagttctgggtgcaaagtgtgcccacaggtaccagagtcattgcttctcagccttgtcagttttcaaagttaagaaatagagtttttacaaagtcaggagttcaccctgatacttctaacactaataatcttgctgcttagttcttctgcctcttctgctcttccatatttgcatctccttactcccacagtgagaactctgttcttagtagcatcagtatattttcctaatctacattaaaccccaaatcattttacagttgctataccaatctactaccaactacaaacttactaaatacagttaaagatttctttacagttccttttatttttcattacagtctccaacttagcaatggttcgacttaagatttttcaactctacaatgagtttttcaagatataactccataataagaaatatctgtatatcccagtgaatatgcaatactatattcaaaagttacttggattctggccgggtgcagtgactcatgactgtaatcccagcactttgggaggccaaggcgggcggatcacaaggtcaggagattgagaccatcctggctaacgcagtgaaaccctgtctctactaaaacaaaaaattagctgggcatggtggcacacgcctgtaattccagctacctaggaggctgaggcaggagaatggcctgaaccaggaggcagagactgcagtgagccaagattacaacactgcactccagcctgggtgacggagtgagactctgtctcaaaaaaaaaaaacaaaaaaacaaaacaaaacaaaaaaaagttatttggattcttttttttttttctaactacccttcttaaacaaggtaacactctatgtatttttttgtatctcatttttgtcacttaaccatacatctggaaaatcattccctatcacttcatagagatccacctcattctttttcacagctgtacagtccctcatagggtggctatatggtagttcattcagctaccctctgctggttagtattacatagtgtggtcagggagggtctctttaatagggtgacaattgatcatacacttaaggaagtgagagataggccacaaggctatctgggggagtgatattccaggtctactactcaggaccctgagataggcttcaagcgtttaagaaacttcaaggataccattgtggtggagagtggtagaaaatgaagttataaaagtagtcagggttggatcctgtagataaagtttttagggccttttaaatattttggcctttttgctttcagtgactggaaagttttgaaggattttgaacaggagtgaaattatgatgacttggatgtttaaaagaattattctggctgctggatgaatagtctgtagaggagagaaaaggaagagcagggaggttggttaggctgcaggggcaatgcaggaaaggaatcactgggggtgggagatatctggatgtgttttgaaggtggagctggcaggatttggtgtgggcttgcattagtggaatgacatgtggatagggcctggatagtgctgggcaagtagcaagaactcaaaagtatgaacttggctgagagtggtggtgcatgcctgtaatcctagcactgagaggctgaggtgggcagatcttttgagcccaggagttcgagaccatcctaagcaacatgctgaaaccccatgatatggtttggctctgtgttcccacccaaatcttacgttgaattgtaataatccccatatgtcaagggcagggctaggtggagataattgaatcataagggcagtttcccccatactgttctcagatagtgaataagtctcacaatatttgatgattttataaatggggattcccctgcacaagctctctcttgcctactgccatgtaagatgtgccttacttctcctttgcattctgccatgattgtggggcctccctggccaggtggaactgtgagttcattgaacttctttcctttataaattacccagtcttgggtatgtctttattagcagcatgagaatggactaatatagtaaattggtactgggtagtggggcactgctgcaaagatacctgaaaatgtggaagcaactttggaactgggtaacaggcagggattggaatagtttggaagactcagaagaagacaggaagatgtgggaaagtttggaacttcctagagacttgttgaatggctttgaccaaatgctgctcatctcagatggagatgaggaacaattgttgggaactggaataaaggtgactcttaatatgttttagcaaagagactggcagcattttgcctgtgccctaaagatacgtggaactttgaacttgagagaaattatttagggcatctggtggaagaaatttctaagcagcaaagcattcaagaggtggcttggttgctgttaaaagcattcagttttatatgttcacaaagatgtggtttggaattggaacttatgtttaaaaggatagcagggcataaaagttcaaaaaatttgcagcccaatgatgcaatagaaaagaaaaaccccttttctgaggaaaaattcaagccagctgcagaaatttgcattaagtaatgaggagccaaatgttaatcacgaagacaatggggaaaatgtctccagggcatatcagaaaccttcatggcagcccctcctatcacaggcctggaggccttggagggaaaaattgtttcatgggctggacccagggcccccctgctctttgcagcctccaaacatggagccctgcatgccagctgttttagctccagccatggctaaaaggggccaacataccactcaggctgttgcttcagagggtaagccttggtggcttacatgtggtgttgggcctgtggatgcacagaagtcaagaattgaggtttgagaacctctgcctagatttcagaggatgtatggaaatgcctggatgtccaggcagaagtttgctgcaggagtgggaccctcatggagaacctctgctagggcagtgtggaagggaaatgtggagttggagcccccacacagagtccccactggggcaccgcctagtggagctgtgagaagagggccatcatccaccagaccccggaatggtagatccaccgagagcttgcaccgtgtacctggaaaagccacagacacttaatgccagctcatgaaagcagccaggaggatggctgtaccctgcaaagccacaggggaagagctgcccaaggttgtgggagcccatctcttgcgtcacctggatgtgaggcatggagtcaaaggagatcattttggaactttaaggtttaagactgccctattggatttaggacttgcatggggcctgtagcccttttgttttggacaatttctcccatttggaatggatatatttactcagcacctgtacccccattgtatctaggaagtaactaacttgcctttgattttacaggctcataggtggaaggtacttgccttatctccgatgagactttggatttagacttttggattaatgctggaataagttaagattttgagggactgttggaagggcattattgtgttttgaaatgtgaggacatgagatttgggaggggccggggtggaatgatatggtttggctgtgtccccacccaaatctcaccttgaattgtaataatccccgtgtgtcaagggcagggccaggtggagataattgaatcatgagggcagtttcctctatactgttcttgtgatagtgaataagtctcacaagatctgatggtttcataaaggggagttcccctgcacacgctctctcttgcctgccaccattaagacatgactttgcttctcctttgccttctgccatgattgtgaggtttccctggccatgtggaactgtgagtccattgagcctctttccttgataaattacccagtctcatgtatgtcattattagcagtgcgagaatggactaatacaccccatctctacaaaaagttagccaggtgtggtggtgcacgcctgtagtcccagctactcaggaggctgagatgagcctggcaattgcttgagtctgggaatttgaggctgcagtgagccatgatgacacaactgcattccagcctgggtaacagagcaaaaaaataaaaaataaaaaggtaggaactattttattattaacagagtctgtcttattctgctgttgttgacattttacagatcctttattgccaactatctgcataactagattttaagttccttgtatgcagaagtcatgtattattttttaaaattttccttatattgatctgtttttttttaatagtaaagattgttgaatctgaacattagatgacaatgtatttgtccagcatttctccatttgaaattatctcacattattatgtgagacttgttcatgtgctttgctggagttgagacttagacagtctgtgtttttttatttagcaaagataatccaagttaaaatagtgttgtgtgttcctataggaaaactaggcccagtgttataacagagtgtaagtaataatagccactaggaggtaagtacctgctctgtgccaggagctatgcttcagatttgagatgtttttatttaattgtcacactgattttattacatagggaacatttaataggagaacaaagcttaggtaggttcagtaatgtgtccaagttcacacagcaaataagtggcagagtgaacttgaactttgattctctctgaatcagaacctattcctttatatgctctgttgtatccctagcctgagatccactaagcaactttttgaagatgagtactactgatttcttatatccaacatgtatacattgtccaatgaaattctgctaaaacatgggaaatataggtcagcacaattaccagtcatgcaaaattgtatttaatatcataatttgtaatggtgaggggtgcttctttgggacatagaatttacaatggcaatttattgacatatttattattaacattattatatttacattctctaggtacccacatttcactcctagacacttttgcataatctcaataacatcataacatctataaatattaacactaatcctgtaacatcacctaacttttacccgtattcagatttccccacttgtcacaagagtgtcttttgttaaaaaacccggatctaatcaagtttcactcattgtattcgttgctatgtttttttgttttaattttgatgggcatctttcagaagttttaaaatagtcttagaacctctttttaagaaccagatttgaataatttattttattgacctccttgtcactctaacatttctttagtaaatacaggctttgagggtaggtattggtttctctgtttaaaagtagaaactttgcataaatcagcccttatatgtgtaagttttctgccttttggtttcttctcatgctgtttctgcacaagtgcctaagcttttttgaagctttacttgaggggtgaccagaaggttttacttaaggacacagacccttaaattctgcaatgacaaatctcaacttccatctcagggttgtaagtgaaaccaggatgcagccgtttctcttttctcagataagttcaggtttgaatataaagtgtgactataagatacagagactgtccctagaaaaggaggggaaaacattttagcagttcctctttggagataactttcagtgcctgcccatcagcctccaaggaaaatgctttttggttactttataggttctagtgaactttgcttactttacaatgttccccaaaatgtctgttgagattagtgcctgaatttccactgggctgaccagtctgtagtttcttgaacattttcttcctatgccagttaaaaattagaagaaaattgaagtttaacatacacattcagaaaaaaataaaaaatcagattaataagaaactaatgaggctgtgccattgtaaactacttgcaatagagtttcccaacgatgaactgagtatctagaaaataacaaggattctcaaggaattttagtgaaatgatcagtactgtattgaaataccttgaatcagactttggagaatagatttaaaaacactcacagccttaaccgatctagtaagaaccttattccctaaagcatactgtggatctcagctgtatcctatctaaggtgagaacagtcaaagacaaatgtggcctttgagaaaggtgggatgtgagtgtcttgaaacaacaggctaaagaagtgctctcaaatagaagtataatatggaacatgtgaaattaattttaataatatattttagttaacctaatatatccataatattttcatttcgacatgtattaggttggtgcaaaagttattgtggtttttgctatttttttttaatggcaaaaaccggcaattacttttgcactaacctagtagttactacaaaaaaatattaacaagagattttatgttccactttttaataccaggtcttcagattctggtgtgtatttgatactcagaacacatctccatttgaactaaccatatttcaggttctcactagccacttgtagctggtagctactttgatggattgcataggtctaaagggaaacatcttgagaaagaagaaataggttaagtgcaagaacaagaattaaaaaggaaactattttagcatcatattagaaggaaagtacagaaagaagttgatttagagaaccaacatcttaattcttgatgaacttatcgaggaggcagattgacagctgagagcaaggtccgggaaccttgctctggccttggggaccgagggtttgtaaccgttgggagacaggtggctgcagtttcagtatgaagtagatgagggcagggaaactggtggtggtgtggctgaaatcagtaaatctctgtcttaaggaaataagagaagtcactaactgggaccggctaagggtggaatcgatcaggaaaaaagaggaatggccccaaccaaggcatctgatgttctggccaacagtgcaggctctggggccgactgcctgtgtctggacaccagctctgccccttgctagctgagtgaatgcagtcagctgaccctctcagtccatttcttcatctgtagcctggtgcttcggaatctttgaccttctctatcaaccaagtgtccagcggagcaaaccaccttactttgataggcgtgttctcaagaaataactcctttctcactctcaccccagatgttcttaggctcgctcccctgcttttctggactctgctcagatgccaacttatgactgccccccatgccatccaactcctttccttaccagtactcctcagcccccacactctgctttatttttctctatagcacttaacatcatccaacatcatccaaataaaagatatttactttttcatttattatgttcttccctccactgaaaaatagactccaagagggctgggattttgtctgttttgttcattgctatatcctgcctgcttatttcagtgtctggcacataggcaggactccatgaacatttgatgaacaaataaatgaataataagaactacctcagagttgagttgaggattaaatgagttaatacacaaacagctcttggaacaagtgcttgtcacatagtaagcctgcagtgaatcttcgtgctgctgctactgttaaatattattactgaggctgagctggcctagggctccttggattggacttgctaagagctaggcaagagtcacaactgtatgaaacttgattgagttaaaacaaacagtgctactcctctttattatctccatgcctggtaagcacattttctacccccaaaattgggactgactaatatgagaatatttatggccttaataggacaggttatttgatacaattactagcctagacattttaggagattggccgctcctcaatactataaatgcatatatgggtgtgtagatagagatgttgcttcccagattgccacacatcctgatactgcaagtaggcatcaactgaaaatgtgccgtgatgtgaagaccaaacgcagagaagtgagagggacaaggctgtgctcagtgacccatatccagatgagaaatccatctgctcacttgggagcaaaaatgccccaagaccctgctatctctgggcttgcacgaggctttaaatgaatcaccattatgatgtcttatattcagagggaaataccaatattcatatattcaggtactgaaacttttaagggaatttttcttttttctttcttttttttttttttttggtcaaatgaacttttactttacctgctaaaatctgcaggcagtgtgagccttaaaatattttagagagagagagagaagtatcttaaaattacattgtttatttctaagaacaaactcaagaaaaccctttccttcaaatcccggaagagtgattagcttgtctctaaggtatggcattggctgggcatggtggctcatgcttgtaatctcagcacttcagaaggcccagggaggaggatcacttgagcccacgagtttgagatcagcctgagcaacatagtgagaccttgtttctacaaaaaatataaaaattagctgggcgtggtggcatgcaactgtagttctagctacttgggaggctgaggcagaaggatcacttgagcccaggaggttgaagctacagtgagccacgattgcaccactgcacaccaacctgggtgacagaatgagaccctgtctccaaaaagaaaaaggaaggaaggaaggaaggggagggaaggagggagagagagagggaaagaaagagaaaaataaaaagaaagaaaagaaagaaatgacatcagtgaacctcctcaaaccatagcgaggctgttaagtttgattggggctgacatccatgagtgggtacaagtttatctggtgtggtgccctgcatcctataacacttagttggtaaaatctacttaaacttgagagggaacatctcaaaagggacagctgtggagttgggaaggtggagcccgcaggtcctcccatcttgctttggtgatgaggcagaaagtggggctgaaaaactgagtctgttttggttgtatatgagggctcctgagccattttatttttaagctccagttaaacttctttctccatctctccttacgaagtcctccttcttcagccaggttccacagcaatttgggatttcacaaagcccagggtttggggtgactgtcaaattttgctattctgtcaggaagccttatcttttgaactacatttaagttgtattttaatcattttagttaattcattcaacagatatttattgaaagtccatatgccagacatatggggatacagccaaaaacaggaacacctttgtccttgtcctgatagggctagcctggctggggttacccctaagctcagatttgaattagttgccaactttcaagaacaggaattttcacacaaaatgtgaatatctggctttttttgaaaaattgggaacctggcaatggtgggcctctgtttccacatggcaggagctgaggcacagctcctgtttccacatggcaggcccctccctgtaggctcactggtgcgcaagtcctcaccagtcccttctgactcacacttggcccgctggtatctcctctgtgggtggaattgctggtcttcgtctaatgcgtcatttgccacagttctgtttctttgtgactcctttgtttgctcgttttctttttattgtttctggtctggctttttcttccttgactggagtcttgctctctgaggccctcttcagctctagcattcgatgatttggaaaccacagagcttagtgcctcacctgtaggtttggaggtgtgcttaactcagtttgactttctcatttgcaacatctgctgttccaatgctgtctatagattgtatcctgagaaaccctgcatcatgtcactatctttaagagccttatgccatgtagcaagctaaataagaaacaatggttaagagcactgattctgcagtcagattgtccaggttcaaatctggcttcattacttaacattgttgtgcctcagtttcctcacctgcaaaataataaggttagaaataaaaccttcttaatatgtttttaggattctgattttttttttttttttttttttttttctgagatggagtcttgctctgtcacccaggctggagtgcagtggcacagtcttggccactgcaacctccacctcccgggttcaagcgattctcctgcctcagcctcccatgtaactgggattacaggcgagtgccaccacgcccagctaattttgtatttttagtagagacggggtttcaccatgttggccaggctggtctggaactcctgacctcaagtgatccacctgccttggcctcccaaagtgctgggattacaggcatgagccactgctcccagtggtgagtacctatttatagagcccttgcaacagtgcctggcacagagccagggccatacaagtgttagattaagtaaaaaaaaaaagtaccagtcaatctgaatctcaggccctgagtaataatttgcagaggaatttgtgctgggggttgagagttccttttcattaacccatagttaacggtgaccagattttctaaataagaaatcaggatacttcatctataaaacttgggttccagttacaacttcaggccatacaaaaagaactattaaaattgaggtgttgatgttttgtagaaacactgcaacagaatatttgagatcagacctgtttttagatatgtgatcactctatacatgtagtgctgattaggtattaggtaccctcatatctttatttaaaaaaaattcaaaattcttcaaaacaaaaaaaccttcaaaaattatctggctagcatagaaaatctttttaggcgatcactgataaaattttttccctccctccatctctctttgcttttaaacagcaaaaactcaccccatgcccagttctcacccagttaattcagacagtgtgaataccttgatgttgacctaactcattaaaagaaaaagagagaaaacctttgaaagcctattccatgtcaaccagtgtaaaaagactctcaattttattcaaacctgaaaacaatcttttatggtgggcattatgatttctacttcacagctgaggagatctagtgtggggaggcctttgggagttcaccctgggccttgctggcttcaaaatctgggcactctctgttctgcactctggcatggttattagcgtccctacagtcccttttctgaccactcagtggtatcagcaaagcaacaaactcactgttgacaccattcctttgctcctatttgtgtattcattcattcattcattcattcgttcatccatggtttgtgacctttgagaaaaaactcactcccctttcttctattgttcttttgttcattagaaattatcttagcaacttactttagtgttggccttggaagtgcaacagaaaagactttactgtaggaaggaaataatagatatacccatgcacacaaagtagaggtagatattagttttagagacagttcttaacaactcctcctcttggttgaataattctatttaaaaaaaatttacatagttttaatattataatagtaataggatatttgtcttcaaaagtaacatatttttcaatgtgacctgtattaagtaataagtaataaattgaaatctcaccatcaccacaatctctaaagtaaccgtggttactttaaaaacaaccactgttaatcatttagggtgtctctttccagtctaaaaaaagagcaagtgagaatgcatgtacacatgtattcatgtctttttatagttaaaatatatatatattttttggtagagacagggtctcactacattgcccaggctggtatcaaactcctgggctcaagtgatccttccactttggcctaccaaagtgctagaattgtaggcatgagccaccacatctggcctctttattgtttttaaaaagaggaatattctgcatatatatttctataactttttatttttaatattaagaaattttccaaattcccaataataaaaggagaatatcctgtttccttttttaaaataaccacatagtaagccatggcataatactaaattgtttaactattagactagattattatttactagtatagataactttaaaatgaatatcattatgcatatctctttatgtaggttatactattgttttatttgttaacatcctgaataaatatcacccagatcccagtattcagtgaaactacaggttcttttagagcataagcaaaaataaattgtatgcatgtgtttttgtatgtgtgtttaattctgcttacatttgaattttcttccatctttttcctactatctgagtaatatcactagtgccttttattcagtcaagtctccacatgttgactcttgtcttggagttatgatgccatccccctcctggcctttcttctacttcccaggtctctctcagtctccttagccagtgttttcccctctagccaagctttaaagcacaggtccaagctgccttttcccacttcatacgctctcccaaggtgatggtcctaatggcctccattggagccactagaaatgtgatgactcccaaatctgtatcctttcctgtgagtcccagacctgtgtacttagcagctactgggcatctttgcttggatgtctcacagacccctcacactgaacagtgtcaaactgaaagcatgatgttccaggccagtcttagtcttcctgctgtgtttcctttcttagggaaagacaccacaacccacctaggaggaagtaagagctgtgattcatcctggccctcctggcacctcctctcctcctcctttaccccatatgctgtcaatcatctagttctcccagttttacctccctaatgtctcttgaaccactttgcctagcacaatgctgcctcttgaccagtctgaaattgctgtctgatggatctcttgctatctagtcttacccctcccatcagtcttccacaccatagccagaaaagataaacactttcattatgtaaaaatatagaaactttgtatggaagatattcatttagtaaattcaataggcaaaggctgtatttgaaaaaaaactataatacagataaaaatatataacatataaggagcctttaaactttgagaagaaaaaaacaaacaatctaatacaaaaaaagaggatgtgaaaagacatttctcagaaaaagaaatccaaatcaacaagcagaagagatgcttaaatttttaaaggttgggaaaatgcaaattcaagtatcaatgaaatgtcactatttgcccaaaaattaaacataaaaaaaaaattacctaatgctgtcaggagtccaaggaaagggcaactcaggcattactgatggagatgtaaattgccaaagtcttttttgtaaacaatgcagcaacttctattaaaataaaaaaaatctatttaccttttgatgtagcaactcccagctccactctactcccacataaatatgaaaccataaatacatcaggacatatgtacaggatagttattgcggtgtaactgcaatagacaaagctagccacaaaaggagtgttcatcagtggtggatggcagattaattatggttccctcatgctctggaatattatgtagttattaaaaagaataaagtatagctataccagttgatttcaaggagattttatgacatattaatggaaaggcgggatgtagagaagtgtgcataagaccatttttattaaagaatggtaaatccctcaggcacacctccttttattgcatttcactttattgcacttcacagataatgtgctttttacaaattgaaggttcgtgacaacccagctttaagcaagtccatcagtgcctaactttatgttttgtctctctgttacattttagtaattcccacaatatttaacgctttttcattatcatatctgttatggtgatctgtgatcagtgatctttgatgttactgttgtcattgttttgggatgccaagaaccatgcgtataagacggtgaacttaattgataaatgctatgtgtgttctgactgctccactgactggctgttctccccatctttctccttctcctggcctcccttgtcacctgagacaatgatactgaaattaggccaatttaataaccctgcaatggcttctaagtgctcaagtgaaaagaagagttgcactgtctctcactttaaattaaaaactagaaatgattaagcttagtgaggaaggcatgtgaaaagccatgacaggtggccgggcgtggtggctcacaactgtaatcccagcactttgggaggccaaggtgggtggatcacctgaggtcagaagtttgagaccaacctggccaacatggcgaaaccccgtctctactaaaaatacaaaaattagctgggtgtggtggtgggcacctgtaatcccagctggttgggaggctgaggcaggagaatcgcttgaacctgaaaggcagatgttgcagtgagccaagatggcactattgcactccagtctgggctacaagaatgaaactctgtctgaagaaaaaaaaaaaaaaagaaagaaagaaaaaaaaaaagccacgatgggctgaaaactaggccttttatgccaaagagttagtgaagttgtgaattcaaaggaaaagttcttgaaggaaattaaaagtgctacttcagtgaacacataaataagaaagtgaaacagcgttattgcagatggagaaagttcgagtagtctgcatagaagatcaagccagctacaacattcccttaatccaaagcctaatccagagcaagaccctaactctctttagttctgtgaaggctgagagaggtgagaaagctgcaggagaaaagtttgaagctatcagaggttagttcatgagatcttaggaagaaagccatctccataacataaaactgtgaagtaaagcagcaagtgttgatgtagaagctgcaagaaattatccagaagatctaagattactggtgcaggatacatgaaacaacagattttcaatgtagacaaaacaaccttctactggaagaagatgccatctaggacttccatagctagacaggagaagtcaacttcaggcttgaaaggacagctgactctcttgttgtgtgggctaatgcagctgatgactttaagttgaagccagtgctcatttaccactctgaaaatttttagggcccttaagaattaggctaaatctattctgcttgtgctctataaaatggaacaacaggctggatgacagcacatctgtttacagcatggtttactgaatattgtaagcccactgttaatacttactgcttagaaaaaaaagattcatttcagtatattattgcttgttgacaatgcacctaatcacccaagagctctgatggagatgtacaaggagatgagtgttgttttcatgcttgctaatacaacatccattctgcagcccatggatcaaggagtaattttgcctttgaagtcttattatgtaggaatacacttggtaaggctatagctgccatagataattattcttctgatgaatctgggcaaagtaaattgacaaccttctgaaaggattcagcattctagatgtcattaagaatatttgtggttcatgggagaagatcaaaatatcaacattaacaggagtttggaagaatttgattccaatcgtcaggtcaaaatatcaatattaacaggagtttggaagaatttgattccgatcctcatggatgactttgaagggtggaaatagcaagaaaaatagaagtggagcctgaatatgtcactcagttgccacaatctcatgatgaaaattgagccaatgaggagttgcttcttatggatgagcaaagaaagtggtttcttcagatggcatctatactcctggtgaagatgctgtgaacattgtttaaatgacaacaaagggttaagagtattacataaatttagttgataaagcagcagcaggatttgagaaaatttactctaattttgaaagcagttttactgtgagtaaaattctatcaaacagcattggatgcctctgagaaatattttgtgaaaggaagggtccattgatgcagcaaaactcatcattgtcttcttttaagaaattgccacagccattgcagcctttagcaaccaacaccctgatcagtcagcagccatcaacattgaggcaagacctttcaccagcaaaaatattaggacttgctgaaggctcaaatgattgttagcatgttttttttttcagcaataaagtattttttaattaaatatgtacattgtgtttttagacataatgctattgaacactttaatagactacagtatagtgtaaacataacatttatatgccctgggaaaccagaaaatttgtgtgacacactttactctgatatttacatgattgctgttgtctgggaccaaacccacggtatcttcaagctatacctgtgtgtatccattatatgtgatacatgtttgtatctatttgactatatgagagaaaaatattgaaagatgtattctgatttgttaatgtagattatagaactggagattgttatggggttaagagagtgggtaaggcacccagataagaggactgaaaaaatacttatatgatcgtttttcattagtgtaaagttgtatgtatgtgtctatgtataatttatgttttaaaatacattttttaaagaaagagttactcttattttgtccccatcctgtttgaaactcttctatggctttctttacttcaatactagaattgtgtttgtttgatgccttgcaagggctggctgtgcttgtgtatgcagctcggcttatgctacttttctcatgccattgctcctgcttcaaggtctgcataattgttctcttaatggggacctgccctgctctcctgggcatagttaactgctgcttgtgcctcagaacttcttttagggaagggaactgccttccctaaccccttgttagttccctaagtaaatgttcttattgacacctgatgcttttacttagcagcaattatcacagttgcagttgggcattgtctaattatttgtgtaaattctgcctcccctaatagaatgtcaactctaagaaggaagggacggtgtctgtcttgttctcaaggatcttatatagaatagatgcccaatgaatatttcctgagtgaatgaataaatgaatcccatcctgaatgtgggaccacgctgttctgaaagggcactgaccaaggagtcagacaatgtgtgttctggtcattgtgccgccataaacttgctgagagacatggagcaaggtgatatgcctcttggagcctgctttcctacctgtaaatggggttaataacacctactgcaggtagacatggagagggataaaaaggaatacaagacaatgtgaacatataaccagcagagagtaagcattcaataaaattgccttatatttttcttggtgtcttgtcacttcaccagtgaaatgggagtaatttgactaaataatttttagagtttcttctagttcaaaattatagttgacccttgaacaacatggcaattaggggcaccaaccccttgagcagtcaaaaatttatgtataactcttgactcccaaaaacttaactgctaatagcctaccagaagccttaccaataacataaacaacacatattttctatgttatatgcattgcatgttgtattcttacactaaattaagctagagaaaagaacttattaggaaaagcataaggtgtagaagaatgaaactggatcctcatctttcaccttatataaaaatcaactcaaggtggatcaaaaacttaaatctaagacctgaagccataaaaattctagaagataacatcagaaaaactcttctagactttggcttaggcaaaaggtcatgaccaagaacccaaaaacaaatgcaacaaaaacaaagataaatagatggggcttaaattaaaaagcttctgtacagcaatataaacaatcagcagagtaaacacacaacccacaaagtgggagaaaatattcacaaactatgtatctgacaaaggaccaatatccagaatctataaggaagtcaaacaaatcagcaagaaaaaagcaaacaatcccatcaaaaagtgggccaaggacatgaatagacagttctcaaaggaggatatacaaatggccaacaaacatatgaaaaaatgctcaacattactaattatcagggaaatgcaaattgaaaccacaatgcaataccaccttactcctgcaagaatggccgtaatttaaaaatcaaaaaataatagatgttggcatgggtgtggtgggaaaagggaacacctgtacactgctggtgggaatgtaaactagtacaaccactatggagatttcttaagcaactaaaagtagaactaccatttgatccagcaatcccattactgggtatctacccagaggaaaacaagtcattttatgaaaaagacaacacacaacatgttgcacacaacatctttatagtggcacaactcgcaattgcaaaaatatggaatcagcataaatgcccatcaatcaatgagtggataaagaaaatgtgggagatatatatatatatgaatatgccataaaaaggaacataataggccaggcgcggtggctcgtgtctgtaatcccagcactttgggaggccaaggcgggcagatcacgaggtcaggagatcgagaccatcctggctaacatggtgaaaccccgtctttactaaaaatacaaaaaaaaaattagccgggcatggtggtgggcgcctgtagtcccagctactcaggaggctgaggcaggagaatggcgtgagcctgggaggtggaacttttagtgagccgagatcacgccactgcactccagcctggggacagagcgagactctgtctcaaaagaaaaaaaaaaaaaaaagaacaaaataatggcattcacagcaacctggatggaactggagaccattattctaagtgaagtaactcaggaatggaaaaccaaacatatgttctaacttacaagtgggagctaagctatgtaagaatgatacagtgaactttggggacttgtggagaagggtgggatggggatgagggataaaagactacacactgggtacagtgtacaccagaatctcagaaatcacacccaaataactaaaaaaaaaaaaaaaacttatccatgtaaccaaacatcacctgttcccccaaaactattgagataatagtaataaaaaaatttaaaaaagaaaaaaaagcataaggaagaaaatatacttactaagtgaaagtggatcatcaaaggtcttcatcctcattatcttcacgttaaagcaggctaagtgggaggaggggttggtcttgctatctcagggatggcagaggcggaagaaaatccacatgtaagtggacccacacagctcaaacccatgttgttcaagggtcaactgtactttgatttcttctgagctgcagtctcccctttctctaccctcacttccctccaccactagctccattcctgactactttcttctactgttctcaagcccaggatacatcagctctccctgggaaagacaaaagacatcttcatgccgccagggtatggcagtttatctcatacctactctttcaccaccaccctgccctctatcactcattgtttcatttacatttataagacatttttgagtttccactattgtgtgtggtagactctcaccccttgaattctgtactttttcttgtgccttcccacatactctgttgagtggaggaaataatgcataatcggcaaagcaatggaaagatgctggtgtgtttttgagggcagttccccttaattaagggagatgggttctaaaaagtccttgtagataaacaaatgggtgatatttgcttcttatctgaaattactaacacagttgtctacaactggtcattcagtgttcttgatttcccctgtattatttcaattaccctaattgctactaggcaaaaacttcagtcaaattttaattgctctttaatgttaacttaaaatagctgcagttttttgtttgtttgttgagacaggtcatgctctgtcacccaggctggagtgcagtggcacaatcatggctgactgcaatctctgcctcatggcttcaagtaatcctcttcagcctcccaagtagctggggaccacaggtgtgtgccatgcccagctaattttttgtacttttcgtaaagatggggtttcgccattttacccaggttggtcttgaactcctgaactcaagcaatccaaccaccttggcctcccaaaatgctggacttacaggcatgaaccacaggacccagctgctgttctctcttaacaagagacaagtcctagagcaagatgcatttaaacccactttggggtatcaaaaatatcccaatcttgtggttctaataaatgtttaacaactaggttggtatggaggttctgatgtgaagcattagtcagtttctgtgctgttactagatgttccctaatagggctgggcagagatgctaacaattggctcatgagggcaggtggacctggctccaacccaccactgcacccaatccctgagttcttaatcttcatcacaccctcgacttgcttcccagccattgtttctgatctcagttaatgatgcctctcagtcagccaaggagacctgacagtcccatccacttcccccaccctcatcactgaatcctgttgacttctctctccagcatctcctgagtctgtccgcttgtctgtccccactacaaacaccctgctctggtctgtcctgtccatggacttcattgctacagcattgactttcattataatttccctgcctctgtgctggcccctgtcagccgctctctactctaaagacagtcagcctgctgacacttaaattatgttaggccagtcttgttaaaaacctttctgtggcttcctctccattaggatcagtccaaacccttagcgttccttactttagcacacataggctgtgggctggcctttgtctgtcttgttccccaccagccaccccttgccctcctcattctagctgttaggaatcacgtgtgtatcctcaagcacaccatgctctttctccattcagggccttcctttgggggtgctgcttcctatatatctgtatgatcatctcttcttccactccccacccactcacctacccagccctgcggcctaactgccttttatccttcagtgatttgcacgttatgtcagttccagcatgacttccttggggaggccctagaccaggcagctcccctcatgcagcccctgatgtagagcctgctccctgtcttctccacacgtgaggctcctggagggcctggaacaaccccatattcccagcccagcccgtactacctggcagatggttggtgctccatgaatgtcgggtccatttcttggatttatgcaggtcccagttttctattaaagagtaagctccacatggtcaaacatgttcttacttcctgtattttgtgtcagcagtttgtcagcttagcacaaaaagtacctgatgaataatttctgccaccaaagtcatgttgttttttctaaccaatttttttttctctcctaggtttcatcagctgtttttcccaacaaatatatggtgttgtgtatgggaatgtaactttccatgtaccaagcaatgtgcctttaaaagaggtcctatggaaaaaacaaaaggataaagttgcagaactggaaaattctgaattcagagctttctcatcttttaaaaatagggtttatttagacactgtgtcaggtagcctcactatctacaacttaacatcatcagatgaagatgagtatgaaatggaatcgccaaatattactgataccatgaagttctttctttatgtgcttggtgagtattccataagttgatttgtttaaaatggcaaatttccatttttttagtctgttttcagagactagcacaaattaatggtctatgagaaaagaattagatgttacctgttgtcagggttttctccttttctggtatagaggagctagctactttcaattcctttgtcattcctctgggtgaggagagaatctaaccaaggtggggagaacagtatcagttgtcttactaggaatgttttggaaagagatgtagtgacagcagttagcttagaactctttgggctccactgatagatgttactctataaagttcctgcttccccacacagcggggagattgtttttcctcctgcaccattttatttaattaatttatttattttgagaaggagtctcactctgttaccaaggccagagtgcagtggcacaatcttggctgactgcaacctctgcctcccaggttcaaagtgattttactgtctcagcctcccaagtagctgggactacaggcccgcaccaccatgcccagctaatttttgtattttagtagagatggtgtttcactgtgttggccaggctggtctcaaactcctgagctcaggtgatccacccgcctcagcctcccaaagtgctgggattacactcatgagccaccacacccagctcctgcaccattttaaactgaaactagagagaggggacacatttctccctgcttctcactgacactcctccctggtctctaaagccccttttgtgttgcagtcttgtataggcccctgcctcacatgccagtgtttcttggtcattttaaggcctgcctcattttcattgtttctgacattcctggtgtcttggtggttgcaatatttaaattaaaattctttcaatattgtccttgatcgcctctcctgtaaggatcttttcctctacgttacccactacccatggatgtaaccgagaactcatcattacctcaatgtcaggtgtctcactctgaccaccatgccctgtccttgatgatgctgatgctgacagtccttcacacacctgatgtccctgctgccctccctactcagcctgagtgctgttgtcactcactagactcagtccgttgcagacacacttagcttccttgctcctttgctggcttgtcatactcgcatggccagattacagctagattaagtccgctgctttgcctattctgtgctcacacccatgtggttgcagaaaaatacaccaccctacaaagtcctgcacttttaatttctctaatcacttacctcaattaagttggtatttcctagcctgttcacttacccactctcctagcagttactttttctctcctcaaatcttgaatacctccttctctagactgactcttcagctgaaggctttgcttcttatttcactaaggagaataagcaatcagagggcaatttccacaagctctcaccacctgcctaccttcctacccatacctgagcctgtaggccctgctttctctcctgatatgaatggactttctgagttctcacctgaagttaaactttccacgtgtgccctggatcccacctcctcttgccgtcctcgggaatatcaccctagtgcttctacccactctctcctgatgagaatttcccccataagttgatggttcattttaagtggcatacatatatactgtcattaaaactttctcatgatccctgtacccctccagccaccaccacctgctgtcttcactttatagaaaatctccttgaagaagttgtccatattcacttattctgatcccttatattcacttttaacccactccaaataggctttcatctgcactgctatgccaaaactcctctagacctccttgttaataaatccagtggttcattctcagtccatgtcattcttgacttctcagcagcttttgacatagctgatcactccctcctccaagtactgtcttcacttgacatccaggataccaccctattcatgtttctttctcttttttccttgagagggggtttcgcccttgttgcccaggctggaatgcaatggcgcgatctcagctcactgcaacctatgcctcccgggttcaagtgaatcttctgcctcagcctcctgaacagttgagattacaggcatgcaccaccatgcctggctaattttgtatttttagtagagatggggtttcaccatgttggtcaggctggtcttgaactcctgacctcaggtgatccacctgccttggcctcccaaagtgttgggattacaggtgtgagccactgtgcctggcttcacatttctttctaacacactgactattccttttcagcttcttttgctagtttccttgtttccccaacctcttaacactggaaacatcaaggcttaagccttaggtctctttccttttctgtctgcgttcatagccagtgggtgagctcatcccatgtcagggctttaaatatcatctcaatgctaataatgtacagatctagagctctagcccagagtaccccgccgagctccttatgtgtatacctgactgcccagtgtacctctccagtcagacatctaattggcctttcaaatatcacaagtccaaaagtaagctcattatcttccccttaaaacctgctgctcctccccaaatcttttcccttttggttaatggcagccccatcctttcagctggtcagtctgaaaccgggatgtcatccttgatacctctctttttcttgaataccacattcactctaccaggaagttgtattggttctaccagaatgatctttttaaaacagaagtcagatcatgtcactcatctgtgtggaactttctaatggccccatctaactctgttaaagctaaaatgtgtaaagcgacttgcaaggctatgtgaggtctgacccctgtggactctatttagacaaatacagcttgctaagatgtcaaagtatcctcttagaagatttccttgaaaaagtagaatctttgaaacatggacattggggatctgataatttatagatagggccaacaaacaagaggattgagtcagaatttagatcacacattttaagagccctttttatagagtttgtaaaactaattcaaaacatttgaataaatttctcctcttaaacttgatgaactgttttaaaataatttaaaatattctaggccgggcattgtggctcaaggctataatcccagcactttgtgaggctgaggagggagggttgcttaagcccagtagttcaagaccatcctaggcaacatagcaagactccatctctacaaaaataaaataattaaccaggcatggtggtgcatgcctgtagtcccagctactcaagaggctgaggtgggaggatcccttgagcccaggaggctgaggctgcagtgagccatgattgcacctctgcactccagtctgggtgacagaccaagaccctgcctcaaaataactagctaaataaattaattaaataaaatattctatggcacctcagcaaaggtatggttttgttagtcagaccaactggatagaccttaggaagcctgcagaggagtaaagtacaggggaggtgagttttgatcaggaggcagtgatattgatagtattgagtgtgggacttaaagtcctggtttgagagtctggacatcagcttgtagcagtggggagccattgtgtcctatactggagcaaggaagtgacttgataaaatacatttttggaagattaatgtgatggtgcatacttatgatggattaaagagaggagatgtcaagttagaagctactatcatccaggtagatagagggtccaagaaagagtctgcaagatgtaggttttggttgtaaaaagacataagatgactctaggtttcacatctgcatgataaaatgattggtcatactatttttttttttttttaagaaaagaggaagtcatacttccttgaggtaatgttaacacttgttttagtaacctggtaatcttctagagacaccagacctaataggagacttccagtgagcatattttggacagggggatttcctggcacttcctaaattcagggcatccacttccttctgtgtgtacattgagatctggctttcctccatacccaaaagtccccttaaaatttctacttctgaggtttattagtcctttcccatctttttatggaccttcatcacatctcagatgatgatttttatgtaagtagaattaactgccctgtccttaactgggctggattgatacttgacctttactaaaattcgtgaaaatatacacatatttctataaaatgtcatcagatatgtgtaagaaattctcattttttacacagcagtgaactcaattcattaattataaattgactaattgtcttagggaggaagtaggcacatttcttgccagtttaatgctgcttaaagtagaggtataacgaatatttgttagatacagctgtggtaagtcccacgggcagcaagaaaatatgaaagatttatagaaggaaaagatctgaggtgtagaaactgtgatctaggtgctgcagaaaggcttgcacacttttagatgagttggataggcacttctacctttgccatctggcaactgttgtgtaatgagatagccagaaagagcttctacctagtcaagggagttctagcaacttagaagataatactaacacttcttcatgtttcccctgaaattactttcatattctgttttttttcttttcttttcttttcttttcttttttacaaaccctgcatgtggcactcagtcatattctgtttgacctttacagtgacctgatacagcattccctttcacagatgaaaataagacagtttaggagtccgtttctctgtaagtagaacaagagacctggatggatgctttcttaaaactcttccagctcctaaaaggactgtggccccaggtcacacagcaggccaaggctaaggcttgatcaaacctcccaactcctactcagtgactcttctcatcatatcacataccctccggggagcctcggcttcctggagttggaaactcacagccaatggccgtgtgctctattacagctagcatttgttaagtacttactctgtgcaggcactacatgttaattcatatgttgattattatctgtgttaactcatttaatctcattacagtctgatagagtaagtactatttgtgtccttattgtagagaggaggaaacctagacacaaggtgatttaagtaacttgcccaatgtcaaatggctcttagtcatgaagctgggatatgcactcaggcagctgggcttctgagtccatgctaaacaccatactgtacctctttggagatagcgggtagaagaatttacattttatttgaagactgtctctctgaatctatccttctatccatctgtctccccatctgtcctgtactgcttgtgaggagccatctgtgtgccttgcattatgtcatgtgctgtggttgaaaggtgagtcatacctagtctttgccctccaaagatacacagtctctggggctgatgatgcacctctgttcagttcagaaagtgctggatgaaagactagacattggcagagctagatcaatacattagaatctgcaacagaacaaacaggccacatacatcagaagcacctgggatggtggggctcaggaatctgtatttttaacaagcacccttggtgattcttaggcaccttaaaatttgagaaatgcttcaaaggaccatttctaaggaggtagaaagcttggttttctgcccctgagaaatgcccagcctagttacagaggcaggcataagtatatgaaatactgagaacaggcatttttgaactattctggggatgcatgttccttggaagtcccctgagggctgctatggggtggggtgggcaaaagggaccagaggaagttaggagagcagggctctaggctttcaattttgagtcaactagagcaacttcttatccattggattggattgccactgaagatttaattctgagaaattccactgcttaaaagatgattaaaagtctttttaattaaagaaaatcttaaggaagtatgtaaggacttgtgtgagctagattaaacttaaaaactaggaagccccaagtagaaagggaagtcagtgtgtgactctggtttctaccaaggcaggctgggtactttatttaactgagcgagaaggaattcaggaggaggagaagatgggggaaccattaaatgcttttatttttcagattataattggagcataagcattaacttgtcttagaaaacatcattttaaatgacaacatagtattccattatcttggtgaacctaaatttacttaaatgctctttttagtagacgtttataatgtatcaatactttattatcccagtgctaccatgaccattgttgtatattacatatgtttttgcatgtttcctcaggcctcttatgattaattgctggagggtagctgagacgcaagaaggcatatgaattaacaaataaatgactcataggacaaagtaattagccttgaggcttttaaagggcaacaatggcagaatgtgacatgttagtgtcttaactcatccttgtaggtccatgctgccttagccaataggaggcacttcctagaagaagggtgggagtgaggcctctggacaggcaggtctgtgacacatgctgctccctgcactgcctattaacaggtccagcccaaccaataggcagggcccgacaaggctctgtgtagctccacctttcacaaaatgtattgagtcagatgtattatggactttcctttcacaaaatgctttgagtcagacgtgttatggaattaaaatttttttttacattttggaaaggtaatacaaagtatttcctctgcatattaagcaccccacttaattatggggagcaccctatgggtcaagcataggaacaagtatttacttcattcctatatatttaaagacaaggtctcagtctgatgcaatcatagcccactgtgtgtagtgagctagagtgcactggcacaattataactcactgtagcttcagattccttggttcaagcagttgcaagtagctgagactacaggcaggagccatcatggctggctaatctttaaactttttataaagacagggtcttgctatgttgcccaggctggtcttgaactcctggcctcaagccatcctcctgcctcagcctcccaaagtgctgggagtatagccatgagccactgtgtcctgccaagcacaggaatatttttgtggtgaaacgataatgaatatttgaagtgagtgagaaagactcaaatccttgtgttaattcaggtcaggtcaggatttgcagctaaacgattttgctaccaacttgcgaagactcttttggcttcagagattttttgatttaagaattgaggataagggatttggggcctgtattggtctgttttcacactgctataaagaactacctgaaactgggtaatttataaagaaaagaggtttaattgactcacagttccacatggctggggaggcctcgggaaacttacaatcatggcagaaggcgaaggagaagcaagcacttttttcacaaggcagcaggagagagagagaactgccacacacttttaaaccaacagatgtcatgagaactcactctctatcactagaatagcatggggaaaccatcccccatggtacaatcacctcccaccaggtccctctctcgacacatgggaattacaattcaagatgagatttgggtgaggacccagagccaaaccatatcagggtctgaatttattctgttaaatttgaacaggtagatctgacctagcaaaagaaagaattctcgctccttgatgctcaaggagtttgtctgctcatcctttcaagcttgtaaggaggttgcgagctcttcataaatttgcagatgataagtctaaatattactattttctgtactaaatattatacttttttttccagagtctcttccatctcccacactaacttgtgcattgactaatggaagcattgaagtccaatgcatgataccagagcattacaacagccatcgaggacttataatgtactcatgggattgtcctatggagcaatgtaaacgtaactcaaccagtatatattttaagatggaaaatgatcttccacaaaaaatacagtgtactcttagcaatccattatttaatacaacatcatcaatcattttgacaacctgtatcccaagcagcggtgagtaaataactaaatgtgtcatggaggctttcagaccacagatgtggtgactaacacaaggttcacaattttgaaatgtaaaacaagttacaattttttttttttttttttttttttttttgagacagagtctcgctctgtcgcccaggctggagtgcagtggcgcgatctcggctcactgcaagctccgcctcctgggttcacgccattctcctgcctcagcctcccgagtagctgggactacaggcgcccgccaccacgcccggctaattttttgtatttttagtagagacggggtttcaccgtgttagccaggatggtctcgatctcctgacctcgtgatccgcccgcctcggcctcccaaagtgctgggattacaggcgtgagccaccgcgcccggccaacaagttacaatttttaacagaaaccccattatagatacaaagctaacattatttagcactttctgtgttgagcaccattctaatacatatgttaattaattcaatcttcacatcaatcctcatacaacctataagttgtgtactagtacttatccctgtttcctggtgagaaaccaacagagagagagtttaagttgtttgctcaaggtaacagctagtaagtggcagaacctggctttgagtagaggctatctggctctagagcccatggttttaactattcacaatgctgctttataatattgttataatatcattatgttctgaaaggttacatatctactacaggaacatgcatttgatatgtttccttaggcctaacactaagttaatatcatgacaatctgtcttggctatgattttctaatgttgttttagtattatttacatttgtaatttttattatctgttttttacattatatccccagtttaacaaacaaaaaggtcagtgacttgaaagtggtttattaaaatataaaagagacgaaaatagtaaatactattattcagaataatataattgtaaatagtgaacaggattccagggcaaatagagaatatgagtctctagggctgggataaggtgagtctatgaatgaaatttttctgaacaagcagctgaaacagataagggaaattagcaaatacaagaaatatatgaaacttggattttaactggtgagccattctaagtctcccatttattgtcttttctgaaccctttcaaacaataacttaaagccattaaagttatattattttcagacaaagcagagtcacttttgggaaaggaaagacatttttcaagaaaaagtagacgtcctcgtcagggtgggcagcgccgccgcggcgggcctggggcttggggcctggagcggcccctcccagcacccggtgcgcccctgccctgccgcccactgccctgaaggtcaagtcgctttgttctgcgctgcgggcggcttcctcgccggcggcccagcggaggaggcgtagagggcggcgagtgggggctggcagctcaaatctcccgctagcccagccagccccgcgtacccggagggccgcggcgcacccggaggagcattcaggcttcccgtttttaaggtggagacgtccaggacctctttattagatgtttaggaatttgagtttttccgtagggcgatggtcatcgtgagcatctgtggggtcaggctgggctaactggggttttgattgtaagtttcgtgtggacgagggcatgtctgatggggaagaaagtccttggcattgcatctcagctgttgggagctgtgcggtgcgagccagatgggcggcgtgtgctccccgaggactggcctgagtgccttagcctagttactcacgggacttggtttaccagacaaggggataaaaacattcagatggcagataacagtttttcagatggggttccttcagatttcgtggaagctgctaaaaatgcaagtaagacggaaaagctcacggatcaggtgatgcagaatcctggagttttggcagctttacaggagcgacttgacaatgcccctcacaccccttccagctacatcgaaactttacctaaagcagtaaaaagaagaattaatgcattgaaacaaattcaggtgagatgcgctcatatagaagccaagttctatgaagaagttcatgacttggaaagaaaatatgcagcattataccagcctctctttgacgagagaagagaatttatcaccggtgatgttgaaccaacatctgatatggaatcagaatggcaccgtgaaaatgaagaggaggagaaattggctggagacaggaaaaataaagtagtcataacagaaaaagcagcagcaacagctgaagagccaaatcccaaaggaattccagagttctggtttaccatctttagaaatgtagatatgctaagtgaattagtccaggaatatgatgaaccaatcttgaaatacctgcaggatattaaagtgaagttttctgaccctggacagcctatgtctttcatattaagagttccactttcaacccaatgactgctttgccaactcagtcctgacaaaaacctgcaagatgaaatcagaaccagataaggctgatcccttttcatttgcaggtcctgagatcatggactgcgatgggtgtactattgactggaagaaaggaaagaatgttactgtcaaaaccatcaagaaaaagcagaagcgtaagggtccaggcactgttagaacaattaccaaacaagtatccaatgagtcatttttcaacttcttcaatccactgaaagcatctggggacggagaatcactggataaagattctgaattcgtattagcctctgattttgaaattggacactttttccgtgagcggaccacaggctgtgctgtacttcgctggggaggccttaaaggatgatgacaattttgacgaaggtgaagaagaagaggacgaattagaaggtgatgaggagggagaagatgaggatgaggtggaaattaatcccaacaaggaacccagccagccggcggaatgcaagcagcagtaggaagtggaggtgggcgcctggcagaccggctgtcgcgactccgggcctgtagcgggaggcctcagtctttgccgcatgcggcacaatcccgtcgacagcgcttactccatctaatcgttttcaagtgcatgattttcactttcacttttcctttttccttattattttgcttaatgtgtacagtggcaactgaaatgcatttcagaaataggaggttttgtccaataccctctgcagccttggtgcctgtagctctggacttgcctggacccttccctgcgggagggccccatagaccccattggggtggggtgggatggggtggggatcacttggctaaaagggccgaggtctggtgatgaggttccagggatctagaacctctcctaccactcctgcagttggactgaattctttcctttcatttgaagaaacccactcgctgttttcagctgcttaatctgctgagtgtgcagcctgcatcacctgctgtatgctaatcatctcagaagggccgtgtagagtagggccgtattctccttaggatgttgctttttgatcttcttttttaagggttgggtcagggttgtggcacaccagctcaggcgagagctgccacgggtcacctcatatttatttatcccttcttgcctgtgaggactgcggccttttgctgtcgctcgtccttgccatttctgaaccaccctggtgacctgagcaggaagatgtgccacttcctagcaggagcaagggctgtgcggaagaaacactgcttcctgccaccagggctgaagacgcgagcctgtcctcgtgacacaggcaccgccctgctgccggagttgggattcggcagtgttctccagtgaggggctgggctgggaagtcctgcgtttcatttgagcatatgagcgtcaagtcctgctttctcagtagtcccattgctgggccccaccattcatcctgtctgaaggtcctggttggtgtgaccggttggtggctggtgagtggggtttccaagtgggtgacagcgctctgtggcagccggggatggccttgtccgcgctgaccaggcctgtagagagtgctcagcctaaccttagaacacatttataactgaatacagtgttttcaatttgtacataatagttagaatattctattaaagttatgaaacacggagaaaaaaaagaaaaagtgcaaatgagtcccaatttataactgatagatttgatttttgaagacagagaaaagatcaaacccacagaggtgtcactcaaaggagcactgtttgtacaagtcacacaattgcaagaagtttttaaaacgagctgcaaagttaaaatagttaagcttggagcaaacattcctttattaattccaccttttgagtgttacataatacccaaggcatacgatatggaaatgcaatttgttgtaaaagcagatagttgctttataatgggaacaacaaaaaataaaaccagtgtgcttttgccttttggtatatgtgtgctgcatctaactgacaagggggaagaagatgaccacatatagacagagcaagcaagttgaaatcttgaaaagttttaagtgttccaagagacaaaatacttgaaggaaataatttctgagtaagatccctctatagaattacatggaatattttaggggatttttaaaggttttgcccttgcaaaactttatgtttaactttatgtttgccattagaatttgaagacacaaagtaaaattactcttactgaaagtaagattactttccctgtaaatagtctggtaaaagatcataagaggaatgatattcctcttattgatttgaaataagtactattaatttgaaaaaattcttttaattattaaataatggtgatttatccttcttttacattttcttccaaattgatagttcacatatatacaacagattttgaaagtttgaggaatgttgcttgataggtcttaggtttaaatcctggagtagtgttgacatctgagacatatgtctgggcttctgaccctggtttctgttaaccaaatattggaggaccttctccttttaaaatgcaaaccaggagctgaacttaatgatcttaatggttcttttgaacagtaacagtctaggatctttttttttctgagatgatttttgaatgcttttgtgtggaaccacatgcatcataatagatacaaatccatgaaagtataacagttaaatactagatcttactttttcaggttttgatttctcatctaaactttccaatgctttatcagtgaagcaaactaactcacattgactagcctgctctcctttagcaaacccttcaaataaatgcctcatttgctcctcaccactatcattttagattggccagacagttgttacttaccttttaagaatgaggagacaggtagccgggtgcggtggctcacacctgtaatcccaacactttgggaggctgaggcgggtggatcacgaggtcaggagatcaagaccatcctggctaacacggtgaaaccccgtctgtactaaaaatacaaaaaattagtcaggtgtgttggtgggcacctgtagtcccagctacttgggaggctgaggcaggagaatggcatgaacccgggaggcggagctggcagtgagctgagaccacaccactgcactccagcctgggtgacagagtgagattccgtctcaaaaaaaaaaaaaagaatgaggagacagggtcaaccaggtggggtgacttgcccagggtcacttaagtattggagatagaattaaaatttaggtctttgaattccagagtgtttttgtatgataccatcctgactctctatacgtttcaaaataaatcaaattttaaagttttctttgatttattcatatgaatgagctagagaaacccatactatatagatatacatagtagatattggtcaaatgtaacttaattttttacctcattatctcatgtttcttgtaacattttgtctagtaggacctttttgtggtttgtcatcattttagtcatgacatctactgtcataccgtcactgcaacccagaaatggggcgatggggttactaactagttaaacacaatctaaaggagaattttagagacagttaagattgaggacagagttcttgtccaactcgtattgtactgggggaatgaactaatacttactgaaggcctgctccacaacaaactcctgtaaatgatttacataaatgtgtcacatttaatccacacaacaacccagtggtgtgggtatttataaaggaggaatctgaggcacagtgaggttaaataacttgaccaaatatacacatttattaagagcaaagccaggatttgacatccaactccatctgaactcaaagcactgtgtcttccccactgtactgggaagtaaaagtaagaagatgactcagagatggagaattataatctggaatttggaatttacttccattggttaaccgtttgaaaattgcagctccaaggcattgggagatggaaagaaagctagtgagcaattatttcttgcctttgtgtcatgctcctacattttgctcctccttatctccttatctgcggtcagagtagatagcatggaggttttatgcccatgctacagatgttcagagatctcaaggtcagaaagctggtttatggcagcacgtgaatatagacagacttatacagattagaaaattgagaagttgagggcaggagaaaattctggatagaagagaacatgggattgggagcaagaaaacctaggtcctagacctgatttcattgcttactggcagtgtgaatgtgggggataataatacttactttacaagggctgaggaaattaaataaaatagcatgtgggaaagagtattgatggttagtcactataaaactgctagttgttattcaggatacaggaagagtttcaagagaggacatttggtataacattatatacagccaatggtttaaggaggacaatgtagaagaggttgtggatttggcacttaggaggtcattgttgacagaccttgtgaatagatgagggtaggaaccagattcctgggctttaagtaagaagaggggtagtccaataggccagttatatatttggctgtgaaagaggaaaataaaatctgagtacctttgagagtcaaaggctatttccaggtaaagaaacccagtgcacttcaccattctcttttagataactgctgggaagaagtaggatgattgtaacaccctccacattgacacagaactctaaatgggagcctagggaaagggcacattttttgaaggggtaggcaagaggatattctctagagtaccagtttccaactgttgtacacatttatggaccaagaacataaaagaaacattgttcagttccgacctgaagttatgtagaacaaacattgttctgagttcaactagatgatctttctttcatagctgtgtggacattatgttacctgcagggagtaagtcactgaaggtagagcctcaaaaaaacaccctttgatcttactcctaagaaaaaagagagaaattggaaaaattcatcatagaaacacaaaaatatgcggaaataggaaaaaggagaagaaggaaagaaatgcaacataggaaataatattatgtagactgagataaagaatgttaagaatatttgaacaaagtttgaaccagatgaaatgtaacaggcagaaacagaagtaggaggatttttggactgatttaagttggtctcttgtgacttttatgactttccactgggaagaatagtgattaagaatgttcactctgcttttaaaaattgagaaagaacgctgcgtgcagtggcttatgcctataatcccaacactttgtgaggccaagacgggaggattgcttgaggctgagagttcgagaccagcctgggcaacatagggagaccctatctctactaaaaattaaaaagttactgaggtgttgtggcatgtgtctgtagtcctagctacttgggagactgaggtgggaggatcacttcagcctggcagtttaaataaatcagatcagtaattaataatcttccaaaacagaaagcaccaggttcagatgggttcattggtgaattctaccagatatttaaggaagaaatactaattctctataatctcttttagaagatagaagcagagggcatactttccaattcattttatgaggccagcattattcttgtgctaaaaccaaagaacaatacaagaaaagaaaattaagacaaatatttctcatgaacatacatgtagaaaccttaaacaaaatattagcaaattggatccaacagcatatagaaagaattatacatcatgactaagtggtatttatctcaggtgtgcaaggcaggttcaacatatgaaaatcaattaatgtaatccatcacattgacagactatgaaagaaaaatcacatgatcataccaatagatacagaaaaagcatttgacaaaatccaacatcaatttatgataaaaactctcagtaaactaggaatagaggggaaactttttcaacttgttaacaaatgcctacaaaaaaccctgcagctaacatcatctgtaatggtgagaaacttgaagctttccaactaagaccaagaataaggaaataatgttcttctcaccactccttttcagtattgtactataagcactaactaatgccataagacaagaaaaggaaataaaagttatacagatgagaagaaagaaagaaaattgttttagttctcagatgacatgaatatctatgtatacaatccaaacgaattgaccaaaaacctcctggaactaataaaaaactatagcacatttgtaggatacaaagttaatatacaaaagtcaatcacttttctataacagcaatgaacaagtggaatttgaagtttaaaacacaacaccatttaccttagcaccccaaaaatgcaatacttaggtacaataacaaaatatgtcccagatttatatgagaaaatcaacaaaactgatgaacaaaatcaaagaagaactaaataaatggagagatattctatgttcatagataggaagactccttattgtgaagatgtcagttatttccaatttactctataaattcagtgcaatcccaagcaaaatatcagaagtcatttgtggatatcagcaaactgattttaaggttaaatgggcaggcaaaagaccagaatagccagcaaaatattgaaggagaacaaaattgtaggactgatactactcaacttcaagacttactataaagctacagtagtcaacatagtgtggtactggtggaaaaataaaagacaaatagatcagtgaatcggaatagagagcccagaaataaaccaacataaatatggtcaactgatctttgacaaaggagcaaaggcaatacaatggagcaaagatgatcttttcaacaaatagtgctgtaacaactggacatccacatgcaaaaaaatgaatctaaacacagaccttatgcccttcacaaaattttactcaaaatggaccatagatctaaatgtaaaatgcaaaaccataagactcctaaaacataagagaaaacctagataactttggatatgatgactttttagatacaacaccaaagacatgattcatgaaagaaagaattggtaagctgtacttcattaaaattaaaaacattgctctatgaaagacaatttcaagagaatgagaagccaagccacagactgggagaaaatatttgcaaaagacacatctgataaaagactgttatccaaaatatacaaaaaacttttaaaactcaacaagaaaaacacaaacaacccaattaaaaaatgagtcaaagatctcatcacacacttctccaaggaaggtatacagatggcaaatagggatataaaaagatactcctgggccgggtgcggtggctcacacctgtaatcccagcactttgggaggccgaggcaggcggatcacctgaggtcaggagttcaagaccagcctggccaacatggggaaaccccatttctactattttctattttgtaaaaatacaaaaattagctaggcatgtcctatgtcaacaggcaacagggaaatggaaactaagacaacaatgaaataccacttcacgcctatcacactggccaaaatctagaacactgacagcaccaaatgccagtgaggatgtggagcaactctcattcattgcaggtgggaatgcaaaatggtacagccactttggaagacagtttggcagtttcttacaaaactgtatgtactcttaccattcaacacaactgtcatgcttcttgctatttacccgaaggcattaaaaacttatgttgacataaaaaccttcacatggatggttatagcatctttattaataattgtcaaaacttggaagcaaccaagatgtccttcagtaagtgaatggacaaataaactgtggtacatacagacaatagaatattattcagcactgaaaagaactatcaagccatgaaaagacatggaggaaacttaaatgcatattataagtcaaagaatccaatctgaacaggctacatgctatgcaaattttacctatgtgacattctggaaaaggcaaaactgtggagactgtaaaaagattagtagttggcaggggatatgaataggtggaacacagaggagtttgggggcagtgaaaatactctgtatgatactgtaacgatgttattatacatttgtccaaacccacagaatgtacaactgaatgctaatgtaaagtgtggattttttaatgataatgatgtatcagaatggtttcattaattctaaaaaatgtaccactctggtgagggatattgataatggggaggctatgcatgtgtaggggcaggatgtatgtacaaactttctgtaacttctgctcagttttgttgtgaacctgaaactcaaaatatttaaagccaagtgaagctaacttactaagccatgaatcaagtttgtggaataaccccaaatagaggaaccattccaagtgttttcaaaacatagtaatttgggtgcatatttcaaggggctgcattctaaggataaaaagaactataaagaaaaaaattgtaatgttttaagtaattatgtagttagcagtaatgctggtatttggttactgttgagtatgtattgcaggaaaatgcaaatgaatatttatattgttgttattgaatattgggatgtttggcatgaaagaaaggagattcagctgtaaattgattaggttaagtaaacattgtagccctggatttatttaaaggtattaatttgaaccatatgaaattgctgtttctctagtcaaaaaccattgaatcttggcagcttaatagggttcagcataatgccagcatgacccattaatgtattttgtctcttagaaaattgtgtatttcctggttctgtccattgaaatgttctagaaacaagagccagtcctgtagcaatttgcatgcttcttggttcttggacccagatttgagtgaccagtgttacctggtgtgcccagacttcccagtttcagcacccgaatttcatatcccaggaaactcttcagtttcaggaaaaccaggatgattggccaccttcacccagattatggtacctaattatcatttcccatgaaaatgaactagggcctttgggacagttggctgattccatacctggggcatggaatgcattaaaataagccttgagtatcttattttaccacagaacaagaaagctatcaaaaagacttaacatgatggtacgaacaggactcaggagccactctgaagaggttccctctggccaaaaataagacaattggaacatcaataagaataacaacttcagtagattgaaacacatcagttgtgctcagttcatgcgttcataatgtactaaaaacaaatttaaaaactcactggtcatctctagagaatgcttgggagctaactcattattttgaaaaacgataaagaaagagaagaatcaaatgctgcttttcctatataaattgaacctcagagtaaccacattgttgatgaggggcagtttatctttatgtgaagattgtagttagtaaagaaggaatgatagactaaaccactttgcaaacccttgatgaacttatggctctagacaatgatcttcagtggcactgacatcatgaaaagaaaagcaaccaggcatcgtatgccacctaagggaagtatacaaacactacttggggagtattattgccaaggaatatctgaattttgctactaaagaagggaaaatgatgttcgggggcacctagcagtttctggccagggtcttctcaaatctgaccaataggtgactgcctatttgctccaacacacctgtgttcctaataaaaggaaagtgtgatcatatccttattctcatttattcattcattttctctctctcttcctcctctcccttcctttcccttcctttcccatatccatgtcacatttgttcttagtgacccctccccaatcctttagcagtgcattgtgtactctgattttggattttcaatagctggatagagtttaccttgtgaacataccacagttttttgtgaaaacaaggagctgctgtgaaaacaacttaggttgtttttgccttatggtatattaagtaaggctgcagtaaatatctttgtgcctttttgcggggagtagaagggcacatcattgatattttccccaggataacatcttagaaatggaattgcagagtcacaagatattaatagagataccaataacatctactcaataggttaatgacagtatataacagctgttcttaaatgcaactaccctatgagataagtatatttattagtctcgagtatagttaccctgtgagaaaatggaggcactgagaggttaaggcacttgcccaacattgtaatgacttagtgagactataggcacatgacttagtgcaatgtctagatgcttcatgataaatatttttaaggcttattatatacaactgccagaattgccctaccaaacacaatgccaagttctgcttccactggcagtatgagatggtcagaaacaaaccttctagtggaacacttgcttcttttattaaataacacagggtctggaatgtatcaagcttgtgcatataagtttgtttagaaatagtcgaatcttgttattcatattagttctacagagtcaagttaacagtgaaatagcaagtagtgaagtaatgttcctgggggaaatacaggggtaggttcctgtgagcctctagtcataagatttttgttaatgatctgtttataaccttgttttatgtgtgtctctgtttaaataaaccttaatatatagtgttgatttattgaccttgaactcatagccaacagcactgtaactcatgcctaagtgaagcttatctaatacacctattttctctgcaaggcacatcgcagccttcttgcacttaggaactcttgtcagcccttcaacactatactttgggaccacttaaaatagtgaaatcaccaacaaaaaagcacaaaaatgcaaaatcatggcactaaatagactgcaaataggacacttgttaacagtgtaagaacttgaaacaagaaggcagagctttacctttttccacctctgctgggaatctgcttattgggtgactcaaagttttcatcactgttcttatgtctgagaatgactgctttgggtattgatttgtggattacaaataaatttcagtaaataagcaaaccgcaaggtggaatctgcaaataatgaggatccattttgatcagttcaactagttgaatttcttttcttttcttttttataggtcattcaagacacagatatgcacttatacccataccattagcagtaattacaacatgtattgtgctgtatatgaatggtatgtatgctttttaaaacaaaatagtttgaaaacttgcattgttttccaaaggtcagaaaatagtttaaggatgaaaataaagtttgaaattttagacatttgaaaagaaacaaaaacttttttgctttacgtgtgtgggactgctgagcatgctaggttcctccaaagatccacattatctcaaggtagaatgaatccttaggccacagagagctttacaggcctgggaacacagcctggacctgttgcatagcctccttttacctgtgatctgcttcaaaatatagttaaacttctggtctccaagtcagagtttgctaaagacctctttaggctgccacctctgtaattttcatgtcatataacacgaatggggctcccaggtaggaagggagttttggttgagttaagtgacttacgtaatacaagtaattgtgcttgtattacttcctgagccttctcagtcccctagcaatcttgggcagtcatacagcttggagaactgatgacttggagaatttgttcccagcctgttcattcctggtaatgagtaatccctctcaaatcccaaaggacagggagcaggctgtaattctgaagagtggatattcttgatgccacagcagtttccataccagccttcaccaaaaggaaatatgccagacagggaatgccgaagagtaaactttctacaagtgatagtatctaggatccattgtgtcatgaatcaagtttataaactagatttcagtttccttagacctgcactgtttagtatagtagccaattagccacatatgattatttaaatatatcatttaaaatgaaataccattaaatttaagattcattcctcagttacactaaccacctttcaagtgctcaatacctacatctggctagtggctaccatactggatagcccagataaggaataatcctatcattgcagaaagttttcttggtcagtgcagaactagactattttgcgatatcagtgctaaatataatttcctgatgataacattttcatattataagttgtaaataccatgaaaatccatccctaagtaatagattatcagtcagttgactctccactaaacagtattataacgatcagctgaagaaagttttcagctattgcccaatgcataaaatattttgggagctcaaattttttaaaaatctattttaatccccaaatagcagtataatagttaatcatctcctgaacaggttggttcccagaaaccaaaatcattttccactcagtgttgttgtagatctcaattaaagaactaacccaggatacctgaactaaagagaggtggcactgagtttccatagaacttcaaaacaattggttgatttcacttaaaaaaaaaaaaaaaagtcattcaatatacagaaaattactcccctggtcagtactgttagccccagataatctgaaaaaatttgttcttaaaaaaaaaaaacaatttggaggccaggcatggtggctcatgcctgtaatcccagcacattgagaggtcgagttgtgtgcatcacttgagcccaggagtttgagaccagcctggacaacatggtgaaacactatctctacaaaaaaatacaaaaattagccaggcatggtggtgcatgcctgtagtcccagctactcaggaggctgaggcgggagggaggcagatgttgcagtgagctgagattgtgccactgcactccagcctgggtgatggagtgagaccctgtctcaaaaaacaaacaaacaaaaaaactcagcaagcatctcaacctttaagcaaccttaaagtcattaattgggaaatagtgagatgtttggcatggaatcttcagaagaggaaagagttgaatggaaacagctccagctgcctagttgtagttgacagacaactttataagctctagtcaaccctattgactaagcttctgaaccactagcatagttctagggtcaggcggatgcctactgtgggcaggaaagtgatgcatgcatgtgtgggagcagtgtcttaatgtctgaaatagtagccatgagctacatgtggctatggagcacttgaaatgtgggagtccaaattatcatgtgctgtgagtgtaaaataatatgtttctaagaccgtgtgtgaaagaatataaaatatctcattaaaaaatgtttatattgagtacatgttgaaataattttatatttgtgacacattgtgttaaataaaatattaaaatttacatttttttttactttgtaatgtggataccaaaaattttaaattacttatgtggcttgcattatatttctattggacagcactggtccaaactattctagccttccctgcatcttcagccttatgcacgaggtaaaattagccattttgtcaacagtttttgcatttggttttctatcatgttctgaccaatttttgaacaactctttggaccagctctgtagccgatttgatttaaagcatataggatagcaggaaatcccagggtgatggggctctggcttagttttccatatttaggcctctaataggcagtcagtaactccacatttcaccttttcttttcagttctttaattgagaagacaatttcttcatttttaggtattctgaaatgtgacagaaaaccagacagaaccaagtaagtacactgcaggctgtgcactctgtgccagaacaacagcagccctgctgtagatgcccattacttgggaagccagattgtactcatctgttggttgccttgtacagtaataagaagtaacatcagcagatatactaaccatagtgtattaagtaccaactgtgtgccatgcactgcactagccactctctgcatatcgtttcctggaaccctctcaatgagccttgcaggaggagtatcataccccttgcttagagacagcgcatatgagattcatagaagtcaagtgagatatcaaagtcacgttgctagtaagtgatgggctgggatttaaatctaggtctttggactccaagagttatactgttaaccactacaatacactccctccacctcccatcccagaaaaagttggatcagggatagggttcacttcaggagccagggtcagagctgggcctgtagtcacatataaaagataggacacaaacacaattagcagcagtgttggtttaataaaccgccgtagggtgctccaagaggccccctcctggcagatcccactggtggtcaggaggcagaggcatgagctgggtgttgagggatgaggggaagagttaaggcccagggtgtgaagggcaggacaagaagtagcaagccatcctctttggagcagagagtgttgaggcattagagaaagatggggctgggctggcaggttgggccaggctgagactttgagagaggctttgggtcattctttagggagaaccgcagagttttctagcagaactatgctttagtaagatcactctgctggcaaagcatgggactaattaataggagatgagatgaggacactggttagtggagtaatgaaataatccagccaagcagagaagagggcctgagtcaaggtgatggtggcagaactgaatatgcagagctaggtttgagagaaacagcagaggtcctgttagcaaaactttcatctggcagtgtaggctctgatgccaaactccctggttcaaatgccagctccatttctcacaggccttggacaagtcacttaaactctctgtgctttggttgtcttctgtggaaaatgggcataatgataatatagaaatgacaatgatagcatagataatcacatagaaataactgtgtcaaaatatattaatataagtacaatgcttacaatagtggctggctcataatagttttcaataaatgttagccattatgactattgttactattatttttcaagaaaaataaaagcgacaggaccaagtgtcacagaggagtcacacaggaatcttggttgggaaggaaaattatgaatttttgctttgacaggttgattttggggtgctggtgtattacctggctagtgatgtccatgcacagaattggagcgtgggcttcacgctagagttacggattggggcgcctcttcatctggacagtaattgatgccgtgagcacctgaggtcactaagaaagaaaagctagatgccctagggtgatgggaagaggcagaggaggcgggactggggaagcaaagtccaggatcagagccagggtagccccgggttagagactcgagggaggaggctacatgttaaagctgcagagacaaggaggtaggcgaggggttaagacctttggttttgtggagtcggttgctgtggtcagtgcagggatgaagtgagggtggctaagcagcagcaagggcctaggtgaggtgggatcgatggatgggccacaggtgtcctttctcctcagctgccaggtggaacagtgcaggagaaacaagctgtggcaggaggcctgggggcaaggaagtacaaggggcagctcagccggccacagacccaagctgggaggacccaaggccatgaggggttgatgggccaggaggctgggcagagaggagccaagtagctggagatgaggtgaggtgggagaggtagggacctccaggcttgtggtcagaggaaggcatttcagatctgagcaatatgcgtgagccccaggtgagtgtgagagccaagtcaggtctctgctgagatctaggtggttacagtggaggggaactctgagtggatgggggaggcatagccatcactaccaatgatgggggtaggggggcatcatccagggccacggggaaaggggatgggcattctggaactcatcccttcctctgttcctttcatcacaacaaacgttatggagattatgcgataccaggcactgtgctagctgatagggtgggggtcagagtacccagcgaggctagacattgtgtgggattcagagaaagcatataatagggctcctcccacaagaagcttgtggccacaccagggagagagaatggatgcacatgagcatacgaaactcttagaaggacttaggcaggaagcacaggtgataggcagaatgtgtgatatgagggtaagggctgagcaaccaacgcagaggaattggagaggccagaataatcagaaaagctttggagggggtaggatgtgacctacattttcagaacaagagtggagtagaaaaggcattccaggtgggataaacagcggaggcaaatacatgagagggaattaaatctgttgtgatttatttgatagtaagattgacctgcctggcatcgagttgaagtagaggcaaaagacactgaatatttgcaaggaggtccttagaatggagtgatatggaaataagcagccattataggttcttgagcaggaacattttgcatgaaaagcactgctttggaatgatgagtctagaaaggtaacactgacctctctaaggtggcattctagggagagacctgagtatttggggctgagattgagagaggagcttacttttcttggtatatttttatttactattcaagttctgcatcatgtgtgtttactgcctatttaataattatttttaaatttaaagaacccattgtggcagcagggggaattctctaagctcagttactaaagggttatgaagctgggtatggtagcacacacctgtagtctcagctacttgggaggctgaggtgcgaggatcgcttgagtttaggagttagtgggaggatttcttgagcccaggagttaagagaccagcctgggcatcaaaaaaattaagttaaattaaaatgttaaaaggttctgtatatggtggagatggaggagatcgggggaggagatgagaaaggggcaagcataagtaggaacaaatgcaatatttccccagctgcgcgagggcaggagcaggaagaactaaacccaattaggaacaacagaggacagatgagtagatagcagacatctgacgggaaatggccacgccacacttctcacccaggcagttcaacgtaggcaatttctgagtgccctggtattttttgtgtaagtgtctagaaaacagatcacaaagttagccaaattaaaaaggaagcagggagtcctatttctccgagaagaaagatttacaggtgggatctcaggcaggagccaagctggagaagcaggcttgattccttgtagtgggtgaggagactgctgggagagggcagggaagcagagaccggcaaaaagctgccccaacaagaatcctgtgcctgccaacctggtttacaaacatttcccactttatccccctcagaaagtcacagcacccatttcatgttctgtgaggctcccaaggagggaaacttctagtttgctgtcctttacctcacccctgtgaccacagcactaatttctcatgaattcttgttaccaatgagatacaaatgtttggggagctctggcctggtctgattttgagctctgtggaaatacgcagaccacgggggaggaggccgggaaatggactcggtttgagggcttgctcaaggatgcggttttgtttttcggctgatttactccaagacagccagagattgttctgtcgttgccacagaggtgactaaacaggaaggtaagtttgaggtaggaagaaaaccatccccaggagtttcatgtagcaaagaaggaagtagctgttacaaatgggtgacagtttacatgtgggtctaacagtctcagctctgttgttcaatctttcagttatactcagagagtaagcgggaggagccttggggctgctattgagtgcagcatcctgaaggctgttcttcaagtgttactcagactactatcccaagagcactcaaggcagttcttcctccatccctgctccctagctcccttggctttgatgagtttattacaaaagggctattcactttagaataggagggtaattaagactcctggtctgcagcccagatttactgcattttacaagttaataatatgatttttttttgtagctccaattgattggtaacagaagatgaagacaacagcataactaaattattttaaaaactaaaaagccatctgatttctcatttgagtattacaatttttgaacaactgttggaaatgtaacttgaagcagctgctttaagaagaaatacccactaacaaagaacaagcattagttttggctgtcatcaacttattatatgactaggtgcttgctttttttgtcagtaaattgtttttactgatgatgtagatacttttgtaaataaatgtaaatatgtacacaagtga

SEQ ID NO: 1153 - DNA, 10653 bp, Homo sapiens
gtggcgtggcgacggagtcgcgcgagggacacgccgcgttgtgggttctcggcctgaggtgcgagagaagcggtgaccgcggccctggctgctcggacccgggaacatgatggtcgctggagcagaaggcgctgagaagggaccacggcggcgctgggtcgtgcgagccagtagcgggctgaaacgtagaggccagaaccaggtctcagggggcactaaaggcggtcggaggtaatccccacaccgcttcctcctggaagtcaggctggccgggagctcccgtatccaggacggttggtcgcctctggcctggcagggatcctagtgtctcgggacctcccggtgacgcgcctgcctcccctgctgcaccataggcccgggagtacggcgtccccacagcttggaccggcaggggctcgtgaaatgtttgtcaagtggataaatgaccatggccgtggtctccgcgggaggtgaggaaactgaaagccaccgaggaaaaggggggcgctccttaagaagtgccgcggtcacgtgtacgtttcaaaagaatggcgtgactgagtagggaggggaccgcggagaccctcagaccctggactgtaaggagatgaggggccgtgaaggggaacccaggaaactgagtcctgaaagcaaggaggaacttccagaatgaagggcgccgacactccttcctgcctttgctcaagcggttccttcaccccgatcaagttccttcccatttctccatctgggggatcctgaacgtgcacatcctcagagaagccctcctggggtctccaattctagtttattgccccctcctatcgatcccccagcgcgctcatcgggcctgtggacaaggacaggtttgaagagaggattccctggatcgcggaagggctgcaggaatggcacagccccttccgaggatgccaaaggagcccgggcaaaggaaagtggccgtgcccgggcctgcctaccactagatccccacccacctatgactgctcagtcccgctctcctaccacacccacctttcccggcccaagccagcgcaccccgctgactccctgcccagtccaaactccaaggctgggcaaggcactgatccactgctggacagacccggggcagcctctgggtgaacagcagcgtgtccgccggcagcgaaccgagaccagcgagccgaccatgcggctgcacagacttcgtgcgcggctgagcgcggtggcctgtgggcttctgctgcttcttgtccggggccagggtgaggctccctcggaggggcgacagggaccgggctcagatctgccaaatgctgcggaggcagaacctgacagtgcgggagggcaggcgcctgggaggtaggagctggtggagatgacagcgtggaactcgtgagccccacgcaacgcctccccgccgcccaaggtgggctcctagaagcacagaaagggtcgggctgggggacaccacggcaaggaaccagcggagtacaggggccccaggagcgccgggacatgccaggccgggtaggcagcctggggtcggagtgggtgagggattggggtgtggggattcagtccatttccctcttatgattgtggctgtagcgggtgctgccggccggtaataacagtaatagcttctggcagcatctggctctcagtgtgtggcgtccttggccaggggggatgccctgagccctccaaaggggcctcagacaaggatagtggtccttggggaacagaagcccccaggcgccaaatcctaaagcagatctaagaggccacagtggctgggtgcgattggctcactcctttaatcccaccactttagaaggccaagggagagtatcgcttgtgcccaggagttggaggccagcctggacaacatagtgagactcggagtgtacaaaaaattgaaagaaattagtgggctgtggtggtctgtgacctgtagtcccagctacttgggaggctgaggtgggagatcactttagtaggggaggttgaggctgcagtgagccttcatcccactactgcactccagcctgggtgaaaaagcaaaaatctgtctccagaaacaagaaccaaagagctcgtggtgtccctcatgccatttacctcatcctgggcaagggcacaacttggcttccagggcaaaggtgaaggctctgtgtgcctgccaggcttctccaggcccttatcagaagctgggggagtgtttcggcctttggtcctctcacccgaaactctcctaagtgtatgatctgtctcttccaacccttccccaatttaatttgcgcaggtggagtccatactccccccgccccatggtgcactgctgcagggcttcctcccgtgcctgcccttgaccacattctagagttcaccaggagcccagcaggaagatctgcctggcctcacagatggctaccttttaaaatattttgggccaggcacagtggctcacacctgttatcccagcactttgagaggcagagatgggaggatcacttgaggctaggagttagagaccagcttgggcaacaagacttgtctctaccaaaaaaaaaaaaaaaaaaagtcaagcatggtggcagacagctgtactccaagctactcaggaggctgtggcgggaggatctcaagcccaggaggtggaggctgcagtgagctgttatcatattactgcattccagcctgggcaacagatggcgaccttgtctgacaaatatatatgtatacaaaattttgggttggacccacattcagaaaaaataattgacaagccataggagggtacaggtgatgtgtgccatcctctttttacccaaccagtcctggcttctcctcaggggccatcaaagtccccatggcccacactggaaactgcttgttgacaccgcagtacacacagtgcccagcagtttacacaagaatagatgtgtgcacttgtccttgattttcatctaaacagtcataaactcacccactttctggagccaggcttttctacagctgggactacaggcatgcaccaccacaccccgccaatttatttcctgatttttttgcagagacagagtcccactatggtccccaggccagtcactgtgctttttatatcccagccacagccatacttttctcttgcacctcttttcaccaacatcactcatggtttggatgatgctttctttacatgatttcttgccactttggacatgacatccctgaggacaagaaacttgcctgcccaattcccaccatcatcctactgtcacatgacctggcacacagttgaaggacactctagtcccatcaagggcatgtgaccctttgtttgaaggtcctagggctgaatgatgatgcctggccccaaggagcctcagcctggtgggatggagacaggcccaggaagccagagcgggaagggagtgttacaggcaggaagtttgtaaagcccatgtttacagatcagagtcccttgagctaagatgaggatggcaaggaagcagcaataccaacagttgggagggcagtcgattggtcaaacccaaccgtgatgtctgtctctctgcccacaggccaggactcagccagtcccatccggaccacacacacggggcaggtgctggggagtcttgtccatgtgaagggcgccaatgccggggtccaaaccttcctgggaattccatttgccaagccacctctaggtccgctgcgatttgcaccccctgagccccctgaatcttggagtggtgtgagggatggaaccacccatccggccatgtaagctctccaaggggtccagggaactccaggccctggggcaggggtgggggtgctctgagctcagctaggctgcagttatcatttcatctaaacccccacagccagttttccttctgagtttcgtggattcccacgtgcatttttccaatgagcatgctgaggctcaggagggcagaataacttctcagactcctggatcagggcttggcattcagaagacattggctccaggtgccgaagggaggggcagacacacgtatctccccagattctggttatgccaagctttctctgccaccagtggcaggtgtctctgggaaaggttcgggttggctctatgaaccttgtaggagcccctaactctagtggcagatgttgcaaatacctgaagagaacagtagtggtagctttctggggacctgcactctccacaggcactgtgtccactgacaggaccaggagccattggccaagagacatgtatatgtatatgtatatgtttccaactggaggccatgtaggaatgatgagtttttgagagtttagacttgggatgagagacatcccactgcccttctcatgagaaattaacatccattcactcatgtagcacacatatgtgggctactcccctgtcccaggccttacgggttacaggaatatagtggtgaatgtcaacacatgcagccaatggttctcatagaaacccctaagagtcaaggtttccggcagtgcgaggaatgatacccaaggtcctcagtaacctcgaggcctccctggaagtccaagctgcatcccagcttccccagagcctgtggcctgtaacttggtgggaagggatttttgagagggatcatgtgtgagcaggatattgtgggaagggtctgagggtggctgggagcacctctgaacccagggtctggttttggccacagcctggcccctggactgattatttgccctggttaccaggtgtctacaggacctcaccgcagtggagtcagagtttcttagccagttcaacatgaccttcccttccgactccatgtctgaggactgcctgtacctcagcatctacacgccggcccatagccatgaaggctctaacctgccggtgggtgtcaggccacagttcactgggggttggaggacagttcttctgcaagaagctgaaaaggacaatattagctcaggccctgcttcagagtggaccatgctgagaagcttctcactgtcaggtccaagaaatgctccttacccagactgggcagctggcccctggacatggggtcacagagttctggctgctcccagaggtcaaaggctgtggctctgggctggacccaggactcactcagccaactcatgccaggagatccacttaagtgccaaagggctgcaccttgaggtgaccaagaaccccagccatggataatctgttgggcctatagaatgggcacacacaaaaactttttttcttagagatggcatcatgctctgttgcccaggctaaaatgcagtggcatgaacatacctctctgtaacctcgaaatccgggatgatcctctcagattagcctcccgagtagctgggactactggcctattccaccatgcctggctcatttttaaaacattttctgttgaaacggggtctcactatgtggttcaggctaaggacatttttggttaatgttcatgtggagccatcagggagacaccccttttctttccactttggtgaattatctggggttaatgaacccaggctttgatacagggggttcgattgcaaagattgggaggcctggtcttcctgatagatcttgggtgcctaaccatttgcccatgtaatgaatttgtgctggagatctaatggggaggtagacagaggcaaagcactggttggtctaggtagtggccctggtggggtttgggctgggtgggagcatcatggtagctgccttgatttccccaggtgatggtgtggatccacggtggtgcgcttgtttttggcatggcttccttgtatgatggttccatgctggctgccttggagaacgtggtggtggtcatcatccagtaccgcctgggtgtcctgggcttcttcaggtgagactagggctgggctgggcaacccgggctgagcggggccaggacagccctgtgatccctgtccctgctacttctcagcactggagacaagcacgcaaccggcaactggggctacctggaccaagtggctgcactacgctgggtccagcagaatatcgcccactttggaggcaaccctgaccgtgtcaccatttttggcgagtctgcgggtggcacgagtgtgtcttcgcttgttgtgtcccccatatcccaaggactcttccacggagccatcatggagagtggcgtggccctcctgcccggcctcattgccagctcagctgatgtcatctccacggtgagtgccctcagctgaagaggcctaggcctgctccctcccctcatatccctcagagcctctgtctgttaaacggggatgacaagggccatcgggagcatgctccaggagctgctgcctaccgtggaattgctggggggctccagggtcagaattcacatccttctgccattgcagaggccgagcttgttctgtggctcctgtgcaaagttgtcaccctagggatccccaccatgaggagaatcatctaggcggatgggatggcccctgtgtctgggacttctgagttggaacagtgtcagaactgcaggaactcatacgaagtaccctctgagatttggggtacccctgttcttggccagggccttgggcaaactcctctcctctacctggaaggatgagccagcccctgcctggtccctttacaggtggtggccaacctgtctgcctgtgaccaagttgactctgaggccctggtgggctgcctgcggggcaagagtaaagaggagattcttgcaattaacaaggttggtctaaatggatgtgggtgtagaggaaggggtgcaataggcatggggctggcaggcctgcacggccgtcatattccctgggcacattacctcatctgcatgcctgagtgtcatagccctgggtcgggactgaaggtcggtgcatgctgagccaaacagtaatctcctggggtgggtatgagcatccagggataaactgggaaggagtggaaggtactcagagggcatcggaagatgtctgggacctgaccttgttccctgaccttacatttcccctcagcctttcaagatgatccccggagtggtggatggggtcttcctgcccaggcacccccaggagctgctggcctctgccgactttcagcctgtccctagcattgttggtgtcaacaacaatgaattcggctggctcatccccaaggtgagccccaacccaagcccacaagtgcctggggagcccatctggtagtggggggtgttcagggcttcatagctccaggctcatcccatccccagctacagactctctcctggccatccaggtcatgaggatctatgatacccagaaggaaatggacagagaggcctcccaggctgctctgcagaaaatgttaacgctgctggtaaggctcctggggtccctcgccaatggagacgggctcctctcctgtcctgagacagaggaaattcaacccccagatacccttcctatgtagtgacccccatgagcaaaggcctgggtgtgtgtgtttaggggtggggtcacctcagagcctcgcctttgctcccccttcctgtgccatccccaagcccgagaccacctcctccctgcccctggcatccagtctaacctgcctcttcctgatccacctggggtagatgttgcctcctacatttggtgacctgctgagggaggagtacattggggacaatggggatccccagaccctccaagcgcagttccaggagatgatggcggactccatgtttgtgatccctgcactccaagtagcacattttcagtgtgagtatatttggaccaaagcctggcgggcagggtacagctcagggctgtgggtcccaggtgagacctgctgctgtccgggtcagcactcatgtttattgggctccggggacacttgacatccatcattgcagtaaatcctcatggctagcccaagaatccgacatttcccccatttcacagacgagcaaattgaagttagggaccttcagtgacttgcccaagatgacacagcaaagaatcgcaagtcctttcctctattcctgccccagcctggggctccacaccccattgtccagattccagccagctttggacctaggtatcttatcaccatgggtgaggcaagaagtcttcagggggaggggccaccgtgtcatgggctgtccaccccacaggttcccgggcccctgtgtacttctacgagttccagcatcagcccagctggctcaagaacatcaggccaccgcacatgaaggcagaccatggtgatgagcttccttttgttttcagaagtttctttgggggcaactacagtgagtcttcttcctttcccgggaggtgggctgggattctggctgggtctctgagcgatgattgattgtcctcactgcccagataaggaaactgaggctcagagagaggatgagatcaggtgtccaaggttttatagctccaaaagctgcaccaggattagaattcacgactcttcagactgtgagctgtgctccctctgcctctccccagccatgggtgtctggcctggtgcagaacaggtgtttcagggacatgtttatttcttcagtgactcccagagatagaaggaagaaggggcctttggggccatgaaggagcccaggatggagtcagccagagcctggtctacagggaaagtttggaaaaggggagggctggcttctgagggcagtggaagaaaaagcggagaagcaggactggggaccgaggtctcgggggccaaggacgagctccacctgggatgctgaggttggacatcctgatgaagacacatgtcctcttcctcttggcagttaaattcactgaggaagaggagcagctaagcaggaagatgatgaagtactgggccaactttgcgagaaatgggtgagacagcacacccctgcctcaacctccccgattgggggacttgtgcccatccagtgctctcctagtctggggtgacctcatgagcacacccgcatccttcatcacatgatggccccttccccagctccgggacccactcagacagggtgggggtgcgtggggcagtggacacgctctatctctccagtctacctggagggtgggcgccagtgctgtgccaccgtcagggcctccctctcagagagagggacacaacagagctggctgccctcccccaacccccactggtgctgacactagccagagggagcttatttcctgtttctggaagcctccccactcattccccaagcccacctggcctgcttggctgccttgcctgaccagactcagggtgctcaggtctgggcttcgggggcccagagtgaccctcatactgccctgctgggatggcatgtctacaggaaccccaatggcgagggtctgccacactggccgctgttcgaccaggaggagcaatacctgcagctgaacctacagcctgcggtgggccgggctctgaaggcccacaggctccagttctggaagaaggcgctgccccaaaagatccaggagctcgaggagcctgaagagagacacacagagctgtagctccctgtgccggggaggagggggtgggttcgctgacaggcgagggtcagcctgctgtgcccacacacacccactaaggagaaagaagttgattccttcattcacttcgccattcattcatacttccgtccatccattcagaaagcatttattaagaatttactcaggcatgatggcccatacttgtaatcccagctattgggaaggatgagatgggaggatggcttgaggccagaggtttgagaccgaccagccagggcaacacagtgagaccccttctcaaaaaaaaaaaaaaaaaagagagagtgtgtgattagaagctaaataggaaagttttgagcttcaagtcagtgaggagtaaaaaagatttttaaaaagcaaagaaaacaaaatataagggaaaaatatgagaaaaataaaaataaaaagagaataataggccaggcactgtggctcatgcccctaatcccagcacttttgggaggtcaaggtgagcagaacacctgaggacaggagtttgagaccagcctgcccaacgtggtgaaaccccatctctatgaaaaatacaaaaatcagacgggcacagtggtggtgcccacctgtgatcccagctactcaggaggctgaggcaggagaattacttgaacctgggaggcagaggttgcagtgagctgagattgtgccactgtactccagcctgggcaacaagagcgagactccgtttccaaaaaaataagagagaatagaagaagctactgcatgatgttagttaccaagcctgccatgggtcctctcttgctagacacactccatagatccccccactgagctgtggatgggcaaaccccggtggaatcccaccctccccaacaccccactgagccctgggccccctcctcccttcctcacctccaccttctccctgccttctctcttctctcgtctgagcccccaggccttttccactttgagggaggtgcttcgaagaatgttgcccacacctaagtgttagaagcctatgtccgttcatccctgagaggtctgaaagaataaaaataaattctaaaaaaa

SEQ ID NO: 1154 - DNA, 134118 bp, Homo sapiens
agttctgcgcgttcacgtccccgatcgggccgtgtccgccgcggccctgcgaggtccgaggggtaagggagcgtgcagcgggggcgggaccacgaggcggcggggctgggggcggcctctgtgtctgcgccggggatcgcggtgaccccgctgcggaccggctcgcggtgaccccagcgcgaacgagctggctgccggctggggcgagaaaggcctgcggaccggcctgggcgcatgcgcggaaggcgggcctcaggcgggggctctgggggcgcgcgggggtgggaggcagagggtggggtgggggctgtagggcgggcggcggcggggcgctgaatgtgggtgtcgggggagatttggggtcagctgggcgattcactgggggcctatggaggtcgctgtagacttggggtgcagcacgggcggggcaaggggacgcgaggttgcccttggccccaggggagaggggcccctgggaggccgtgtggaggatttgtctgcagcgattaggactctgctgatgaatgatttggatgcctttgggtgagcattggaggccagcggggtgaatgatgaggcttctgcgggggcctgcgttggagggcttaggggcttgcttgtgtgggttccattcactggaaagcctgccggctgtgacagtgttggatttcaccagagccctgtgctcctggaaaacagcgaaggttgaggaatttcccacccttttgggttccagcaaatggctcactgcaaagatctcccgttccctatatgactttggtcagcctccaggatgccccttgttcacacagacctgccacgttgccgtcgcttgcctcatcggtgactggctgaactccaccgagcggtcggagcaaaatgctccttaagcaaactttagctaagcttctttcctttccccattttcttgagctttggcccatccccagcctgagccaacacgcagcctcgcctgagaacaggctggctcagggtcaagctttccccgctctgctgtctggtcgcccgcacttccacctcgcttggccaggcctggtctttgctaaccttgttcacacctctctgtgaaagaaaaaccctttttgccttgcagagatgcacgtgagtctcgtggcttcacggttcttcccagaagcccgttctccttccccttcccaaccctcttccgcgtctttttttccccacttccaataaccctttggaaccgtctttctttgctctgtccagttgtatgttttatttgacagctgaataacagtggttgctctttcaacccctgtctccaatagcggaggcgagtatggggtggcctatgctggcgagtggctggggtttgtttctgtgcttgtgtttggggatcttatgatggaagcattaggaatggcgctgtgtatttgtgacaagggagtctggatgtaagttaatggtggacctgttgcaagttgtgagtgcgtggacaacgggggtcatacttggcgtcattggaggggcctgcgggatcggcatttgtgcagagccccacaatccctttccaggtggtgtttgggagggcctgtgggaatgtcagtgaatgctccagcatggagtggattagagaatggggtgtcatgggggcgaatgcttgggggccccggggataagggattagggatccctgggcattgagtgactggggtctaatttagggggtctgtggcgcaagcctcagaatgtcagttacaggggaggggctctgtgagcgcctgacttgggcacctgatgaagtgagtgaatggagaccagtgtgttcgtcccaggacagaagccccttctcctcccctccccacccttctcctcccctccctacccttctcctcccccatccttctcatcccctccccacctcacctgcaggagtgactgaagccccttctcccccgctccccacccttctcctcccctccccagctcatctgcaggagtatctgagttctgtggggatcctttgggactcagagtttggggtttcagtctgtggtgattcttaagtggggctttgggggtgctggtgattatggtgtctggcatctgtatttaaaagccctgtgggagtcactgaggtccagtcatcagttgggcctgtagggataactctgcctggcctgtgaggtctatggtgtgacgtaggaatggtaagtgtctgggggcctgtggaggattaggaataaagggtccagtgtacatcgttgaatgggggacagttttattggctcgtgccctggcattggctttgttatttgagggtgttggaaccaggtgagaaggagcttgtttgtattagtgaccgggtaccagagatgactgaatgactgatggggtgggcagtgaggtctgtgaggaggaatgatcggagggcttgggatcaatgccaagtatgcgtgcaagtgtctgtgatgggtgtgcgggtgggtgagggtgagaaattggggaccctgtgggtgtcagtgagagggaagcctggggagcctaagagtttgtttgccatttgcggtgaatgtggagttagaagttagtggccttagctgggcaccgtggctcacacctgtaatcccagcactttgggaggctgaggcaggcagatcaggaggtcaagagatccacaccatcctggccaacatggtgaaaccccgtctctactaaaaatacaaaaattagctgggcatggtggtgggcgcctgtaatcccacctactcaggaggctgaggcaggagaattgcttgaacccaggaggcagaggttgcagtgaaccgagattttgccactgcactccagcctgatgacagagtgagactccatcttaaaaaagataataataagttagtggcctttgggtatctgtgattagtggtctatactgtgccagtctgtggagtctgtggtcaggtgtttctggaggctgttgtggggccactagagttaccgcctggggtctttgttggatggtcactggggaacccatagtgtgtgtctctgaaggccctggaggggcggcctcttggggagagagactgggtggcctgtgaagtcagccattgtggtcctgtgggagtgatgggggcacatggggtgagtgagagtggggttgatggggttcggtggttgtgtggtctggaggtctgtgaagcaggcctattggattcagtgatctggggatgtcttgggatgtggacctggagaattctcaggtggtcactgtgagtgactgggggacttgggatgctggaggttggcaggggcttggagctgcggagttcagtggtttgtgtctggggtgtgtgtgtgatggaggccctctctgggacttggtaatccggggaacttggcagggccgtgttggtgggtctggaagcagatccgaatgtgaatgggtcgtgggttggctcaggcaagcctctcgtgagtgacaggtctttttgccctttggccctctccttgtagcttgtgaccgctgatcagtgatcactctttttacgtgattatttccttttttaaaagttctcagtgaccccgttggccttaaggtcttctccttgtagaatttcccccttgctgtttgtacctcctaggcctcttccatccctcctgatgacctccggctcccccacccaagacctttgcatctgaggtgcctggagtggtgtggtcggcccagccttccgtggcggactgctcctgcttcaggctcagctaaaagccacctcctcccacaagcctctacgacgtctgggaggaatatcttctgcccattcatcccttggtcacagttaaaatttcctttttttttttttttttttgagacagagtcgcccatgcttgagtgcagtggcgtgatctcagctcactgcaacctccatctcctgggttccagtgattcttccgcctcaacgcccccagtagctgggattacaggtgcccgccaccatgcccggctaattttttgtatttttagtaaagatggggtttcaccatgttggccaggctggtctcgaactcctgacctcaagtgatctgcctaccgcctcagcctcccaaagtgctgggattacaggcgtgagccaccgcgcctggcccacagttaaaatttcttctgagcgctcacagtcagaaatcatttatttacttggctgtttccctagagggcagagacaccgtacatcttgttgagtggtctttcccgtgtgctcagaacagtgcctggtgtgtaataggaattcagcaaatgctgctttcgtagcgagtaaatgagactgtgtgtgtgtgatgtgtgtgaacgtgtgtgtatgtgatgtatgtacgtgtgtgggaatgtgtattgtgtgatgtacgtatgtgtttgaatgtgtgtgatgtgtgtatgagtgtgtatgtgtgtatgagtgtgagtatagtgtgtgatgtatgcgtgtatgtgtatgtgtggtgtatgtgtatgtgtgtgatgtgtgatgtacatgtgtatcaatgtgtgtgtacttgtctgtgtgatgtgtgttgtacatgtgtatgtgtcatgtatgtatcattgtgtgtgcatgtgtggtgtacgtgtatatctgagtttgtgcatgtctgtgtatgttatgtgggatgtacgtgtgcatcagtgtatctgtacgtgtctgtgatacgaacgtgtgtatctgtgtctgagtgtgtgcatgtctgtgtgtatggtatacgtgtgcatcagtgtgtgtatgtgtgtgtgtgacgtacgtgtacatcagtgtgtgtgtacgtgtgtgtgtatatgtgatgtatgtatgaatctgcgtgcatgtctgagtgtgtatatgtatgagatacgtatctgtgggtgtacgtgtctgtgagtgtgtgtgatgtacgtatctgtgtgtacgtatatgtgtgatgtacgtgtgtatctgtgtgtacgtgtctgtgtgtgtgatgtacgtgtgtatcagtgtgtgcatgtctgtgtacgtgtctgtgtgtacgtgtatctgtgtgtgatgtacatgtgcgtctgtatgtacgtgtctgagtgtatgtgtgatgtacatgtgtatcagtgtgtctgagtgtgtgtgcatgtctgtgtgtacgtctgtgtatacgttatgtaccagtgtgtgtgtatgcgtgatgtacttgtgtatcagtgtgtctgtacgtctgtgagtatgcgtgatgtacgtatcagtgtgtgtacatgtctgtgtatgatgtatctgtgtgtacatgtctgtgatgtacgtgttatcagtatgtctgtacatgtctgcgtgtgatgtacatgtgtatcagtgtgtctgagtgtgtgtgtgcatgtctatgtgtacgtgtctgtgtatacgttacgtgtgtatcagtatgtgtgtgcgtctgtgagtatgtgtgatgtatttgtatcagtgtgtctgtacatgtctgtatgtgtgatgttcgttatcagtgtgtgtacatgtctctgtgtatgatgtatcagtgtgtctgtgtgtacatgtctgtgatgtacgtgtgttatcagtatgtctgtacatgtctgtgtgatgtacatatctgtgagtgtgtgtgcatgtctgtgtgtactgtgtgtgtacctgtgtatctgtgtgtgtctgtgagtgtatgtgcgatgtactcagggtgtctgtgtatgcctgtctttgtgtgtgtgtacgtgtgcatcagtgtgtgtgcacgtctgtgtgtgatgtacgggtgtattagtgtgtctgagtgtgtgtgcgtctgtgtgtgtgcatgtctgcgcatgtctgtacgtgtgcgtctgtgtgtgcatgtctgtgtgtctgtatgtgcgtctgtgcacgtctgcacgtatgtgcgtgtctgtacgtgtgcatgtgtgtgcatccgtgagtgtgtgcgcatgtctgagtgtgcgtgtacttgtagatcagtgtgtgtggggtgagagtttcggtgtgaatgtgagagcagagggattaaatactcaggattctgaagggggaggccagggtggctgcttttggactcaggacgacaagatgttccctttgctggagaagcagccggaggaggtcccctctgcattcactcaaaaagggtccgaactaattcgaagcttccgggagggcagggggaccttgatctcagggaccccaggtttggatgccagtaactatggggtctctttgtagtcagggcttctctctgggcctcctagatggtagagcccccgacctctgtgccacaagcctgaaggagctcccaggcgtctcaggaggagctgcgtctttggatgccaatctctgggctcttccaggatgttttttctcgagaatctgcctcgagccgcaaacccttcacactgcggactagaaagagtcctcttagagcctctgacctttctctctacttcagctgcgaacgggcgaagcctgcgccatgcctctcctttcccgccatttctaggaattcctcctacctcagtgtccttgctctgccattcaccacggtttgggtcagaatccagagttcagccaatgcttccagagagactgtggctgttaactgtccctgttgacactgggacctgtctcccctcatgacctgagtcttaccttgattctcttaatgacggagagggagacattaagaacttgggagccaatgccaggcgcgagctacactggtctccgcctcctgctccctgcagatactgttggggaccagcctcaacaccacccgtagggtacccaaagtccggtggcgacaaaggaatgagaagagacaggttaagagtgcataaagagtgagggccagggggccaattgcaaatcggaggctgcaaaaggcgcagggttctggtctccactctattgattgagtaccatcacttacagctaagaagcagacgttcagggcgaaacagtgaaagggaggcagtgcgcccatcatacgtgtaatctatagcactggtggtttaaatgaatctcctttgtgctcaaacagcctatttttaacttatcggagagtagctagtgggagtgggcttaagtaggagcctgcacgtctggcttccagtgcttcaaaggagtgtccttctccttgaacacagtgtttatggatgatggagcaactcactcagagcctgggaacatcacggcgataagaaggctttcctcctcagaggcctcttgtggctttccacaacttcttgtcccatatttttatggccagttaatacaggcaccccataagcctttcccccaacagataccaagcaggcgtgagctacactggtctctgcctcctgctccctgcaggtgccaggcgtgagctacgctgatgtctgcttccgcaggtgccaggcgtgagctacactggtccccgcctcctgggccctgcaggtgtggctgctgctggctgtgcaccgtggggttcctgagcgtggggtcacctgggaacgacccttgtctaattctccaatcctcagcctctggggtacgtgggagaccgcgcagaggagtggcgtctggctgtactctttttttcagttgccctgaggcaaaacccggccatttgctaatatccagtcctaactttcctccctcatttgaggcaggggagcggagacttcagtcattgcttactctatttctgtgggacagtgaagacacacaaagacgagaaaagggctcttgctgtaggtcttctcgctcagtttacctcactttctggaaaggtgccactggcctcgtgccacttgttatcttcctggctagccggttagccccttgcctgtggggcccttgccgtgtgcttgggagtcacctgcttcagccctgggagcttcagagctgctcgacaaccattcctaggccacgtggcctcgctccacaggtgtagatggcaagtgctggacaaacgttgcttggcaggattgctacgtgaggtagaatttccgtccctcttgtctcccaagtttacaggaagctttttttggacatttcttttcagactcattctgatgaaggaaagagcgtccctgtgcagctgcgtgtccttcagttctttggctctgattccgtgtctggcttcatctaagtggcctggtccatgggcagtgaagaaatgtaaagtgtgagcattcgtgtgtaccaggatgtggtgctttttgagttcattatgcttattttaaatcttggtcagtcttttccatcttctgcctaagatggtatcttttgtgcagtttgtggtctttgaaaaagttttaaaagtttttaaaactggaaaagataccgcctgcactttccttcagaaatcagcagtaacagcccaggctgttggtttccaaggggtacctgaggcagaccccagtccctgtggaactgaggaatcatggaggggttaagggctccaaaagtttggaggtggaggttgcagtgagccgagatcacgccactgcactccagccctggcaacaagagcgaaactccacctcaaaaaaaaaaaaaacttttgaaaaagttttaaagatgatggttatacttagttacctgattatttggcctgattatttggggaaataaacctaaaatctgccaacccagaagacctcttcacaaaagtagaaaataaagaaaaataattttattattgaataaaaattaaacgaggccagacacaatggctcacacctgtagtcccagcactttggaaggccaaggccagtggatcacttgagcccaggagttcaaggccaacctgggcaataaggcaaaaccccgtctctacaaaaaatacaaaaattagctggggatggtggcgtacacctatagtcccagctactcaggaggctgttgtgggagaattcacctgagcccaggaaggttgaggctacggtgagccaagatcatgccactgcactccagcctgggtgacagagcaagaccctgtctcaaagaaaaaaatgtggccgggcgtggtggctcacacctgtaatcccagcactttgggaggctgaggtgggcggatcacctgaggtcaggagttcgagactagcctggccaatatggtgaaaccccgactctactaaaaatacaaaaaaattggccaggcgtgatggtgggcacttgtaatcccagctacttgggagtctgaggcagaagaatcgcttgaacccaggaggcggaggttgcagtaagccgagatcatgccattgcactccagcctgggctacaacagcgaaactctgcctcaaaaaaaaaaccaaaaaaaaacaagggggtgaatctctttctgtattttgcatgagggaaaattagggattttttcctccttttaaatctatatttgcccttccaggcctgtgagcacacattcccctcggggtgtcagctgctcccccacgtggtctggagatgcgcgtgagggaagggctgaaggccaggctttagtctctgaagcttctgatgagttgaagcagaggggcgctcaggggcccaggacagagggtagacctgggaattgtgccccctcttccagctgtgagctgcccccactctgggcagcttgtgagttgccactcccgcaactcccagccctgggatgctggaggcaggaggtcagaaaatacccaaagaacagcagcagcctttacccctccatgattcctcagttccacagggactggggtctgcctcaggtaccccttggaaaccggcagctgggctgttactgctgatttctgaaggaaagtgcaggcagtatctgttccggtgtgaactggggaagaggcaacataagacattccctgccttgtgtcttgctgcgccctctggctcccatctgctgtaggctgcagccaggccctgctcagcctcagacccacgcctcagctccaccccagcctgcgtctgcccaggggtgtctgtttttctttttttactcttacattagttcctctgatctatgttttccttttgttcctgggctgatccatctccgtctaaagtccattttctgtttaccaccctgcctagaagtaagttggtgttttactctgtagcacttaacacaagtaatttgatttaggtgcctccaggaagtattgctgccaaatggataagtcctcatggcatttccagagcttcatgatgtctgtgctgagcagtctagggtagtggtgctcctctggaggtgtctgcttgaaccagccaggggagtggtttccatctggcatttatgggtggagccggggctgttcagttccgtgcgtactgcagacctggcctagatgcaggtcagacccgacggagacgtgctagtagctcacattccaccctgcttcccgcccgctagccctggtgtgagcctacccaacatctagttcgagactttaaataatctgagctcccagcaagagaacaccaagatttaggttcccaaattaattagatcatctaaaataaaatgtccactgcatccacaggcaatagccctctggaacaagacaattcatgtgagataagaaagaagagcccacaagaccaaggatgtattctcagtttacagaccactgaccagaggccactccagggtgtcaggactaagagaagtcacaaaacagcagatttcccaagagcagcggaaaatgatccagtcacaggtgggttatcggtttatcctctgtttcatgaaaatgatccagtcacaggtgggttatcggtttatcctctgtttcatgaaaatgatccagtcacaggtgggttatcggtttatcctctgtttcatgaaaatgatccagtcacaggtgggttatcggtttatcctctgtttcatgaaaatgatccagtcacaggtgggttatcggtttatcctctgttttgtgggtgttatgaggcttacagaaatctctgcaacacacagaagggtctaaatacatttaaataagagaaaatataaacttgggaaagaagatgtccaaagaagcacaaagtagattatagaaacatacaaaagtctcagctgggcatggtggctcatgcctgtaatcccagccctttgggaggccgaggagggcagatcatttgaggtcaggagtttgagaccagcctggccaacatggcaaaaccccgtctctactgaaaatacaaaaattagcctcccagctactcgggaggctgaggcatgagaatcacttgaacccaggagatggaggttgcagtgagctgagatcgcatcagtgcactccagccagggtgacagagtgagaaaaagaatcatacaaaagtcttaaagttggaagagatcaataagaaatgggatccttccctgttacagagttgaactgcaagcttttctgttatttccagaagccataacagaaagggaagtaggaatagttaacgtgggttcctcttgtcaaaaggaaaaagcagacaaattactctggagaagcaaatacttccgataattacacataaagaaaatgttttgataattattcatatacatggcatagtggtaagatcctaaatagcagccttgtaataaacaaacaggtttcctaggactatttcttggagctcctcaatgtcagctaagggcatgaatcgaaagaattcagaacacagtttcttcgaggactgagatggggtcttggttgcacatcctacctagattccagttttaggaaagaaacttaaatcacctggcagaattgatcattacgaaaccttcaaatggtccccataagtatgctctccactggaatgttgatgtgttttggatggaaatgccgctcctgttggcagaggcttgacatgcagggatctgcgttcagctctgtttccatactttgttgactcaagaaacagactgtggtgtcccctcacctttcggaggaattcttaccacctagtcagcctctcccctctcaccctttccctgcctttcctttcttcctgatattttctttttttgatgttcagtcctacgccaggagtggcaccactgcactccagcctgggtgacggagcaagacgccgtctcaaaaaaaaaaaagtaaaggaataaaggatagctactccataggcagagcagggcattccggaaagcaggaggaggaaggcgcccaccctaggtacaaggcttgttgacatgtaggacaacaacaatgacagtcacagggagatgtgctcagccacaagggtttgtgataaaggattgattttcttaatatattttataagaatcaatattattatctttaaagcaaaattagaaacggttttgttctcaagacatggggacatcaggacgttcctgggcatgggcctgtttagtaaacattattaatctgttcccttaaccgtaaacatctagaggccaggaatacctcacctcccggcaatgctgtccagcaagctccagcctcattttccctcgccctcactcaagatggagtcgctttggttctaatgcttctgacaaagagccagttgcatcagtgcagatgtggggattgtctctttgccctcagccgagggagccctgaacaaaaaactccagcaatttttttggaccctggggtagggagggaggggctgggagtagaaaagtaccaggtactgagtcaaagtggggaaaagtgtcttcagggttctcccccaccccaacgaggaggtcttgcattagcacctgagaaaggcctcaggagactggagtgcaggtgcctgggtaagaagggcaaatgtgtgagatcacgacccctgactgcagctcccctcaaagaccagagtgtgctggccgtgcaccaagtctcttgggagggcagttttcccctgaggcctgctgggtaaagccttggtaattgcctgtgcttacacctgaacatgcactacaggttttttttgttttttttttttttgagatggagtctcgctctgtcgcctagactggagtgcagtggcacaatctctgctcactgcaagctccgcctcccgggttcacaccattctcctgcctcagcctcccgagtagctgggactacaggcggtaccacacccagctaatttttttgtatttttagtagagacgaggtttcactgtgttagccaggatggtctcaatttcctgaccttgggatccacccacctcagtctcccaaagtgcggggattacagacgtgagccaccgtgcccggccgcactacaggtatttaaccaggagctgaactccttgactccactccttgattttttaggacctaagtgtgaaacaggctacctcatcatggaccccaataggtcagactttgacgggccgtgacaataaccaggtaaatcgtctgaggcaacagcagaccatggctatgacgccactccaagcaggatggtcgggcccggaggactgaacatggcctcagcagtcacctcggcagttgccatgccaggaaagacgccccacagcccactggagagacagaagaatctgtgtgaatcttctttacctggcctgaggcatcaattcaggcacagcagaacactggccaggaaactgaacgtgacctgaatgtcttccaggctgagacaggtcctgagtgcaatcccagagggcacacgtggtcccctagaaacaacgaattcacaaggtcaggtgccccagccgggcacgcacgcctcaggttgtgaggttaacagggatccaaggtggcttcccatcgtcgggcctctgtccagtctggatcattgggtttaggccttgacttcagagggcctgcctgggactgagttccaaaccattctgtttatccatgacatgagtttgttagtcccaccttatcaagtgtggacagtctctggaggagttctgcacagagcccaggagccaaggcagtcctctgcctctcctcgtcagcaccgtgaggaagccgaggtgtgggctcagcagacggtccaagtccacagccgccacagtccatggaaaggcagcaagaggacctcttgtgtttggttttttaggaggaggagaaagcttttaggagcaggtctgaaaaataaagatcattattattttttccctttccctgagcctcccagatgccagttttgttttgtttttctgttacctgtgtgtcccatgtagtaatcaaaacttaagaacaaaatgtctcctgttttcattcatacgtgctgtctggaaaggttgtatacaagagggacaaaatatttttacataaccaaaaagataaatcatgtttaagaattgttgagcacaaaatcctgaacttttaaaaggtttaaaaataggtttacatatctcccgtctatttgaggcttcagaaaggggatgaaagggccttgcaccgtgccccgtggagtctgaggtgtctgtaactggagaagaagagtgcgtgatggagggcagcctggagaagaaggacgcgtgatggagggcagcctcgagaaggagcgtgacagagggcagcctggaaaagggcgcgtgacggagggcagcccggagaagagggacgcgtgacggagggcagcctggaggtacccgtgggaagtgccctgcggggaacggctgcgtgaggcctgaggtcgcttgcctgagctgcgtagtccaggctgcggttatctcgtcccctcccagcagccaccgaagctgtccgttacaacagtcagttaccctgttgctcgtgagcgatacggttcctcagacgccccatgattgggcctattgatgtgtagtttggactggggctgttctcagaagcactgcgctcaggaaacctgaacgggaagcagatctggtcatgtcgggcctggatagtgtggcccaagtcagtggaatgtgtggggttggctgggccaaaccacaaggaaacagcgaaacattgatctacctgccgagaatgtcatggccgattgacctggcaatctacctttgggcgctgctagccttgaccagagtctggaaagcaggacagctgtttcccgtggttcaccgtcttctgagagcagaagcagcacacgcggaggctcggtctaggccatgtctgcatctctgtgggacgtttctcatggctccatgaggcggtcagtcacatatctgcttgctccggagtggaagacatcttagtctgcatttagcaagcgcagttgggtggttgtgtttcctgggtcagcactggagtctttttggtgagcacccgtatgggtaacaaaatgcttcttaggagcagaactgatttttatctaaatgtctcatcctcaggaacagaaaaccaaatgttctctgttcttatttataagtgggagcaaaacactgggtacacgtggacacgaagatggggccagtagacacaggggacctcaaacgtggggagggagggagggaagagggaagcctgttgggttctgtgctcaccacctgggcgacaggatcagtcgtaccccaaacctcagcattacgcagtaaacccacaaaacaaacctgcacatggacttgtggatctaaagaaaaagttgaaattattttttttttaaaaagtcctgtctccaccaggaaccttgttttacctgccagtctgaggctggccggcggcctgatccaatggccagggaactagccatagcctgagtcgggtggattcagtcttcctatgctgctctgtaacggccctaactgcagcagttcccatcagggactggggcaaaggctagcaggggtgtacatagatgggacatcagcatcaacaatacactcaggaccggggaccacatcatagtcctgtagcatccacagtacgttggctgtacaccacgtccgttgtggggagggcagttttcctccatgaggcccacagggtaaagccttggtgattgtttatgtttgtgcctgaaatttcgcacagacctttttaaccaggagccagcttcctcagaggagttttaaaacacgtccaagttcatgtcatcaacatcacagtcgggacagagcggctccgtcaccacacaggaagtctgtgaggcccctctgtggctgtgcatcccttatccctggccgccactatctgttctctgtcactacagctttgccttttccagaatgtcctataaatggaatcatgtcggctaggcacagtggctcacacctgtaatcccagtgtgtccagaatgggtgggttcttggtctcactgacttcaagaatgaagccgcggaccctcgcggtgagtgttacagctcttcgggtggcgcgtctggagtctgtcccttctgatgttcagctgtgttcggagtttcttccttctggtgggttcgtggtctcgctggctcaggagtgaagctgcagaccttcgcggtgagtgttacagctcttaaggtagtgcgtctggagtgttcgttcctcccggtgggctcgtggtctcgctggctcaggagtgaagctgcagatcttcgcggtgagtgttacagctcataaaagcagcgtggacccaaagagtgagcagtagcaagatttattgcaaagagcgaaagaacaaagcctgcacagtgtggaagaggacccgagcgggttgccactgctggctcgggcagcctgcttttattctcctatctggccccacccacatcctgctgattggtagagccgagtggcctgttttgtcagggcgctgattggtgcgtttacaatccctgagctagatacaaaggttctccacgtccccatcagattagttagatacagagtttccacacacaggttctccaaggccccaccagagcagctagatacagagtgtcaattggtgcattcacaaaccttgagcaaaacacagggtgctgattggtgtgtttacaaaccttgagctagatacagagtgccgattggtgtatttacaatccttgagctagacataaaggttctccatgtcctcaccagcagctagatacagagtgttgattggtgcactcacaaaccttgagctaaacacagggtgctgattggtgtatttacaatccctgagctagatataaagactctccacgtccccaccagactcaggagcccagctggcttcacctagtggatcccgcaccggggctgcaggtggagctgcctgccagtcctgcgctgtgcgctcgcattcctcagcccttgggtggtcgatgggactgggcgccgtggagcagggggtggtgctcgtcagggaggctggggccgcatgggagcccatggagtgggtgggaggctcaggcatggtgggctgcaggtgcccagccctgccccgcggggaggcagctaaggctcggtgagaaatcgagcgcagcgccggtgggccagcactgctgggggacccagtacaccctccgcagccactggcccgggtgctaagtcccccattgcccggggccagcagggctggctggctgctccgagtgcggcgcccaccaagcccacgcccacccggaactccagctggcccgcaagcgccgcacacagccccggttcccgctcgtgcctctccctccacacctccctgcaagctgagggagtgggctccagccttggccagcccagaaaggggctcccacagtgcagtgggggactgaagggctcctcaaatgccaccaaagtgggagcccaggcaggggaggtgccgagaacaagcgagggctctgaggactgccagcacgctgtcacctctcaccagcacttcgggaggctgaggcgggcaaatcacctgaggtcgggagttcgagaccagcctgaccaacatgtagaaaccccgtcactactaaaaatacaaaaattagcagggtgtggtggcgtgtgcctgtaatcccagctactcgggaggctgaggcaggagaatcgctagaacccaggaggcagaggttgcagtgagtcgagatcgtgccacttcaccccagcctgggcaacagagtgagattctgtctcaaaaaaataaaaaataaaaataaaaaaataaatgggatcggcctggcacagtggctcttgcctgtaatcccagcactttgggaggccgaggcaggtggatcacaaggtcaggagattgagatcatccaggctaacagggtgaaaccccgtctctactaaaaatacaaaaagttagccgggcgtagtggcaggcgcctgtagtcccagctacttgggaggctgaggcaggagaatggcgtgaacccaggaggcggggcttgccatgagccgagatcgcgccactgcactccagcctgggcgacagagcgagactccctctcaaataaataataaataaataaataaatgggatcacatatgtgaccttttgacagtggcttttctcacttagcatacctttgagattcattcatatcttatcggtagtttcttcctttttcttggcgtgtgattcccttgaatatgatcccatgtatggatgggccacagtctctatccattcacttattgaaggacatcttaattgttccactttttagcagttttgaataaagcattcatctgcatataggtttgaatataaattttcaggtgaatgtaagttttcagttcactacttgagtaaacacctaggagtggaattgctgcgttgtgtggtaagtctgtgttcaactttataagaaactgccaaaatgttttcaaaagctgctgtacattttacattcccaccacaatgaatgacagttgctcttgctctgagtcctcacagatatttgtcaggggtgtgtgtgtgtgtgtgtgtctgtgtgtgtgtgtgtttagttttagccttctaataagtacatagtagtttttcattatagttttaatttgcattcaccttttgacagatatattgaacatcttttcatatatttactttccatccatacattttctttttttttttttttttttttgagacagagtttcattcttgtcgcccaggctggagtgcaatggcaccatctcggctcactgcaacctctgcctcctgggttcaagcaattatcctcccttagccttcccagtaggtaggattacaggtgcgtgtcaccatgcctggctaatttttgtatttttagtagaaatggggtttcaccatgttggccaggctggtcttgaactcctgacctcaggtgatccgcctgcctcggcctcccaaaatgctgggattacaggcgtgagccaccgcgcccagccaccttccatatattttctttggtgaaatgtcaagatatcttgttaatttttaaaatgaggttattttcttagtaagagttctttatatcctggatatgagtgctttagcaagtatgtaatttgcaaataattttctcttagtctgtgccgtgccttctctttctcttaacattgtctttcacagagcaaaagttcttaattttgaaaaagtccaatttatcaaatttttttcttaaattgatcaggcttttggtgttgtatctaactcattgccaaacccaaagtcacacaggttttctttggttttcttctaaaagttttatagttttttatgtttaggtctgtgatccattttgagttagttttgatataaggtgtgaggtatgtgttgagatcccttttgcttatgagtataaaattgttgagacattatttgtcacaaagactgtagaattgctttttgtacttttgtgaaacaattgagtatatttgtaggggcttatttttgagttctgtgttctgttccattaacttgtgtttttatcctttcacaaatgccatcctgccttaattactgtggttgcataggaagtcttgaaatcaagtaatgtgagtccttttatgtttaaactattttgaatataaatgtgcctctttcgtaggcagcatgtagctggggttgctttatattttccatttctgagcttttgctttattatttcttctggtctatcttccaattcacttattctctctttatcttttcctaatctactcttaagcccttccattgacttcttaactttacttattatgcattttatctctagaagttatatttcatttttttcaaatctgcttattcatttttatagtcttctgattatttttcgtactttcattaacctctcatttctttgaatatattaaatatatttattttatattctgtgctgacagttcaaatatcctaagtcttttataccactcctgtttgtttttttttggttttttttgagatggagtcttgctctgtcgcccaggctggagtgcagtagcgccatctcggctcactgcaagctccacctcctgggttcacgccattctcctgcctcagcctcccgagtagctgggactacaggcacccaccaccacgcccggctaatttttttttttttttttttaagacagagtctcactctgtcacccaggctggagtccagtggtacgatctctgctcattgcaacctccgcctcccgggttcacgccattctcctgcctcagcctcccgagtagctgggactacaggcgcccaccaccatgcccggctaatttttttgtatttttagtagagatggggtttcaccatgttagccaggatggtctcgatctccttacctcgtgatccacctgcctcggcctcccaaagtgctggggttacaggcgtgagccaccgcacctggatgattttttttttatgtgtgcattccggtttctcttttactctgtactcatttttcttgaatctttatttgtgagaattattttgatctctttctctaaatagaatttgcatttgattctgccggatgcctgaatgcatggccccctcaaaaacactttagaactctctgtgcttaaggtttttgcaaaacacatctatactggagttgagcccacacacccatataaatccagcttgttataattctcagggacaatttttgacctctttgtgtaacactaacatttgaggcaagaaattgattttctttgatttttttttcattgacccacacacggagtactccttgtgttccagctttatgagggaaaataacctattagtcccctatgcttgggcttattctaagctttcctcctttttcctgtgtcccttgtagctgctgggactggaatgctcaaatttacttgagtccagctgaaggctggcctctgcttacctctctaggtttccacgttcccttttaaagaggccaggaccattcccaccgctcccactccctctcttatattcctgaactttcatccctcagaaaacacactttatttccatgtctttgctcatgctgctgccttgagagtgtccttttcctcatccccctctgtaaccaggactttctaaagaccctttctaagccttactgtctttacagcacctaacccagtgttgttaaatccagtgtttttatccccgttttgtctctatattctgtaaatgctagcttcatagccctgtaaccttattcactctggcctgaaaggtacttgagaatgtgatttttttctactcatttttaaatttctagtacctgttatggttcctggaatctttttttttttttttttttagacggaatcttgctctgtcaccaggctggagtgcagcggcacaatctcagctcactgcaacctctaccttctgggttcaagctattctcctgtctcagcctcccgagtagctgggattacaggcacacaccaccacacttggctaatttttgtatttttggtagagatggggttttacagtgctggccaggctggtctccaactcctgacctcaggtgatccacctgccttggcctcccaaagtgctgagatttcaggtgtgagccaccacacccagatggttcctggaatcttaattgctcaatatgtgtgttttggaagatacctaaaatagctggccagttcttacttgggagcagaatcactcccagaggaaagagagtgtttttgtttttgttgttgtttatttatttatttatttatttgagacagagtcttgctctgttgcccaggctgcatgcaggtgcacgatcttggctcactgcaacctccacctcccaggttcaagtgattctcctgcctcagcctccctggtagctgggattgcaggtgcccaccaccacccccagctaatttgtgtgtgtgtgcatgtgtgtgtgtgtgtgtttaatagagttggggtttcaccatgttggccaggctggtcttgaattcctgacctcaggtgatccgcccacctcagcctcccaaagtgctgggattacaggcataagccaccgtgcccagccagtgactgagagatattactgtcattagcagacagaggccaggcatgctgaagggctcaactgcatggaacagtattccttacctaagaatggttctcaaatactagtggcaccttctttgagaaccactgtattgtttaaagacaacctattctggtttcttgttcagtggataggtacatggatgaatgaattcacaatgataaatatttttaaaacattccttcctcaaggcataatgcaagattattatatttattatattagattatattggttattcattattgtgtcacaaattaccccaaacctcaagggctgaaaacaacaaacattgatctgtttctgggttttggaatctgccaggtacttgcccagttggttctggttgagggtctcacatgatgcagtgatgaaggtgttgagaagggctgcagcgaggaaggagctggctcctccaggctcactcagtggctgttgggaagcctcagttccacggcacatgagcttccacatggcggccttacaacacagcagccagactcctccagagagagagagtgcccaggatagaagttgcatttctttctaacctagtcttggaagtggcatctcatcatgtttccctgttctgttcaggacaatgagtcagtgagtccagcccacggtcaagaggggaggattatgcaaaagcatgaataccggagtcagaggtcactggggccatcttagaggccacctaccacaaatacagaagaaagtattttacaagaccaaatgagaaccacttcaggtttaacagggattatgcttttccagatatcatttgaggatgtggctgtggatttcacgctggaggaatggcagctacttaatcctactcagaagaacttgtacagagatgtgatgttggagaactatagcaatctggttttcttgggtaagaacattcttatgtaacttagtgtatggccagtaactggcctgtgaggtgtttgtttattttggatgtaagttttacatgtcaaagattatttgacttttatactgaattgaaagattttcattcacttgctttattttgcagcctttataataaaacattctacatatttaagactcttagcccaggcagttaggtccaagtcctctgtgtttccaatcgacaggttttcaaattctcaaacctgatgcaatgttcaaactggaacaacaagatccatggataataggtcaagaaatcctaaatcagaacttttcaggtgaggaataatcaggtttatgagatacagtgaacattttatctcaggtttttgatgacaggtgggcacttttaaagtgttgtttataaaactgtgtttaaagttcctgaatctttagagttgactcaagattggtgacatgagttttaatggatgtgctccataacctggtctccacatcgggatgtgtcttttctccatggagtttatgatgaaatgtatccctcttattcagtggcatagattggtggccatttacaaccccactttcttagttaaggctctctttatgaattcataatttttttcttcttttagataacactgattgcctttgagtttatttaaacttcaaacttttaatttattatttttcttctcttcctctaatttgatatatttctattttaaaaccacagagagtagaagatgaacccactgatacagagtgaaaatctaggctgggcgcagtagctcatactgtaatcctcatgctgtggaggttggggagagggcagggcacgacagtcacttaaggccaggagtttgagaccaacctgggcaacaaagcaagaccccatatctactactactaataatacctaacaataataataataattcagccaaatatggtggtgtgcacctctagtgccagctacctgggaggctgaggtgggaggattgcttgacccaaggagctggaagctgcagtgtgccatggatgtgctaggcaacagagtgagaccctgtctctaaaaacaaaaacacacacacacaaaaccctaataccttaaacatagtaaggagattttgcttcttaccttcctctgtacaaactaaggattttcaagtcagttcccagtgcatctttctggtacatttgatgtttaacttctctaaagcttctctctcataccatcacatagtcaggtgggtttaagtctccattacctgctgtgtgatatttaatctccgtttttgttgaagaatctcatggtatgggaacatcttatctctccacttatttttctatgctcaagagtcattattaactccatttgagctagatttgtgctcaagagtcattattaactccatctgagctagattcttcctcacacgctcttctgaaatttttctctgcatctgtacctctgattatggtacattttccccaggtagacttcactttgagctcttttcttcaacttcagtgaatgttccttgactcacagctttctctgaaatctctatccacgtagcatctatagtatagtaactcaggcctgatggacattatctgaaattcctaaaacaactagtcctaagatttttttccccataaagagagattgccagtaacgtagtctgtgttctctgtggaatttgtggtatgcacttacttgatttttaaaaattggttattatggacccagataaggaaaggtcttgtttatcagatgtcccttcagtagaaaagtttccatctaagcctctaccctgggaaatatttatttaaaaaatttttttgagacaaggtctcactttgtcacgcaggttggagtacagtggcgcagtcacagcttactgcagccttaacctatctggactcatgagctcctcccactttagcctccccagtagctgagactaccaccacaccaagctaatttttaaaaatttggtttttctggagagacaggatctcactatgttgcccaggctggtctcaaactctgggttcaagtgatcctcccgccttggcctccccaagtgctgggattacaggaagagccataatgcacagcagggaaactgagattacaggggtgaggcataatgcacagcagggaaatatttcgggttacagatgtctgggcaccattcccattgttgtttaggtctgagtgtgtgcagtttggaaaagctgtaaagatagttgttatattcccctattaatttagaaccacttctcatgtggaatgagaggaattgaaatgagtcatgaaataactttataggattttaatttagaagacaatataaaaccataaaatatttagtgatgcagtatttgaacatgaagcatttgtgttaaagtgcaaaattaattgccaagattaatgataccaaaaggaactatattagaagctcaatgacaagtgaataatatttatcctacctatattgagggcttgttatgtgctatgcagtgggggtacattagtgaaaaagacaaacctgttccctacactcatacagtttacattctactgggagagacacgagtaagaggattacctatttgataagtactatgaaggaaagaaataaagagggtatttgttggtgtgccatcagaatgacattttggtgggcgtgacatggtggctcatgcctgtaatcccagtgctttgggaggccaagacaggagtattgcttgaggctgggagttgcaggcccgcctgggcaacatagcaagaccccatctctacaagaaggatattaaaaattagccaggtatgctggcacacacctacagtctcagctacttgtgtgattgaggcagaaggatcacttgagcctgggagtttgcagctgcagtgaggtatgaccctacctcgtcactccttgggcgacacagtgatatcctgtctctaaaaaatcaccaaatactacttttaagcctgtacataaactactttattattgtttatcatttaatccattaatttggatagacatatttatttatttatttattttgagacggagtctcgctctgttggcacgctggagtgcagtggcacgatctcagctcactacaacctccgactcccgggttcaagcgattctcctgcctcagcctcccaagtatctgggattacaggcgcacaccaccacgcccagctatttgttgtatttttagtagaaatggggtttcaccatgttggccaggctggtctcgatcccttgacctcgtgatctgcctgcctcggcctcccaaagtgctgggattacagacgtgagccaccgcacccggcctggatagacatatttttaatctcatcttgatttgattttaatttaaaagtattgtttttcttttttcccacatcttataaaacaattttctgtaaactcttcaagtggatctcacacttgtctacatatgactcttgcttttgatcttcaaacttctttgcatagtctttttcatctcaatgaatagtattatcatctttgtttatgcccgaaacactgagtctttctttaattttccatatcagcagttgtgcttcctctgaaattctattttctttttgagatggggtctcactcagtcacgcaggctgacgtgtagtgggctcactctcatctcacacaacctcctcccacctcagcctcccaagtagctgggactacaggtgtgcaccaccacacctggctaatttttgtatttgggtagagatggggtttcaccatgttggccaggctggtcttgaactcctggggtcaagtgatccacccacctcagccccctgaagtgctgggattccaggcatcagtcaccgcagccagcctgcttcatctgaaattctgatatctgagaattagatgaggctttttcccccctagaaaagagtagtttttggggtttttttgttttgttttgttttgttttgttttgtttttgagcctgtgtctcactctgtctcctaggctggagtgcagtgatagttatgggtcactgcaacctcaacctctcaggctctagtgatccaccccctctgcctcacaagtagctgggacttcacgtgtgcaccaccacacatggctaattttagaaaaaaaaaatttgaagagacagtttctccatatgttgcccaggctagtctcaaactcctgggctcaagcagtcctcccacctcagcctcccaaagtgctgggattgttgttgtgagctgccaccaggcccagcctcgttttatatttgagaccatgccagatcttttcatctcgcagagtacttcctgagaatattaccccacaattgctagtaaataatatcatcaaaaagtcaagtaaataaacctttaaaatatgcaataaatggtcttgtagaaatcacaaacaattgtacttattggatgaaaatatctgttctactattataaaaaaattattgtggttaggagtaatttccagtgatagcattacatatacataaaatatatactttacagatccaattaaaggaggatgaatgtgaagaagttgaataaaagtgttgatactgagctctggagaactcttggataattccaagaggaagttttactgatgatggtgaagttattgatatcagtgatttaagtaatgatcccgaataagaatattttataaatgcaataatagtacaaaaaaatgtttcttatctttcaggtgtaaagttgatattgtacatttattctgcattatatcccttactttttctattataccattcaacaatatatactaatgttgcatttttatgtttttattattcacattcttaactatattacctcacttcttctctgatcttctgatactaagttctggacacatagtagataatcatagattattgtcaaaaaagtaaactaatcacttcagtatttgattggaaattgctccaggctctttcatctcatgatcactgttctttgagtatatttaatatttccttatttaaaagttcatgtatttagccaggcgtggtggctcacgcctgtaatcccagcactttgggaggccgaggcaggtggatcatgaggtcaggagatcaagaccatcctggctaacgtggtgaaaccccatctctactaaaaatacaaaaattagccaagtgtgatggcgcacacctgtagtctcagctactcaggaggctgaggcaggagaatcgcttgaacccgggaggtggaggttgtggtgagctgagatcgcaccactgcactccagcgtggtgacagagtgagactccctctaaaaaaaaaataaggctgggcgcagtggctcacacctgtaatcccagcactttgggaggctgaggcgggtggatcacgaggtcaagagatcgagaccatcctggctaacacggtgaaaccccgtctctattaaaaatacaaaaagtagccgggtgtggtggcacatgcctgtaatcccagctactcaggaggctgaggcaggagaattgcttgaacctgggaggcagaggttgcactgagccaagatcatgccactgcactccagcctggtgacagcacgagactccatctcaaaaaaatatatataaacagtaaaaataaaagttcatgtatttaaacatttgtaatttaaaagttcattttcatttctgttaaaattgtcaatgcccaataagtacacattatttgagggaattttaaaaactgggattatggcgccatttcagaagctttatgcaataagcataataattgaaggaattacacagtatggttcatttttttctctttttagaagtctggctagataatcccaaaatgtggctccgagataatcaagacaaccttaaaagtatggagagaggccataaatatgatgtttttggaaaaatatttaattcaagcataaacattgttcatgtaggactgcgatcccataaatgtggcacaggagaaaaaagtttgaaatgtccttttgatttgcttattccaaaaaataattgtgaaagaaagaaaattgatgaactcaataagaaattattgttctgtatcaaacctggcagaacccatggtgggataaaatactgtgattgcagtacatgtagaaaatccagcaacgaagagccatggctcactgctaatcacataacacacacaggagtctatttatgcatggaatgtggcagattttttaacaagaagtcacaacttgttatacaccagagaactcatacaggagagaagccctatcaatgcagtgagtgtggaaaagccttttcacagaagtcactgctcacggttcatcaaagaactcactcaggagaaaaaccgcatgggtgcagcgaatgtcagaaagcttttagtaggaagtcactcctcattttacatcagagaattcatactggagagaagccgtatggatgcagtgaatgtggaaaagccttcagtaggaagtcgcagcttaaaagacatcagataacgcacacaatagagaaaccctacagttgcagtgagtgtgggaaagcattctcccagaaattaaaactcatcacacatcagagagcgcacacaggagagaaaccctatccatgtagtcactgtggaaaagccttcttttggaagtcgcagctgattactcatcagaggacccacacagggaagaaaccttacggatgtggtgagtgtcaaaaagccttcagcaggaactcacttctcattaggcatcagaggattcatacaggagagaagccctacgaatgcaacgaatgtggtgaagccttcatcagaaaaccacagctgattaaacatcagataactcacacaggagagaagaactatcgatgcagtgattgtgaggaggccttctttaagaagtcagagttaataagacatcaaaaaattcacttaggagagaaaccatatggatgcattcaatgtgggaaaaccttctttgggaagtcccagctcctaacgcatcacagaacacacactggggagaagccttatgaatgcagtgagtgtgggaaggccttcacccagaagtcaagcctgatatcacatcagagaacacatacaggtgagaaaccctatgaatgcagtgaatgcaggaaaaccttcagtgagaagtcaagtctcattcatcatcagagaacccatactggagaaaagccctttgaatgtagtgaatgtaggaaagcttttgcctggaagccacagcttcttaggcatcagagaattcatacaggggagaaaccctatgaatgcagtgaatgtgggaaagcatttgttcagaaagtgcagctcattaagcatcaaagaaatcacacaggagagaaaacctatggatgcagcgattgtgcaaaagctttctttgagaaggcacagctgattatacatcagagaattcatacaggagagagaccatataaatgtggtgaatgtgggaaatctttcacaagaaagtcacaccttatgaggcatcagaggattcatacaggagataaatactatggatgcaatgagtgtgggaccaccttcaacaggaagtcgcagcttatgatacatcagagaaatcatataatataaaaatcatgactttggcgaatgcagaaaggttgctatcaagtgtcatactttctgacacttttgaggatgcatgtgggagagaaaccctattgaggcagtgactgttgaaaaagcttgaattgaggagtcaagagtcactaagcagaatttagaaagagaagtttttaaaaagcaaacagtgtaaaaaaagtcatctcccagaagacactactcgttacatattggatgactcattgaggtgaaaaccttattagtgttgtgatagtagagaagcttttagtcaaaagtcagtttattaaatgtttagaatacctaaacaggaagaaaattctattgttttttataacaaagtggaagatttcaagaaaggacaactcactgtacacttgagaataatacctacagaggttcatactgaagagtagtctcaataatgtaaagaatttgacaagcatgatgctattgaaatagttctgtaaggaagtggtgttctttatacatcaattattacaaaaagcagtgaattgtaagtgtgaggtgtgtttacttagatgtgaagagttctccttactgctgtgatggaataacaagggtcagatttcctctcctgccttaaacaactggaagctatacaatacgtataataggtaatggtttttagacataggacaagcacaggtttgtgatcctcaggagactgcagacagagtgaggtgagcaccatggtttctcagcctgcccccgcatggcagttcctaggttgcagttcagggaagggaaacaataaatctcgctgaattgaagagacaggactggcagttggggaggccacagcagctagaatttccaggggaaagtactggagagatgggatccttctagatacagggctcaagaagtctgctgggagtcccctgagtcctttgacttagtactgacttgcactgaggccaggaaaagaagcactggaaagcagcaggctgaacaattcctggaactcatgcagggctgggaatagtttatgttctcagcagccagagtggaaacagagtggaaacacatggagcatcaggtagaattctcagaaaggttttgttttagtagtgcagctaattaactctagattaaaagctactctggacctacagtgtccggcatccaaaaaaactaatgtgttatgcaaagaagcaataaaatatgacttataaccaggagaaaaatcagtagaaacccagaaaagacagaggtgatggaattagtagacaaggatattaaaagagctattgtaaatataaagtagaggaaaacataagattgatgaaacctgaggtataagagatatttttactggccaaaatggaacttctagggatgaaatcaacttctgattttgttaaaatcccgagtggagagattagatacagaaaaagaagaaaaaatcaatgaacttgaagagtaagaataaaaactaccaaagtgatatacagagagaaaaaaagacttagagaagaggaagagaataggaaaaccattacagtagtgtaatatatgtttaactggagtcccagaaggagaggagaaaatgaagaggcatgaagaagtatttgaataaataatggctaaagattttccaaatctggtgaaaacaatacccccacatattcaagaagctcaaatgacctgaagtagaataaacataatttacatcacagcagtgcacctcagagtcacattcatgaaaagcactgataaacagaatacttttaaaacaccttgagaaaaaaagataatacatacacatgaacaaagaatggcagcatatttctggtgagaactatgcaagctataagacaatggagtattatctctaaattccttaatgaaataaacaacaaaccctgcaacctagaattctgttactgtcaaaaacgttttcaaaaatgaaggcaaaataaagactgtttctgagaaactaaatcaaaggtaattttattacctgtagacctgtctttgggaaacattaaaggatgtttgagggcagcaggaaaataatacaaaacttaagtttgggtctgtacaaaggaatgaagttctgaaaatggtgaatatgtgggtaaatataaaagatatttctctctttttaaaatctttttaaaagggaattggctgcttaaagccaaagtaatgataacgtatttggagtttatttagaagtaaagtgtgatgacgataacacttaagtgtgaatttttaaatatagttgagtagactgcatcatctgagttagaagcctattccttcagggctcggggtagcttgaatttgtagcaggcacatgacagaaattgtatgtattgtggatctgcatgtgtgctgagtattccctatttctttgatcccttttcccccattttctgctctgctcccccctgaggctgtcttctagagactggggtttcttcataggtttgaacagtgggagataccagaggtgggaggagaaaaagttatttattaccgttcccttcctcctgcctggaccatggtagcttctgtgttcccgtaaggatacagcttcctttgggaagccccatctatggctgtagatctctcggtttcagttgacaccattccctctccatgatcttcagacttaactactactgggtgcttccccaacccactggttgggtgtctttaattgtgaacacatatttgtaaatagtgcctttattaattgttcttgagttaatattctgagtgtgccatttattttctgtgccatctgttaaatgatgagcatttaataaaattgtgataatcagttatcagtacaagtgccgcatagtgcataggctgaaatgtctcaagattccccacactacatatcagtattttctatctgtatctggacaatgcagtagaaattataacaaatacaaagttctttgtgcttttctgctgcatatgtcagtggctctggagattgttaccatctgctacatatataaatagacttgcagttattactaagctcctcttcagtaatagaaagacttatgaagtcttttactacctctgggttagccaaacaaccttcaaaaagcattgttatttaggttaaatatctgtggacaagaaacaagataatcagttactgagtgaagaaagacgggaatgatgtcccatacttcccagctctctaaagtgttatgctgtacaattaaaatacccctgacccatcatctgctaccattcgttgtggataattcatgtaatctctaacctgtgggcaagtctttacccttcagtagtcaagattacgttagagacttcgtccacgaatccacaccacctttcccatcagttctcaccggaaatatgctgccaaaaagaaaatcagcttttctaagatcaagccagagttgcttctcttacaaccttacggcgctaatgcattaagttgaagtcgactgccaaagaggcccagcagagggcagcacccccatcatttttttgaatttctcccttaggaattttgccttcctttgtcttctgtccaccaggccttctctccagctggacacaaacctcctttgaagggaaataattgccgttaggcttcacagtagtgctttttcctttcacttggatttgcattttaacctgcatttcgaagatttttatacatgttttctatttccgacaatgccaggaggcttcattgacgttgtagtctgtgttaataaacttgtgtatcactctgctctgatcttttaggaattaacttgcaaatgaaatgaatatgttgggactttggcataatttgaatatagcattgtgtgagttgtgattgtctcttcctaattgtgctgtaataacctgtgtatgagaataaaatgatttccaccatcaggattctcccatgcccccctttattttgccatagactaaaggggaaaggccattctcactctccttaccttagaaaattttatttgcctcatgatgactgtctgccgcttagaagtagacaatataaaatctcatcactatttcacaagaataaaattcaaatcagttatatccaaagtaacttttcaactgggggtggtgtctcacacctgtaatcccagtgcttggggaggccaaattgggaggaccgcttgagcccaggcgtttgagaccagctggacaacatagcaagactcatctctacaaaaaaaaaatttaattagccatgagaggctgggtgcagtgacgcaagcctgtaatcccagcactttgggaggccgaggtgggtggatcacctgagttcaggagttcgcgaccagcctgaataacatggtgaaaccccgtctctactaaatacaaaaaaattagccgggcatggtggcacatgcctgtaatccgagctacttgggaggctgagacaagagaatcacttgtacctgggaggaggaggttgcagtgagccgagatcacggcattgcactccagtctgggcaacaagaacaaaactccatctcaaaaaaaaagttagccatgatggtgcatgtctgtaatcccagctacttgggaagctgaggcagaagggtcacttgagcccaggagttcaaggctgcagtgagccatgatggggccactgcattccagcctgagtgacagagtgaaaccttgcctcttaaatgaataaaaataaagtaagctttcttcaacaagttttcttccaacgccacacactccatcaccatattaatttaaattatttagtatgtagcagatttactttgagaccaaatctgtgaagttggtgatgatatttaataattctttatttcccttatgggatctttgcaacttagaacacaattattactcattgtatccgggtcatttaacatcttgtcagaatgctaacattaaataaaccaggccaggcgcggtggctcacgcctgtaatcccagcactttgggaggccaaggcgggtggatcacgaggtcaggagatcgagaccatcctggctaacacggtgaaaccccgtctctactaaaaatacaaaaaattagccaggtgaggtggccagcgcctgtagtcccagctactcaggaggctgaggcaggagaatggcgtgaacctgggaggtggagcttgcagtgagccaagatcacaccactgcactccagcctgggtgatagagcgaggctctgtctcaaaaaaataaataaatcaggcgctgggcgcggtggctcacacctgtaatcataacactttgggaggctaaggcaggcagatcacaaggtcaggagttcgagaccagcctggccaatatggtgaaaccccatctctactaaaaatgcaaaaattagccgggcttggtggcacgtgtgtagtcccagctactccggaggctgaggcaggagaatcgcttgaacccaggaagccgatgttgcagtgagctgagatcacaccactgcactccagcctgggtgacagagcaagactccatcacacacacacacaaaaaaacagggaacaccaaacttatttagtgatacctaaatctcgaaatgtgcacagcaaaaagaatgtagctatcgaggcattcactgttaagatgaaaagaaatgtaagtgaagggacatttataacttgaagttctcatttaagaattactggccagggccgggcatggtggctcatgcctgtaatctcagcactttgggaggccaagatgggtggatcacgaggtcaggagattgagaccatcctggctaacaaggtgaaaccccgtctctactaaaaatacaaaaaattagccgcgcgtggtggcgggcgcctgtagtcccagctactcgggaggctgaggcaggagaatggcgtgaacccgggaggcggagcttgcagtgagctgagatcgcgccactgcactcactctggcctgagcgacaaagcgagactccatctcaaaaaaaaaaaaaaaaaaaaaaaaggcattactggccagatgtggtggctcatgcctgcaatcccaggactttgggaggcccagctgggaggagaggagagcttgagcccaagagtttgaggccagcctgggcaacatagtggcactttgttctccacaaaaataattaataaagcaagtaagcattcctatcactaaaagtacttaaaaaaacaaatcaagcttaaacttacaatagggggtgggagaagtgaattaactttttattttcattagtgcgtgctcatgtgaaaggagcagttaggcaatggagtgttaccactgcagccaggcaggtctagtgtagattcgtccccaaaccatggtatttgccaggcagctctgagggtatgaacaaggcatgtgcattgtgtcctgttgtgtgtaatgcgtttgtatgaagcagattctgtaagaagatgatgttggctgagatgtgggccagctgtacttcactgcttcattacaagggtaaggctggccaggtgcgatggctcacgcctgtcatcccagcactttgggaggccaaggtgggtggatcacttgagttcaggagctcaagagcagcctggccaacatggcaaaaccctatctctactaaacatacaaaacaaaaaaaatagccgggtgtggtggagcacctgtaaacccagctgctcgggaggctgaggtgggcaaatcacatgaacccaggagttggaggttgcagtgagccaagatggcaccaccactgcactccagcctgagcaacagagtgagactccgtctcaaaaaaagagaaaacaagggtggggctaaaaggctaatagctaactgaaaatgagcagctgtttttcattctgtgaggagcatcttgtataagccgtagtgtttgatccactcatcattgcatgggcagctgtgcgaggtcagacctgttactgacacttccttctgtgctctgtttgaaaagaaaatctctgtatgcaaatgttaactgagtaaactgtttcatgaattcatatgtgtgagtgtgatcactgggagcaatttgcaaataaactctggtttccattccaaccaggtatccccaaattaaatctgaattatcatcagttttcaatttgttgtcatccataagcatccagatacacccccacacccaaagaagcagctgttccctttcagtttcttgtctgttccttttatcctcagtgagagtgagctgaaacgtctccagcctgatcctgtctacttaacccccttccttgcaggaccacccacttctgttaattttttacacccctttaactttcctgctttaggacaatgaacaattagctgtcatttggtccatcccataggcaattatgtgggtttgttttctaaagcactggtaactataattagatggttcaaataatattaaaaactagtgttttctatggcacaattatgcatttgtcaaaatatacacaacttgcccgctgcagtggcttattcctgtaatgccaactactagggtggcagaggcggaaggatcactgagctcaggagttcccgaccagtgtaggcaacatagcaagaccccatctctctttttttttttttttttgagatggagtctcactctgtcacccaggctggagtacagtggtgcgatctcagctcactacaacctccgcctcccaggttcaaggaattatcctgcctcagcttcccaagtagctgggattacaggtgtgcaccaccatgcccaactaattttttgtatttttagtagagacagggtttcaccatgttgaccagcctagtctcgaactcctgacctcaggtgatacacctgcctcagcctcccaaattgctgggattacaggtgtgagtcaccacgcccagccaagaccccatctctaaaaaaaaattttttttaggctggacctggtggctcaagcctgtaatgccggcactttgggaggccaaggcgggcagatcacgaggtcaggagttcgagactagcctggccaatatggtgaaactccatctctactaaaaatacaaaaattagctgggcgcagttgtgggcttctgtaaccccagctcctctggaggctgaggcaggagaatcacttgaacctgggaggcagaggttgcaatgagctgagatcgtaccactgcacttcagcctgggtgacagagcaagactgtcttggaaaaaaaaaaaaaatttagcctgatgtgggaagctgaggtaggaggattcctggagcccagtctgaggctacagtgagttatcacaccattgcactctagcctgagcaacagagtgacggagtgagtgagaccccatctctaaaacaaaacaaaagcaaacacacacaacttgatataaaaaagtaggccaggcacggtggctcacacctgtaatcccagcactttgggaggccgaggcgggcggatcccaaggtcaggagatcaagaccatcctggctaacacggtgaaactccatctctactaaaatataaaaaaaaaaaattagctgggcgtggtggcaggcccctgtagtcccagctactcgggaggctgggtcaggagaatggcgtgaacctggaagatggaggttgcagtgagccgagatagcgccactgcactccagactgggggacagagcaagactctgtctcaaaaacacacacacacacacacacacacacaaaagtagattttacccttctaacgtgtacatgagaaataaggaaagatttttaaatcagtaatttaagtttctacctcaggaaactagaaaaacaagtgcaaaataaatccaaaacaagtgcaaggaagaaaatgataaagaactgaagtcagtgattgaaaataggacaactaaagctcattcttaaaaaaattaacaaaaatgattaacttatagcaacattgacagaaataaaaagatacaaatcaccagtattaaaaatgaaatactttattacagaccttgccaacatcaaaaataaaaaaggatctctactaacaacttcacacttataaattcaacagcttggaagaaatggattaatttcttaaaaaccacaaactaccaaaactcacccatgatgaagttgagtatcgaaaagccctatatccagtaaagaaattgaactactaatgatctacccaaacagaaatctctaggcccagatggagaactgtaccagtcatttaaagaataatttatatcagctttacatgatattccagaaaaatagaagagggggaatatatctctcaactcattttatgaggccagtattacactaccctgataacaaaccgaagacagcatgactgcatgcacacgtgtgcacacacacacaactacaggccaatatctgtcatgaacttacatgtgaaaatcctcaacaaaatatttgaaaacaaaattcaaaatatataagaagtatgcaccatgaccaagtgggatttattccacgtatgtaagggtaagttgaatatttcaaaatacatcaatgtaattcatctttaaaactgtacagcaggccaggcgcagtagctcacacctgtaatcccagcactttgggaggccgaggtgggcagatcacgaggtcaagagattgagaccatcctggccaacatggtgaaaccccgtctatactaaaaatataaaaattagctaggtgtggtggcatgcacctgtaattccagctactcgggaggctgaggcaggagaatcgtttgaatccaggagttggagattgcagtgagccgagactgtgccattgcactccagcctgggtgacagagcaaaactccatcccaaaaaaaagaaaaaaaaaacattataaaatgggcagtagacattaacagatatttcactgagaaaaacatacagatgacaagcacatgaaaaaacattcactatcattagtgatttgggaaacgcaaattcaaatcacaatgaagtgctactacacacctatcaagatatcaagatggcttaagtaaaaaatagtctgaggcaggaggttggtgtgaacctgggaggtggagcttacagtgaaccgagattgtgtccctgcaccccagcctgggcgacagagcgtgactccgtctcaaaaaagaaaagaaatagtgacagcggctgggtgcagtggctcatgcttgtaagcccagcactttgggaggctgaggcgggtggatcacgcggtcaggagttcgagaccagcctggccaagatggtgaaactccatctctactaaaaatacaaaaattagccaggcatggtggtgcgcacctgtaatcccagctactcgggaggctgaggcagagaactgcttgtacctggaggcggaggttgcagtgagccaagacacgccattgcactccagcctgggcaacagagcaagactctgtctaaaaaaaaaaaaaaaaaaaatagtgacaccatcaaatgttgagggtacatagaagctgtatcactaatacattaccagtgggagtggaaaatggtacagcaattctagaaaacagtttggcagtttcttatgaattaaacatcaaattaccatataacctagcaattgcacttttggggatttatcccagataaatatattttctcaccaaaacctgtacacagattaatatcagtttatttgaacagccaaaaactgagaataaggtaaatggttaaacaaattgtggcacacacatatggaatgctattcaggaaaataaatggactactgatacacacaaaaacttggattaatctctagagaagtacaccaaatgcaagaaatcagtcccataaggttgcatattgtattattccatttatataacatttctgaaatcataacatttttaatggaggacagattcttgtgttgccaaggtttaggaatgggggtagaatggtgggaagtgggtaagtgttgttataaaagatctgtatgttgaaaacgtcaaaacgcttatgagagaaataagggaaatccaaatcctaaataaatggaaatatgtatcatatttgtggtttggaacaataaatagtagaatgtcagttctctctagatttacctataaatttattgcgatcccaatggaaattccagcaggagtttttgtagacattaacaagttaatcaaatttatttggaaaagcagaagaaactagaatagccaaaacatcttttgtcaaagaggaacagagctggaagactcgcactccctgacttcgaaacttactgtaaagatacagcaatctaaacattgtgtcagagaaaggataaacacatagatcatggaccataattgagaatacataaatagaccttcgtgtatatggtcaattgatttttgacaaagttgcaagggcaaatcaatgaaaatagtggtttaaaaaaatggtgctgcaacaattgaaagtcaatatacaaaacaaatgaacctcaatccataactcatcccatattcaaacttaatagatgaagatttaaatgtaaaaccttcacttaacaaaaattctagacactgcaccacagcaaagataaagagtttaccactaataaaccctcaatgaaggaacttccaaagattgccatcagagaaaagtagtgggtgaagccaagaggtaatacatgtgaacctaaactagtattggctatgtaaactaacaataataatgttatgttactggttatgcaacaaaaataacgcagaactaaaacagtgagtaacatggtatgtgttcaggatgatcagagataaaaatgttgggacgctgggtgcagtggctcacgcctgtaatcccagcactttgggaggccaaggcagacagatcacctgaggtcaggaattccagaccagccagaccaacatggtgaaaccctctctctactaaatacaaaaaattagccagctgtggtggtgggtgtgtgtaattccagctacttgggaggctgaggcaggagaatcgcttgaacctgggaggtggaagttgtagtgagccaagactgtgccactgcattccagcctgggcaacaagagtgaaaactctgtctcaaaaaaaaaaaaaaaaaaattggagccaggcgtggtggctcacacctgtaatcccagcactttgggaggccgaggctggtggatcacctgaggtcaggagttcgagaccagcccgaccaacatggagaaaccccagtctctactaaaaatacaaaaattagctgggcgtggtgtcaggcacctgtcatcccagctactcaggaggctgaggcaggagaaatgcttgaacctgggaggaagaggttgcagtgagttgagatcgcgccatcgcactccagcctgggcaagaagagcaaaactctgcctcaaaaaaaaaaaaaaaattgggatgcctctctgttggttatggagagagcagattaagtgattacctttagactttgttaagtcttgtatacatagcaaacaccttaacattaacacttaaagaatagatattgaaaatggaagtgagaaagcttgattaaatccaaaagaagatagaaaataataagggacaaaaaacacaaggccaatggaaagcaaaaagtaaaatgatagaaataaacataactgtatcaataatcttttttttttttttttttttttttgagacggagtctcgctctgtcgcccaggctggagtgcagtggtgccatcttggctcactgcaagctctgcctcacgggttcacgccattctcctgcctcagcctcctgagtagctgggattacaggcacccaccaccacacccggctaattttttgtatttttagtagagatgggggttcaccatgttagccaggatggtctcgatctcctgacctagtaatctgcccacctcggcttcccaaaatgctgggattacaggcgtgagccaccgcacccagccaactgtatcaataatcacaaatcatataaactcatcggtttaaaagcagaatgtcgcattatgctttaaaatattccatgtatatgtttataaaataaatgcataaaaatgttataaaaagtgagtatgagtggaaaaatatatacctggcaaacattaattgggtaacataagctttagggaaaccatcgttaggaataaaaagggtcattatataaggataaaagtacaattttctatgaagatataatgattctatgttcaaaatttcaaattaacatagaccaaagaatgtattatacaaaataggacaattagaggaataaactacaaatccacattaccatttggaaatttttgcacacttttcttaggaattgatagagcaggacagcacataattggtaagtgatctggtttggctgtgtccccacccaaatctcttcttgaattgcagctcccttaattcccacatgtgggagggacctggtgggagataacttgttttggctatgtccccacccaaatctcatcttgaattgcagctcccacaattcccacatattgtgggagggacccagtgggagataactgaatcttgggagtggtttccctgatactgttctcatggtagtgaataagtctcatgagatctggtgatttgacaaggggtttcctttttgcttggtgctctgattctctcttgccaccagcatgtcagaagtgcctttcacccaccatgattatgaggcctccccagccacatggaactgtgagtccattaaacctcttttactttataaattactcagtcttgggtatgtctttatcagcagcgtgaaaatggactaatacagtaagtatatgaaaaatttgatttatacaatgaatacggtgggtttaactgatataggacaccacacaaaatgggatataatctaaagtggcacttactggaaaatgcattaccccaaatgcctctattaggaaaacaggatcaatggaaatgtaagtgttaagcatccaacccaagagattaggaagaatcctagaaaatatccaaataaaagtagcaaaaaggaaataatgaagatgaaaatgagaattaacagataataaatccacatctaaaagcttctttcttgaaaagactagtgaggcagggcgcggtggctaacgcctgtaatcccagtactttgggaggccaaggcagatggatcacgaggtcaggagatcaagaccagcctggccaacatggtgaaaccccgtctctaccaaagatgcaaaaaattagccaggtgtggtggtgtgtgcctgtaatcccagctacttgggaagctgaggcaggggaattgcttgaaccctggaggtggaggttgcagtgagccgagattgtgccgttgcactccagcctgggcgacagggtgagacgctgtctgaaataaataaataaataaagactaatgaaatgcaaaacttccattgctagattagaaatagacccagaatagtcaacacagtattgaaggagaagagcaatgttggggagctgacactacccaacttcaaaatttcctataaagcgatagtaatggagacactctgatactggcagaagaatggacaaagaggtcagtggggcagaataaagagcccagaagcagcgccacacaaatatagtcaactgatgtttgacaaaggagcaagggcaatgcaatggagaaaggatagtctttttagcaaatggtgctggaaaaactggacatccacaggcaaaaatgtgaatctagacaaagaccttatacctttcacagaaactaactcaaaatggatcaaagacctgaatgtgaaatgcaaaactatacaactcctggaagacagcacagaagaaaatctaggtgatcctgggtttagtgatattttctcagataccataccaaaagtacaatctgtgaaacaaaaaactgataagttgaacttcattaaaatttaaaacttgtggccaggcgtggtggcacatgcctgtaatcccagctacttgggaggctgaggcagaagaatcacttgaacgcgggaggtggaggttgcatggggccgagatcgcgccattgcactccagcctgggcaacaagagcaagactccgtcaggaaaaaaaaaaaaaagggccaggcgtggtggctcacgcctgtaatcccagcactttgggaggctgagacgggtggatcacaaggtcaggagttcaagaccagccgggccaagagaccagcctggccaatatggtgaaaccccgtctctactaaaaatacaaaaattagccgggcgtgatggcgggcacctatcatcccagctacttgggaggctgaggcaagagaattgcttcaacccgggaggcagaggtttcagtgagccgagatcgtgccattgcactccagcctgggcaacagagcgggactccgactcaaaaaaaaaaaaaaagtaaactataaacttcagttaataataatatattaatattggtgtatcagttgtaacaaatgtaccagagtaatatgaaacgtaaatataggggaaacactatggtagaacataaggggaacactaaggtagaaagggatggggggaactccttgttctttccagttgatttttctgtaaacccaacacgctctaaacaaaaataaaatatattaatttttttttagtgcaactaaacaaggtccatgaaaaagagaatattgggtgggcgcggtggctcatgcctgtaatcccagcactttgggaggctaaggcaggaggctcgcttgagaccagtctgggcaatagagtgagacctcgtctctataaaaaatttaaaaattagctgagtgtggtgacacacacttgtagtcccagctactcgggaggctgaagtgggaggattgcctgagcccaggaggcagaggttgcaatgagattgtggcactgcactccagcctgggtgacagaaagagaccctgtctccaaaaaagaaaaaaatattacaggttggtcttaggatatatatttttaaatcctggtgaaggataagtgagcttttctcagggaagcaggtgggacagaggggaatcactttgggagtggcctcccactagtgacctcacagaccccctcactgacccggcagaccccacatcactgacacgtaagaccccagatgacgaggcctgcacatctcctgtgacggacagctgagaccccgtaccactgcccggacccagccctggcccaatggggctcgcacctccaaagcccacgtccacacgttccgagcccgccgtcccatcgcaaacatccgggggccgccactgcgcctaacgaccgcccatctctgacgcctcgggtcggcgtttgatttttaacccaagaaaagagtaaaagtcaagcggaaatcaacgcagaagcggtgctgcagcctctgagcttcctgacggccgtgtccagagccgggctcctcctccggcggcagccgccgggctcacttcagtgcgctcagcttctcgcggggacaagcgtctgggcggggacggcccgaggcgggggtgtggcgaggctggagaacgctgaaagctggtgggcttgggaagacaaacgacgctctgaaatttggctcccaggtaatacgttccggcacttcgcggcggctcagtcagcgctgctgggttccacccctcctatgcgttgctcagggacaggtttcttagtgacaggcccctcactattcccattggccaggacgcccaaggcccacgcagccgttggctaaaattgttgtctgtttcagacacgttggcgaattccccgcctctacgttgccgggagacagcatgttgcctagcagcgtgcggctcccattgcctttgggcgcggctctccgccccgacccgcccctctgggacccatccgggtctgcgcctcagctagacagggcgggctgcggcgcgcagtcttaggcgtgcgcttcggggaaggggccctcgcgtgggaggagcgcgtctgcgagggatgcgccggcgcaggcgagacccggagccgcgtggtctctgcgcagtgcgtcgtgtggggcggccgaccccggcccgggtttccctgctcgttttcgtccgggcgggcgtcttggttcccgttccaggccagccccatcctaggtcgctgcttcatccagcgcttggggcatttgtgtcgttggcgttgttttcctcttaactacaaactttaaatgtgttcatctactcgtgacggcgagtttagcagactttcattcccagaagacgtgtcacacgatctgtatatttttcatacagaaattgacggacgtcgttacttctaaatttccacaggggctggttcatcccgcggctttacctagagaaaaacgtctgaggccgggcgcggcggctcccgcctgtaatcccaacactttgggaggccgaggcgggcgaatcacgaggtcaggagttcgagaccagactggccaacatggtgaaacctcgtctctactaaaaatacaaaaaaaaaaaaaaaaaaaaaaaaaaaaaaaaatagccgggcgtggcggcgcatgcctgtaatcccagctactcaggaggctgaggcaggagaatcgcttgaacccgagatggtgccactgcactccagcatgggcgatagagcgagactccgtctcaaaaaataataataaaataaaaaccatggacaatgggaggagaacatcacacaccggggcctgtcgggggtggggggccaggggagggatagcatcaggagaaatacgtaatgtagataactggttgatgggtgcagcaaaccaccatggcacgtgtatacctatgtaacaaacctgcaggttctgcacatgtaccccagaacttaaagtataattttaaaaagagagagagaagcgtctgagcgtttctcagggacggcgggtggcagccaggacgggctggggcggtgaagtgcggggcgggaagcgacgcgtgcgcctcctgcgctggcttctgtgaaaggagggactgattggagatcactgctgaaaagtggactacgcatcagtgaatagttagtgaaatatgagcttctacattcaaaaccatttgtgctttaaagattttgtttcaccatggtatcgtatttatctgaatcctatgttgcttttgctttgtaatctgaattgtctgtcactcccccagtctcagttttttgttaactgttcaatattcatagaaatgtctctacatgggaccctttaacagagagagtaatctgtcatagcaagtatttcctgagtagtttcactgattctatgtttttagcaggtcaatgttttcctggttagttttatgattttatctcaatttttaccagtttgtaaccagaactggagtattaatgagaagatatataattgtaagtaaatattctatttattagaagaataaatcaccctgacagtcaacaaataatctttttaaaatttttcattgatgtattgatttatttattagagggagagtctctgtcgcctcatctggagtgcagtggtgccatcatagctcacttcagcctcgaactcctgggctcaagtggtcctcccgccttagcctcccaagtagctgagactacaggcacgtgccactgcgtcaggctgatttttgtatttttattggagatgaggtctgcctaggttgcccaggctggtctcaaacgcctgggctcaagccatcctcccgcctcagcctcgcagagtgctgggattagaggcacgagccaccacactcggcaataataacaatctttttaatggatccactcaaacaaaatagaacctgctcaactaaaatttcctgtctatcctcaaataatattaaaaaccatcctatcttaatatgaattaccctaaaatctattattggcaaatataagttttcagtacatcagtgaatgctgaagttagttatattggggaaactggcttttgaaatatattttttaatcgattgtagatagcattgtgtgttcagaagctgtgatggaagtggcattctacaccggacatctgctgatacaatacacatctctatagaatctacttattataaggaccacttcatgtattatcattatgaaaatcatgatctgcgaaaataggaagaaaattaaagctagaaatgtatgtgatttaatctctctgttttggctggcctcaattctgcagcttcctaacacgtttgaagcaagggtccttgcctgtgattgtattattaatacattctatgtaagcttagtttaaatgatattgttccagccaggcgtggtggcacctatagtaacagctactcaggaggctgaggtgggaggatcccttgatcctaggaattcgaggcttcagtgagctataatggtgccagtgcactccagcctgggtgacagcaacaccctgaaaaaaaattaaaaataagataaaatgatattgttcatgtgaaagaatgcccattcttttgcaaagatagtgctcttttggtagcttttagaagttttggatttggaagttgagttcttcaagttcattattattcagggttgtatttacaattctaggtttacaaacagtttgtcaacatctacgaaattaattgcggggatttttgtcggagcggcaccaactctacagttgggaagaattgacatcttagcaatattgtgactacaataatgaaaaaggagtatgctccggttatgttttccttttttttctctctttctctctctttcttttccgtccctcctttccttccttccttccctccctccctcccttaagatagagtctccctctgttcccccggctggagtgcagtggccccatcatggctcactgcaacctccctctccagggctcaagccatccttccatctcagcctcccgagtagccgggactacagccgcacaccaccaagccagtctaatttttgtatttttagtaacgacagggcttggccatatttcccaggctcctctggactcctgacctcaggcgagccctctgtgctccggaccttccggagtgctgggattacaggtgtgagccactgcgccggcctacgttttcttttaatagtgtttcatagttttctggatacagatggtttcatattttgttagagcaaggatttcttggatttgttgtatccaaggatttctttttgttgttttattgcaaacggtaggcctttaaagttttccagtttcagttgactttaatatattggctttgtacttttgcttcttgttacctcccccactcctatcaagccacagaagaggaggctccaccgcacttttgatctccaaaattatagtttaggagatacggttcagaaaagagcggggaggcgcgcttctttcgctgatggggtgcgctcagctcctgcgctgcccctggtggccggcagggcgcgcccaaccctacgattgtggctcgtggcgcgcatgcgcattccgcccgcggcgtcgccacagggtgagggagcttggcttcctgagaagccacccaggagccccggcttggggatgacttgaggccgcgtcttcggtgaggaaaagcttcccagaggaactctgccggggaatctctagagtcattgtccttttttaaaaatgtttttataggccgggcgcggtggctctcgcctgtaatcccagcactttgggaggccgaggcgggtagatcatgaggtcaggatatccagaccagcctggccaacaaggtgaaatccagtctctactaaaaatacaaaaattagccgggcgtggtgccgcgcgcctgtaatcccagctactcaggaggctgaggcaggggaattgcttgaacctgggtggccgaggttgcagtgagccgagatcgtgccattgcactccagcctgggcaacttgagcaagactccgtctctaaataaataaataaataaataacgttttttcgctttttttttttttttctctgagacagagtctgtttctgtcgcccaggctggaggtggtttcggctcactgcaaccgccgcctcccgggttcaagcgattctcctgcctcagcctccagggtagctgggattacaggctcccgccaccacgcccagctaatttttgtatttgtagtagagatggggtttcaccatcttggccaggctggtcttgaactcctgaccttgtgatccatccgcctcggcctcccaaagtgctgagattacaggcatgagccgctgtgccccgccatgcgccgcattttctttctttctttctttttttttttttttttttgagacggagtctcgctctgttgcccaggctggagtgcagtggcgcgatctcagctcattgcaacctccacctcccgggttcacgccattctcctgtctcagcctctccagtagctgggactgcaggcgcccgccaccacgcccggctaattttttgtatttttagtagagacgggggtttcaccgtgtcagccaggatggtctcgatctcctgacctcatgatccgcccgcctgggcctcccaaagtactgggattacaggcgccgcattttcttatccattcatctgttgatggacatttaggttgcttccaaatcttggctgttgtgaacagtgctgcagcaaacatggcagtgcagacatctcttagacatgctgattccctttccggtatctagccatcagggattgctggagcttgtggtagctcaatttttagttttctgaggtacctccaaacagttctcggtagtggttgtactaatttacattccttccaaccgtgtatgagggttcccttttctccacgtccaccagagacactttccttaaattcataagcagagattccctcatgttctggaatgttcccatgcgttattctttactttctctggaaagtaaagatctcggagtgagatctgttttaggcatttcccttcacagaggggttggcagcgggaaacagagagcacctggtgtttccttaatcaggattgttctgggaggaaatccatgcaagtccagagaagtgcgtggcccaggtgagacttgcagagaacagtgttcgtgcctacagcttggggagtctgggagaaggaaaatgagcactcctgtggatgtgctttattcatttcttcctgtcttattttccctacagggttaaagtagttgtaaagaagaaagttttgcaaagtacatgtattaaaactcaaaacattaggccaggtgcagtggctcatgcctgtaatcccagcattttgggaggctgaggtgggcagatcacacggtcattagatcgagaccatcctggctaacacggtgaaaccccgtccctactaaaaatacaaaaattagccgggcgtggtggcacgcgcctgtagtcccagctactcgggaggctgaggcaggagaattgcttaaacccagaaggcagaggttgcagtcagccgagattgcgccattgcactccagcctgggcaacagagcaagactctgtctcaaaataaaaaataataaaatagaataaaaatcattatttccacttaaaatagttcatagcggctgggcacagtggctcacaccagtaatcccagcactttgggaggccaaggcaggcagatcacctgaggtcaggagttcaagaccagcctggccaacatggtgaaaccctgtctctactaaaaatacaaaaaaaagcagctgggtatggtggtgcatgccagtagtcccagctactagggaggctgaggcaggagaatcgcttgaacccgggaggcagaggttgcagtgatcccagatcccgccactgcactccagcctgggcaatagaatgagactccatctcaaaaaaaaaaaaaaagttcatatcaaaaggaaaatataggctgctctgcctgtggagtagctattcttttgtttctttacatctctaataaacttgctttcacttacaaaaaaaaaaaaaaaaaaaaaaggaaaatcctagcactctgggaagctgaggcaggcagatcacctaaggtcaggagttcgagaccagaatacaaaaattagccgggtgtggtggtgcatgcctgtaatcccagctactcaggaggctgagacaggagagttgcttgaaactgggaagcggaagaggttgcagtgagccgagatcatgccactgcactccagcctgggcaacagagcaagactccatctcaaaaaaaaaaaaaaaagggctgggcacggtggctcatgcctgtaatcccagcagtttgggaggccaaggcaggcagatcacctgaggtcaggagttcgagcccagcctggccaacatggagaaaccctgtctctactaaaaatataaaattaactgggtgtggtggcacatgcctgtaatccgagctactggggatgctaaggcaggagaatcgcttgaaccagggaggtggaggttgtggtgagccgagattgcgccactgcactccagcctgggcaacagtagcgaaactctgtctcaaaaaaaaaaaaaaagaaaatgtaaaaggtaattttacttttctggttttaatagaagcaaattcctcagtaatctttttttttttttttttgagacagagtctctcgctctgtacccaggctggagtgcagtggccgatctcggctcactgcagcctgcgcctcccgggttcaagcaattctcctgcctcagcctcccgagtagctaggactacaggagtgcgctgccacatctggctaatttttgtattttttagtagagacaaggtttcatcaggtcgggcaggatggtcttgatctcctgaccttgtgatctgcccatcccagcctcccaaagtgctgggattacaggcatgagccaccgcacccagcccatcagtaatcttttaaaaatgtacttattagctcacttcattttcacttaagagaatttccatgtttgataattttttatgactcactgactatctcaaaaggttttctgtggccaggtgtggtggctcacgcctgtaatcccagcactttgggaggccgagactagcggatcacctgaggtcaggagttggagaccagccgggccaagatggcaaaaccccatctctactaaatatacaaaaattagttgggcctggtggtgggcacctgtaatctcaggtactcaggaggctgaggcgggggagaattgcttgaaccctggagacagaggttgcagtgagccgagattgtgccactgcactccatcctaggtgacagagtgagactctgtctcaaaaacaaataaataaataaataaatgggttttttttgtttgttttttgagacagggtctcactctgttgcccaggctggagtccagtggtgctatcatggctcattgcagcctccacctcccgggctcaagcaatcctcccaccttagcctcctacattagcctccctagtacaggtgtgcatcaccacatccggctaattttttgtatttttggtggagacggggtttcaccatgttggccaggctggtctcgaactcctgagctcaggcaatccacccaccttggcttcccaaagtgatgggatgacaggcttgagctcccagccagctgctagttttgagtggggcccagaacaagtgaaggctctgcaacagatgcaggctgttgtgcaaggtgctctaccacttggtcacatgacccagcagatccaatggtgcttgacatgtcagtggcagagagcgatgctgggtggagccttggcaggcccgcataggagaatcacaatgtagacttttaggattttggtgcaaagccctgacattgtctgcagataattactcttctttttttttttttttttttttttgacttcaacgttttataacaatagagagtagctgaaaatactacatgctaacacagacaatatgatacacaacctcgggggacaagttggcagggagcacgtggcagaggccacaggtttagactaagagccttttgatggactgctgaatggattggatctgctgtttcagctgtgagccttctttgatggtgacagaacaggtgatgacaggcctggagaccccacaggctcttcccagggcctgcttggagcgcacaaatatgaagggcacgttcttgtcttcacacagcagtggaggtgcggaatgatctcctgtggctcggtgtctgcagccatcacgatgaactcagagatgcccctgttaagggttttggtggcctcgttggctcttttctgaagctgcttgtagttacacgactactgaatgaactccagtggtttcttggtgaggtgggcatcggcgaggggctaggccttcagattcacattggcctcagtcatggctgtggttccgtgagctcggcactcctagggccgcgcagccgaggtctgagaagcgctctcttccacccgtactcttcttttgacaaccagcttttggcttgctacaggacggtattagggactgaataattaagcatggcccaccaaattactgcatgacctgagctgctcatcacgaactcagtgttatctgaccccccaagccataaagtgaggcatacagagtagtactccatcatcacgcaatgacagtgcaaaactcacagaataccttacccaccgttgtggtgttagagaaacctgtttaccaggcctctggtttcataaaacatgaccagagtgactctatcttaaggtaagtagctaggcactcacaagacacctgtaaggttgctatggtctgaaaatagccacattctaagctgaccaccaattataattgcagaaatatttatggtcatacgggacatctcccaccaagcctgcagaatgtccagatgtcctaagagtgcagcccactttactcagagagaaccttaatgagcaggcttaggttgaaggattaatggtcactgatagcaccaatagccctaccttcagtgagcacatctgcacattccaggtttaattgtagctccttaagagtttcctgtacagcattcctcttcctgctttctgaggatgccttactctgtaacagagtagattctgataaacttgcttctttcacggtgctcagtgactcacctcaaattctttcctgtgtaagatctaagagccctttcttggagcctggactggaactcctctttttcctgtaacaatgacatcgcttctgatcgaagaacccacttcacagtaaatgaggtgcaccgtgggcccatgctcatggaattcatgggtcttgctgtgttctccatcatcctaccgattttggttctgtttttctggtggaactgactgagagaaacatatagtgaaaggtaagtcttcattaccccttgactttaagtccgtgtttcagaggaagccaccgccatttccttgtgtatccttctagagagattttcattttcataaacatatttgtatgtacacattattaattaaaagagtcaagctctacaaaatttgaagaggtttattctgagccaaaagtgagtgatcacggcccacggcacagtcccaagaggtcctaagaccctgtgcccatggtggtggggctacagcttggttttatactttttttttttttaaagacagagtctcactctgtcacccaggctggagtgcagtgacgcaatctcggctcactgcaacctctgcctcccgggttcaagcaattctctgcctcagcctcctgagtagctgagattacaggcacctgccaacaagcccgactaatttttttttgtatttttagtagacaaggggtttcaccatcttggccaggttggtcttgaactcctgacctcgtgatctttcactcgcgtccgtgtgaagagaccaccaaacaggctttgtgtgagcaataaagctttttaatcacctgggtgcaggcgggctgagtctgaaaagagggtcagcaaaggggagatggggtggggccgttttataagatttaagtaggtaaaggaaaattacagtcaaagggggttgttctctggcgggcaggggtaggggtcacaaggtgctcagtgagggagctttttgagccaggatgagccaggagaaggaatttcacaaggtaattgtcatcagttaaggcaaggaccggccattttcacttcttttgtagtggaatgtcatcagttaaggcaggaacaggccattttcacttcttttgtgattcttcagttacttcaggtcatctgggcatatacatgcaggtcacaggggatgtgatggcttagcttgggcccagaggcctgacattcctgccttcttatattaataagaaaaataacataaaatagtgttgaagtgttggggcagcgaaaaaaatttttttggggggctggcatggagagataatgggcgatgtttctcagggctgcttccagcgggattaggggtggcgtgggaacctagaatgggagaggtcaagttgaaggaggattttgtggtaaggggtgatattgtgggattgttagaaggagcatttgtcatatagaatgattggtgatggcctggatacggttttggatgaattgagaaactaaacggaagatacaatgtctgaataaaagaaggagaaaaatgggtattaaaggactaagaattgggaggacctaggacatccaattagagagtgcccaagggagttcagcgtaattacttgcttggttggcaagtttttgggccctatccttgagtttttttatgttgtcatacaccaggccagattaatttaggtaaaaacaacactcttcatttaaaaatatacagagtcctcctttttcagcattgagtaagtcaaggcctcagcgattttggaggacagctaaagagtcaacttgggcctggaggactgataaagtttgtgatatgtctgtgatgctagcagagaagtcattagagaggctacagaaggttgtgacagaggttgaaatgcctgctatcccagtactgagagcaatagtagaggcagaaagtcttaaaccgacaagcaagggaattagtggaataactcttttttgtcatgttggtgtcatgaggggaacaaggagctttttgctcctattggcaaattgaattttgggagtaaggaaaactaatgtgcatgtgcctgtccaattagcaggtagacacatgtaggtagaggatccacagaggaagaagggaccttgtgccaggcaaaattggagatgcaaagtaaaaagatgagaaggagtgctgaaaggggtgtcttgtacctacactcctagggatccagctagggcagcagccatcagaggttgtaatggggactggtggggtgactgcatagagggggacgttcgattttcatggtgtatgagaaaacgtctagtgtctatgagcaacctttcatgatggggtaactgcatagaggggaggatcgattttcatggtgtgtgagaaaacattgagtgtctacgagcaacctttcatgatggggtaactgcatagaggggaggatcgattttcatggtgtgtgagaaaacgttgagtgtctacgagcaacctttcatgatggggtaactgcgtagagggggaggttagactttcatggtgtatgagaaaacgtcgagtgtctacgagcaacctttcatgatggggtaactgcgtagagagggaggttcgattttcatggtgtatgaggaaacgctgagtgtctacaagcaacctttcatgatggggtaactgcgtagagggggaggttccattttcatggtgtgtgagaaaatgtcgagtgtctacgagcaacctttcatgatggggtaactgcgtagaggagaggatcgattttcatggtgtgtgagaaaacgtcaagtgtctacgagcaacctttcatgatggggtaactgcatagagggggaggttagactttcatgatgtatgagaaaatgtcgagtgtctatgagcaacctttcatgatgaggtaactgcgtagagagggaggttcgattttcatggtgtgcgagaaaacgtcgagtgtctacgagcaacctttcatgatgaggtaactgcgtcgaggggagggtcgattttcatggtgtgtgagaaaacgtcaagtgtctacgagcaacctttcatgatggggtaactgcatagagggggaggttagactttcatggtgtatgagaaaatgttgagtgtctatgggcaacctttcatgatggggtaactgcgtagagagggaggttcgattttcatggtgtatgaggaaatgctgagtgtctacgagcaacctttcatgatggggtaactgcgtagaggaggaggtttgattttcatggtgtatgaggaaacgctgagtgtctacaagcaacttttcatgatggggtaactgcgtagagggggaggttcgattttcatggtgtgcgagaaagcgttgcgtgtctacgagcaacctttcatgatgaggtaactgcgtagaggggagggtcgattttcatggtgtgtgagaagacatcaagtgtctacgagcaacctttcatgatggggtaactgcatagagggggaggttagactttcatggtatatgagaaaatgtcgagtgtctatgggcaacctttcatgatggggtaactgcgtagagagggaggttcgattttcatggtgtatgaggaaacgctgagtgtctacgagcaacctttcatgatggggtaactgcgtagagggggaggttcgattttcatggtgtgcgagaaaacgtcgcgtttctacgagcaacctttcatcatgaggtaactgcgtagaggggagggtcgattttcatggtgtgtgagcaaatgtcaagtgtctacgagcaacctttcatgatggggtaactgcatagagggggaggttagactttcatggtgtatgagaaaatgtcgagtgtctatgagcaacctttcatgatggggtaactgcgtagagggggaggttcgattttcatggtgtatgaggaaacgctgagtgtctacgagcaacctttcatgatggggtaactgcgtagagggggaggttcgattttcatggtgtatgaggaaacgctgagtgtctacgagcaacctttcatgatggggtaactgcgtagagggggaggttcgattttcatggtgtgcgagaaaacgtcgcgtttctacgagcaacctttcatcatgaggtaactgcgtagaggggagggtcgattttcatggtgtgtgagcaaatgtcaagtgtctacgagcaacctttcatgatggggtaactgcatagagggggaggttcgattttcatggtgtatgagaaaacgtcaagtatctacgagcaacctttcactattatttatgggtctgggtataagtaaacaagaagagggcctgggaggagagcctgatgagcaaggggaaggtagccaaggatggagtgaaatgcagggtaagtgtcttcttaagcaataattactactaatatttttaagtttgtcagtattgatagagggcttatctgtaatatggagctggaaggcttcaattgtttcagtgatgtgtgtagttgggctttggagatgaagaataaaggaacatcgagaaggtgaaaggttacctaggggaattccagtgggtctttgctgagagatacataaaggagcggccttgagcagagtttttattaaagaggcattaatgatggaggaactttgcgtagtgaggaaacctctttcagcctatataacagcatggtggtgcagaatatggaaggcatatttagagtcagtataaatattgacatgtagtccttttgcaagagtgagggcgccgggtgtggtggctcacacctgtaatcccagcactttgggaggctgagacgggcagatcacctgagtttgggagttcaagaccagcctgaccaacatggagaaaccctgtctctactacaaatacaaaattagccgggcgtggtggtgcatgcctgtcatcccagctacttgggaggctgaggcaaaagaattgcttgaacccaggaggcagaggttgcagtgagccgagattgcgccattgcactccagcctgggcaataagagcgaaactccatctcaaaaaaaaaaaaaaaaaaaaaaaaaaaagagtgagggactgagttaaggcaactagttcagcttcctgagaggtagtggagggaggcagagtggtagcctcaatgatagatgtggaagatactatagcatagcctgcctttgctagtgagtggcaattaggcctggtggaactgccatcaataaaccaaatgtgatcagggtgaggaacaggaaagaaggaaatatggggtgaatgtcaggtggatcagagagatacagtcatgagggtcaggtgtggtatccggaataatgtgggaggccgaattgaagtctgggccaggagcaatggtaattgtgggagactaaaggaagagtgagtatagctgaaggagccagggagcagaaattatatgtatcaggtgtgaggaagaaaatagattttggaagttatgagagctgcagagagtgagtggagcatagtttgtgatttttgagggcctctgaaagtattagggcggcagcagccactgcatggagacatgatggccagcctaaaacagtaaagtcaagttgtttggccaaaaggctacaggatgcaatcctggtccttgtgtaacaattctgactgcacagctctgcacttcggctgtgtgtaatgaaaagggttgggatgaatcagggagagctagtgggggcagtctctaaaactgtctttaaggaaaggaaagaggagtggggaaaggatttaggatctatggggtcagctaggtttccttttgtgagtttatatgatggttttgttaggatggcaaaaccatgtatccaaagttgaacgtatctaaccatgcctaggaaggaaaggagttgttttgtagacggtgttggggtttgagatatcagttggacatgatcagcagggagagcacgtgtgtctttatgaagaattatcatgaggtaggtaacagatgaagaaatttgagctttggagggggatacctgatatcctttggagaataaatgttgaaggagcaggagggtgtcttgttgagaatattcaaaggaggggctacaaagaagaaggtcatcaacatattgaataaggtgagaagcggaggggtggaaagaaagtaaatcatgagaaagagcttggctgaagtaatgagggctgtccccgaaaccttgcggcagcacagcccaggtaagctgctgggaccgatgggtgtcagggtcagtccaggtaaaagcaaagagaggctgggacgaggggtgcagcggaatagtgaaaaaagcatctttaagatcaagaacggaatagtgagttgtggaggaaggtattgaggacaaaagagtgtacggtggggcaccacgtggtgactaggcaaaacaatttggttgataaggcgcagatcctgaactaacctgtaagacttgtctggtttttggacggtaaaatgggggaattgtaaggagagtttataggttttagaagcccatgctgtagcaggcgagtggtaacaggctttaatccttttaaagcatgccacgggatgggatattggcattgagcggggtaaggttgattaggttttaaggggatagtaatgggcatgtgatcggttgccagggagggagtagaggtgtcctatatttgtgggttaaggtggggggatacgagaggaagacgcaaagcaggccttgggttgggaagaagggcggcaatgagatatggctgtagtccaggaatagtcagggaagcagataatttggttaaaatgtctcggcctaataagggaactgggcaagtggggataactaaaaaagagtgcataaaagaatgttgtccaagttggcaccagagtgggggagttttgaggggttttgaagcttggccgtcaacacccacaacagttataggggcaagggaaacaggcccttgaaaagaaggtaacgtggagtgggtagcccccgtatcgattaaacaggggatggacttacccgccactgtgagagttacccgaagctcagcatccatgatggtccagggggcttccagggtgatcaggcagcgtcagtcttcagccgctaagccaagcagatcttggaaggagtcagtcagagagtcttgggctagagctttaggggctctaggggtggctgccaggcgagctgggcagtctgatttccagtgggtccctgcacagatgggacacggcttgggaggaatcccaggctatgggcattccttggctcagtggccagatttctggcacttgaagcaagatcctgatggaggaagtcttgtaagaatgcttgactgctgtggcttaggtgtgtgcggcttaggcattttgaatttcttgtgtgctggaggtgtggctgggttttgtcttacagcagaggcaagtaattgtaactcagaaatgcgttgccgtctggctgcctcctctctattattgtacaccttgaaggcaaggttgattcattcctattgtggggtttgagggccagattctaatttttgaagttttttcctaatgtcaggagtggattggatgataaaatgcatattaagaataaggcggccttctggcccttctgggtctagggcggtaaagtgtctgagtgttgctgctaagcaggccatgaactgggcttggttttcgtctttaccttgggtagtttctttaagcttgtcataattaacaggtttgtaagctgcctttttaagcccttcaactaggcaggaaatcatgtaatcttgcctagctgtacctggggaatctgcctgatagttccattggggatcctctcggggaactgctctgatgccttcctggaggtatggctcgtgaagccggtggttatcagcgtgagattgggctagagaaaaaactctttcccgttcatctggggagagggtagaagtcaggatgacatttaggtcactccaggttaacttgtaggacaaagttagatatcggaattcctgtatatgtttagtggggtctgatgagaaagagcctaaatgttgactgatctgagagaggtctgatagagaaaaaggcacatgtaccctgactatgccttcagctccagccacctctctaagaggaaattgttgggcaggtggggaagagctagtcaaggaactaaactgtaagccggaccgggtgtgaggaggggaggtgacagaaagattatagggtggaggagcggaggctgaggaagaattgggacttagcttggcctggcgacgagcagcctggggaggaggggagaggtcagatgggtctgtagaaaaggaagactggaaagactcagcgacgcttggggttgggactgagggaacaggcaggagggagagaaggaggatttgggaggaatcgcattgggaacagagactagggagggaacgaagtgtgaaaaatgcctggatgtaaagcacctcagatcatttgcctattttttgacaaaaattatttaggtcttgtagaatggagaagttgaaagtgccgttttctggctatttagagccattgtcaagtttgtattggggccaagcggtgttgcagaagaaaacaaggcgtttaggttttaggtcaggtgtgagttgaagaggttttaagtttttgagaacacaggctaatggagaagagggaggaatggagggtggaagtttgcccatagtgaaggaggcaagcccagagaaaagagagggtagagacatggagagaagggggtggggggtgcttgccacccaggaaagtgaagaaggggtagagacacggagagaaggggttggggggttcttgccccccaaaaaagcattacttgccactaagggtgaaggaccaaggcaggcgtccctgcatggtcagacacctctgaaacgtgggtgaataatcaggcaggcgtccctgcgcgattaaacaccaagggaagactgtcttcccgagtccatgaccggcgccggaattttgggttcatggataaaacgcgtctcctttgtctctaccagaaaaggaaaggaactgaaattaagagtagggagagattaaagtgtggcaccaagattgaaaggagaaagaggttgaaggatagtgagagaggtgggagaagagagtgaaaagaggccattacccgatttaaaattggtgagatgttccttgggctggttggtctgaggacctgaggtcgtaggtggatctttctcacggagcaaagagtaggacaggggattgatctcccaagggaggtctcccgatccgagtcacggcaccaaatttcactcgcgtccatgtgaagagacgatcaaacaggctttgtgtgagcaataaagttttttactcacctgggtgtaggcgggctgagtccgaaaagagagtcagcaaagggcagataggggtagtggggccgttttataagatttaagtaggtaaacgaaaattacagtcaaaggggggttgttctctggtgggcaggggtgggggtcacaaggtgctcaatgagggagctttttgagccaggatgagccaggagaaggaatttcacaaggtaatgtcatcagttaaggcaaggaccggccattttcacttcttttgtagtggaatgtcatcagctaaggcaggaacaggccattttcacttcttttgtgattcttcagttacttcaggccatctaggcatatatatacatgcaggtcacaggggatgcgatggcttagcttaggttcagaggcctgacatgatccacctgcctcagcctcccaaactgctgggattacagacgtgagccactgcgcccagccggttttacaccttttagggagaaagttcatagatggattcaaagattttctgattggcacttggttgaaagagttgttattatctaaagacctggaatcaatagaaaggattgtctgggttaagctaagggagacaaagtttctattttgttattttttttttgacagggtctctgttgcccaggctggattgcagtggcacagactgtggtttaccgcagccttgtcctcccgggctcaaggaatctgcccacctcagcctcctgaatagctgggactataggcatgtgctgtcatcatgtccagctaagacggggtctccccatgttgcccaggatggtctgaattcctgggctcaagcgatccacccacctcggcctcccaaagtgctaggattacaggcttgagcaccaccactctggccattctaatgcagatgccgctccaggcagcaggcttcagagagaatagatggtaaacttttcttatcagagttaaaaaggtgccagagtcttacattctctcctggatcaggaaaagatgtggaaaaggaaggagattctctacaaagtagatttcccccaggagacagttttgcagggctacgtaaaactatgttaaataaatacatgtcagggtaaaatacttcgttttcttccagggcctgctatttgtcatgtgatgtatcttaatgctacagaccgtttggtcagccttaagttgtctgttttaacgtcgacgctggtcagttatacctgaattccaaagggaggacagtataatgggacatatccaaaccctgcttcccatcagggactgaactggtttttcagattaactttggcgttgagagactcagttcattcagttggttggggaggcttacaattttatttttggtttacaaggtatagataactatgcctatacctatatatacaaatgtttatatatgtatatatgtgtgtatatatggtttgttttacacaaatggatgcctactttatttattttggtagcgatgaggtctcaggctaatctcgaactcctgggctcgagatcctcctgcctaggccttccaaagcacttagattacaggcgtaagtcactgcgcccggtcctgcttcaccctcttaaaaccgcccttgggggctcctcatgagtgcagacattggcgcgttcctccaaaccgcacagactccccctgcgtggacgcgtctcgccgtctttactcctctttcgccgacctttcactttcagggaataccctctggcgcccttctctggagcacacacgtgaacgccgccggattccaagaagtgagatactgaggcaaaagttacgcgcgttcagaacaggaagaccccgcaaaacgccggccaagacgtggccccgcgtccaccctgcccacaagcagccgctcccactcgcggaccgcgccctgtgcctcagacttcggatctgtgtgatccactgtgtgcaactgtacccgaaagggtccccacgtgcactacctcgtgacaactaagatggaccgtcttctactcctaggagtcatccccagattagcggggctctcagaatccttggggcttccaatccggaagttccccgtcccttctgccccaacataacatggcgccgaccgcagccacttccgtgatccgcaggcgacgaagtcgcctggtcaggatcaaagatggccgagcgccctccacgcgcctactctcgcgggccactcccggctccgctttagctgccgctcttggtgagcgccgccgccagccaatcgcggggcgcagaggcctctggccccgccccgcggatcagctgagggagccgcaatgtctcttgacagcggcggcggcgcagccggttccgggttcggcgcggggcgggggtaagcgcggctggcgagggggctgcggcgggcggcgaagggggacctggttgcggccgtgggagggggcgcccgccggcgtccaggccgggctgcggggctgcgtgggcgcgggcggccgggccggggcccgcggggtggggcgggcgccgagtctcggcctctggggtcgggagtctccatgggcgtttccggggtctccgcagatgtgaatcccgatggagcggcccgaggaaggcaagcagtcgccgccgccgcagccctggggacggctcctgcgtctgggcgcggaggagggcgagccgcacgtcctcctgaggaagcgggagtggaccatcgggcggagacgaggtgcggggctgaggccggggccgggggccggggccgggcagagccaccgggttgcgggcaggccacacgggcggcggtgcagtgtgcgctccagatttttccgtggagtgaaatgtcatgtaagaactggtatttattcggtgttctgcccaccgattcttgcgcatgattcacgcacatcatttagccttcgttacaactgtataagttagttgtgttcatatactctccagaatgcaatattgtcacgttcgttgccgtacagagtatcttttctgactgtaatggaacgaaattaaaaataatagaaggaaaagtggaaaattcacagatatgtggacatgaaacaccacactcttaaagcaaccggtgggtcaaataagtctttacaacggggaccttgttttgagacaaatgaaacaaaaatagaatacaccaaaaggtatttaggatgcagccaaggcagtactcagagggaaatttatagctgtagtgcttatattaaaaaagatctcaagtcccagcccctagaatatttatttatttaataaacctggaaagctaaaaacttgaacaaagtcatacaacgggtgagagaaagttccctcagcctccacattcactgcctccagtctcccaagtgaccatctggttgtttgatttcctctgaagcctttgtatggggagagaaatgcgctggtcctgtcaacaaaaatgtttagtttgtctgaaaattaatgaattagctccgacattatactctaaaaaggagcgaggatgggaaatatttgctgtttggaagcaattttttttttttttttggttaatttcaccccttataatgtgcttgcacctggttttttttgtttttttgtttgtttttttgagataagagtcttgctctgtggcccagactggggtgcagtggtgtgatctcagctcactgcaccctctgcctcccggttcaagtgattctcccgcctcagcctcggagtagctgggactacaggcgtgcgccaccatgcctggctaatttttgtatttttagtagagatgagctttcgccatattgcccaggctggtcttgaacaactgaactaaagtgattcacctgcttcggcctccgaaagtgctgggattacaggtgtgaaccactgtgtctgacctggttttgttttttggggtgttttggtagtcttacattccagtatcaagtcaaagtttattttacaactttgaaagtatttagatatcatcataacatatcaaaattatccctttaagacaagaggaagtatttgaagatttttccctttgtctttacttgatagactaggaggtttggtgaagagcagaggccctagagacaaattatgtgggtttccaatctgtcaacacattactctgggctaacgacatctttctgcgcctatgtacctacttcatagatttgctctgaggagttaatgagatcatacacggactgcttagaaggaactttagcgttagcacttagcattagccattgttattgtaacatgttatacatgttattacatggtaggacattacatgttaagacaaggagagaaaatatgtcgttgagtttatcttttaataggaacgattttagtgaatttataaataatgttgccagcaaaaactttaagattattgtattagtttgttcatactaccatagcaaaatactacattctgggtggcttaagcaacagaaatttatttatttatttatttatttatttatttatttatatattttttgagacagagtctcactctatcacccaggctggagtgcagtggcgcgatctcggcccactgcaagctccacctcccgggttcttgccattcttctgcctcagcctcccgagtagctgggactacaggcgcccaccaccacgcctggcagtggtattttgtatttttagtagagacggggtttcaccatgttagccaggatggtctcaatctcctgacctcgtgatctgcctgcctcagcctcccaaagtgctgggattacaggcgtgagctatcgcgcccggccagaaatttattttttattttattttatttttttaatttttgagatagagtcctgctctgtcacccaggctggagtgcagtggcatgatctcggctcactgcaacttccctcttccaggttcaagcgattctcctgcctcagcctcccgagtagctgggactacaggcacgtaccaccacacctggcttatttttttctattttagtagagatggggtttcactgtgttgcccaggctggtctcgaactcctgagctccagcaatctgtctgcctcggcctctcaaagtgctaggattacaggtgtgagccactgtgcctggccagaaatttattttcatggttcaggaggctgggaagtccaagatcaaggtgttggcagattgggttcctggtgagggctctcttggcttgcaggtggccactttcttgctgtgtcctcacatggcagagagggggactctgcttgctctctctgcctcctcttaagagggcaccagccctgtgacatctgattcccacctagtgacctcatttaacatttatcagctcacaggccccatttccaaatacagtcacattggggattaggacttaaatatatgaattttaggggggtacagacactcagttacaaacattcagttcctaacagttgtagaacttgattattttatttatttattttatatatatatatgtatttttttttttgagacggagttttgctcttattgcccaggctgtagtgcagtggtgccttcttggctcaacctccaacctcccgggttcaagcaattctcctgcctcagcctcccgagtagctgggattacaagtatgtgctaccacgctcagctactttttgtatttttagtagagacggggtttctccatgttcgtcaggctggtcttgaactcctgacctcaggtgatccacccgcctcggcttcccaaagtgctgggattacaggcgtgagccactgtgcccggcctgatatatttattttttgagacggagtcttactctgtcacccaggctggagtgcagtggtgcgatcttcactcactacaacctgcatcttccaggttaaagtgattctcctgcctgagcctccagactagctgagatttcaggcgtgtgccaccacacctggctagttttttggtatttttagtagagatgaggttttaccatgttggtcaggctggtcttgaactcctggcctcaaatcaaatgatccacctgccttggcctcccaaagcgttgggattacagccatgagccacctcgcccagacagaacttgattattttaaagcaatgatgtgcctgccatttataaggcattatttgggggaaaagggaaagcctaggtaacgtgtaggaaggggtgcaacaaccttgttttcccaaagagctctttatccagtctggagtgcagtggcacgatctcggctcactgcaagctctgcctcttgggttcacaccattctcctgcctcaacctcccaagtagctgggactacaggcacccgccaccatgcccggctaattttttttgtatttttagtagagacagggtttcaccatgttagccaggatggtcttgatctcctgacctcatgatccacccgcctcggcctcccaaagtgctgggattagaggcgtgagccactgcgcccagtctttttttttttttttttgagacggagtttcactcctatttctcaggctggagtgcaatgatgtgatctcggctcactgcaacctccgcctcccaggttcaagtgattctccttcctcagcatccagagtagctgggattacaggcactcaccaccatgcttggctaatttttgtattttgtagagacagggtttcatcatgttggctaggctagtctctaagtcctgacctcaggtgatcctcccgcctcggcctcccaatgtgctgggattacaggtgtgatccaccgcgcccagccaagagctctttattctaagagagtggcagaaatgtacatcaactgcttgaaagatttaacccaccaagcgtcaagcgcagcaaatgctgtgaatagaactttagcacaaagcatctcggttccagattagaatgctgatattcaggccaggcacggtggctcatgcctgtaatcccagcagtttgggaggccaaaacaggaggatctcttgaccctatgagtttgagaccagctagggcaacatagaccctgtatctacaaaaacttaaaaaattagctgagcgtggtggtgcatattggtagtctcagctactcaggaggctgaagtgggaggatcacatgagcctgggagttcaaggctgcagtgagctgtgattgctccactgcaccacagctggggtaacagcgcaaggccttgtctcaaagaaaaaaaaaaaaacctgatgttctggcatggagacgcctctgttacaaactggctctggcgacaccgtgacttgcactggttttggggcttgaaggagactgtcctggcagttaacgctcaatggaatgggaagagcttgaccacaggtgatacttgccttggatacagtacttccaatagtacagaatgtttgcacaaataagatttttaatatccggtttcatggcagtatcatttacttgtagtaaaattcaccttttttggggttcagttccatgagttttgggaaatgtactcaccagtgcagtcaagatgtagaacatgttcgtcaccctgaaaggtccccctgagtcccggctcctggcagccactgatctggtttctttgccttctgctgcttccagcgtgtcgtgacacagggtcacagggtgtctgccatcatcttctgcgcctggcttctttccctggcacgcaccttgttgcatggatgagcagtttgctcctttctgttaccgggtagtgttctgtggtttggatgcaccatggcttgttagtttacaaccagtggatggacatttatactgcttcctgtttttgtaagaaataaagctaatataaacataagtgtgcagtctttgtagggacatacatttttctcttagctaagtaactatgaatggaattgctgggccacgtggccagtgtctgtttaacttgctgagaaactgccgcattgtttcccatgtgcttgtccattttgcagtcccacagcacagtacgagagttccaggttttccacttcccttttggccacttgtaggtggtcagtctttttttttttttttttttttgagacagcgtcttgccctgtcgccaggctggatttgcagtggcgcaatctcagctcactgcaacctccgcctcccgggttcaagccattctcttgcctcagcctcctgagtagctgggactacaggcacgtgccaccatgcccggctaatttttttgtatctttagtagagacggggtttcaccatgttggccaggatggtctcaatctcttgaccatgtgatccgcccgcctcggcctcccaaagtgctgggattacaggcgtgagccaccgtgcccggcccgtggtcagtattttcagccaattcttatttggtgtgtagtggtatttcatggttttaatttgcatttctctgaagattaatgatgttgagcattttgtcatgtgcttaatttgccatccatatctcttctttgataaagtgtttaaattgttttaagttgcattatttactttctatttattgagttatcagagttctctatacattctggatacaagatctttgtcagatatgtgttttacaaatatttccaccagtccatagcttgtcttttcatctttttaaacaatatctttgaagaacagatttttacttttttttttttttgagatggagtctcgctctgttgccaggctggagtgcagtggcacgatctcagctcactgcaacctccacctcccatgttctcccacctcagcctctcaagtagctgggattacaggtgcatgctaccatgcccggctaattttttgtatttttagtcgagatggggtctcatcctgttggccaggctggtctcgaagtcctggtctgaagtgatccgcccgccttggccacccaaagtgatgggattataggcgtgaaccaccgcccccagccttactttttttgttgttgttgagccagagtctcgctctgtcgcccaggctggagtgcagtggcgtgatctcggctcactgtaacctccgcttcctgggttcccaccattctcctgccttagcctcccgtgtagctgggattataggcgcccgccaccatgcctggctaagttttgtatttttagtagagactgggtttcaccatgttggtcaggctggtcttgaactcctgaccttgtgatccgcccgcctcggcctcccaacgtgctgagattacaggtgtgagccaccacgcctggcccagaattgactttttttttctttttttgagtcggagtcttgctctgttgcccaggctggagtgcagtggcaccatcttggctcactgcaagctccacctcctgggttcacgccattcttctgcctcagcctcctgagtagctgggactacaggcgcccgccatcacgcccagctaattttttgtagttttggtagagacgtggtttcaccatgttagccaggatggtctcgatctcctgaccttgtgatccgccccccccttggcctcccaaagtgctgggattacaggtgtgagccacggcacctggcccacattttacttttgacaaacctcagcttattattattattttttcctggtttgtgctttttatatcctatctgcgaagtccatgcaagacccaacggcactaagatttttgcctgtcttttccactggaagtttcatagttttagattttacatttgtctctgtctggccatccttacacagccacaatactgtattgtttactatagcatgatggtaagtcagttaagtaatatgagtcttccagcttcattctttttcaaaattgctttggtttttctacacgttttttctgtgaactttagaatcagcttgtcagtgtctacaagccctctgggattttgactggaattgcattgaatgtatgaaacaatctggaggacagctgacattttaacaatactgagtcttctgattcacacacccataggtcagtgatgggagcaaggctcaggctaaagcagattcagggtgtctttctgtgtggaacgtttaggaaaagtatgtttgcatgccactgtctcctgaccaaacccttcgcttttttgtcttctagtatctttatgtatccttatagattattataggcagtaatgattaatgatgagatattaaaacgcctttgttcttttgatttaaggagagggcaagtattgaggattttccctcttgcttttgtattcagggccgggcgctggtggctcacgcctgtaatcccagcactttgagaagccgaggcgggcatatcacgaggtcaagagatcgagaccatcctggccaacattgtgaaacctcatctctactaaaaatacaaaaattaactggccctggtggtgtgcgcctgtaatcccagctactcaggaggctgaggcaggagaatcgcttgaacccgggaggcagaggttgcagtgagctgagatcgtgccactgcactccagcctgggccacagaaagagactccgtctcaaaaaaaaaaaaagaaaaaaaaaatcccaaagtgtcagaattactgtattcagctatagatgcatccctgtatataagatgcagtttcttatacgtgtacaaatgcctatcgcaggccaggtgcggtggctcaagcctgtaatcccaacactttgggaggctgaggcgggtggatcaagaggtcaggagttcaagaccagcatggtgaaaccccgtctctactaaaaatacaaaaaattagctgggtatggtggcgcatgcctgtagtcccagctgctcaggaggctgaggcaggagaatggcttgaacctgggaggtggaggttgtggtgagccgagatggtgccactgcactccagcctgggcgacagtgcgagactccatctcaaaaaaaaaaaaacaaacaaaaacaaaaaaaaaaacaaatgcctatcacagttggctcagtcactttttctgtgactgtcattgcttcaattttatgttgatttatgaaacctaagtttacacagaaaagaaattaaggactaaattaagatactgaagaattacttaagcccctgagtttttttttttctttttttttttttgagacagagtcttgctctgtcacccaggctggagtgcagtggcgccatatcggctcactgcaagctcctcctcccgggttctcgccattctcctgcctcatcctcctgagtagctgggattacaaggcgcccgccaccacgcccggctaattttttgtatttttagtagagatggggtttcactgtgttagccaggatggtctcgatctcctgaccttgtgatctgcccgcctcggtgtgagccaccggacctagccaaccccctgagtttttttaaagttctaataatactcatcaggttagctgtgtatgcaagcatattgtaaaattgcttttttttttttttatttccagttggagtctagctctgtcgccaaggctggagtgcagtggcgcgatctcagctcactgcaacctctgcctcctgggttcatgcgattctcctgcctcagcctcccaagtagctgggattataggcaaccgccaccatgcccagctaatttttgtatttttagtagatatggggtttcactgtgttggccaggctggtctcgaactcctgacctcgtgatccattcacctcagcttctcaaagtgctgggtttacaagtatgagccactgcgcctggctgtaaaattgccatttaagaggctgtgtgtaactggaggtattgatgggtgtctttgagagggtggggattcagaaaggttcaggatgggccgggcgcggtggctcacgcctgtaatctcagcactttgggaggccaaggtgggcagatcatgaggtcaaaagatcgagaccatcctggctaacatggtgaaaccccgtctctactaaaaacacaaaaaattagccaggcgtgatggcgggcgcctgcagtcccagctactctggaggctgaggcaggagaatggtgtgaacctgggaggcggagcttgcagtgagccgagatggtgccactgcactccagcctgggcgacagagcgagactccgtctcaagaaaaaaaaaaaaatttctttatgtctttcttggtcaagtgtttttttttacatatgtacaatggggatcctgagttggaaccacatactttggtaaacaaagtgcagtagtgttcacagttaccacgatcatatcccgtgttgacccaccctctcttttttaggttgcgacctttccttccccagcaataaactggtctctggagatcactgtagaattgtagtggatgaaaaatcaggtcaggtgacactggaagataccaggtgagtatgttctgagcttcttttggtgtttcttcttgtagcttaagaagcctgacttcgtgctctgtgctgtgtgccacggctgaggaggagaagaaatgctgtctttagtgtgataacagcggctcatttttataacagcacagtcatgtgtcccttagcaacagggatccagtctgagaaatgtgtcagacaatttgatcatcttgcaaacatcatggagtatacttaaacaaacctagatggtgtagcctactacatacctaggctatatggtatagccgattgctcctaggctatcaacctatacagcgtgctactgtactgaatgctataggcagttgtaacacaatggtaagagtatttatctaaacacagaacaggtgcagtaaaaatatgatattttaatcttgtgggactcctatcgtatatgcgtctgttgaaaaaaacattattatcagcccgggcgcggtggctcacacctgtaatcccagcactttgggaggctgaggcagttggatcacctgaggtcaggagctcaagcccagcctggccaacatggagaaaccctgtctctcttaaaaatataaaaattagccgggcgttgtggcatgcgcctgtaatcccagctactcgggaggctgagacaggagaatcacttgaacccgggagtcggagattgtggtgagctgagatggcaccactgcactccagcctgggaaacgagtgaaactccatctcaaaacaaaacgaaacaaaagtttattatctggggcatgactgtagttaattaggctcccaaggtattagaagatgtatttcctggtttccaggatgggacacttagtgacactttggtgtctatgacccttcttgaatgtattcaaattaagtatgtctcagaaataagacttaaaagatgctggtaatttttggttcttgcaagcctattcaagtttgatttctttccctcaaatcaaaaaatcattttttaaaactaataaattctcgttcttgtacaactgaagtacagattgagtatctgaaatgattgaaactagactgtttagattttggattgtttcagattttagaatattttcattatacttaccagttgagcatgtctgaatcaaaattctgaaatgttccagtgagtatttttttgagtgtcttgttggtgctcaaaaagttttggatttcacatttctgattagggacattcagcttagggatattcaacttggaaagtggaaagctttccaaaatcctattcatacgttaaaaatgcatatgttggtatatatattttgcataaatgcaatcacactacacatactgttgtagcgtcagcttttttctttctttcttttttttttttgagatggagtttcactgtgttgcaggctgaagtgcagtggtacgatctcggctcactgcgacctccgactcccaggttccagccattctcctgccccagcctcccgagtagctggcattgtaggcacacactaccaagcccggctatttttttgtgtttttagtagagacgggatttcaccatgctggccaggctggtctcgaactcctgatctcaggtgatctgcctgcctcagcctcccaaagtgctgggattacaggcgtgagccatcgcgcccggccagcttttttcacttacggtgttttatggagcgcttcacatgtcactgcatctacatccagctcatcttttcattatcttaggatagtttctttgtcacttcccttattggtggacatttattgttttgactttttcttactataaataacactgcagtgactctttcccaaactctgccttcatgtctgttttcttgggatgatttctcggaagggaagtctgtgtcagtgttactcagaatgtgcctattcctttttttctcttttttgagacggagtctcgctctgtggctcaggctgaagtgctgttggtgcgatctcggctcactgcaacctccgccacccgggttcaagcgattctcctgcctcagcctcccgagtagctgggattacaggtgcccgccgccacgcctagctcagatggggtttcacaatgctagccaggctggacttgaactcctggcctcaggtgatccacctgcctcagcctccccaagtgctgggattgcaagtgtgagcccccacacccggccagaatgtgcgtcttttaaatctgctgcaagtggcaggtggtcttctagcagtatgttgagagtgtgctgttctcactgcaggattttttttgtttggtaaagatcaggctctgtgagattctttggtaactgatagtttcagggatagaagactaggaagtaggttttaataggaagaactgatgctccgtttcctagtctaatagatatcagattaagttctctatttcttggcacaatgggaaaggcagggtgctggtccctagctgtcccgcctgcttcagggcctggcttccccatgctgggtgctggtcctgggctttcctgcctacatcagggcctggcttctccacgctgggtgctggtcctgggctttcccgcctacatcagggcctggcttccccgtgctgggtgctggtcctgggctttcccgcctacatcagggcctggcttccccgcgctgggtgctggtcctgggcagtcccgcctgttccagggcctgggttccctgcactgggtgctggtcctgggcagtcccgcctgttccagggcctggcttccccacgctgggtgctggtcctgggtagtcccgcctgttccagggcctggcttccccgcgctgggtgctggtcccgggccttcctgcctgttccggggcctggcttcctcgcgctgggtgctggtcccgggcagtcccgcctgttccggggcctggcttccccgcgctgggtgctggtcctgggcagtcccgcctgttctggggcctggctttcccacgctgggtgctggtcctgggcagtcccgcctgttccggggcctggcttccccgcgctgggtgctggtcctgggccttcccacctgttccagggcctggtttccctgtgctgggtgctggtcctgggccttcccgcctacatcaggacctggcttccccgcgctgggtgctggtcctgggcctttctacctgttccagggcctggcttccttgcgctgaatgctggtcctgggcctccctgcctgttccagggcctggcttccccacgctgggtgctggtcctgggccgtcccgcctgcttcagggcatggcatccctgtgctgactgcatggtggtggtactttcttatggctattgtaatttaccacaagcttaatggatttaaaaaacacaaatttgctgtcttactatagttatggaggtccagagtccgatatgggtctgatggggctaaaatccaggtctgaacagggctggtttcttctggaggctccaggggagaatttgttctctgccttttccaggttccagaggtgccacgttccttggcagaggtgggctggaggggaggggtgctcaggcagaaggaaccacgtgtgtaggggcccctgagcataagcagggctgtgtggtcggagcgtgtggtgagcggcaaagtcacacaagggagcttgggctttagcctgagagcagtgaggagtcatcaaaggggtgtaagcggaggagtgaaataatcagatttttgtttggaaagaacaggaggatgagtgatggctgcagtcgcccctcggcatctggggggattggctccagccccctgcatgcacccaagtccgtgcacactctagccccgtagccagccctgtggagcaggaggacacagaaagtcagtccagctccagcgcccctgcatgcacccaagtccgtgtgcactccagccccgtagccagccctgtggagcaggaggacacagaaagtcagtccagctccagcgcccctgcatgcacccaagtccgtgtgcactccagccccgtagccagccctgtggagcaggaggacacagaaagtcagtccagcatatgtgtgggattcattccctctcattgaaaaaaacccgtgtataagtgcatctgcacagctcaaaaccgcatcttccagggtcagctttgtgttgtaacagcagaactcagacacacacagccactgcctggtttcggaggttttacggggagacggctgtggcagttcatttgcttactgtctgcatttgctttcctgctacagacggcagagctgagtagtggcaatggtgaccacaaaacctacactgtttaccctctgtttatggaaatcgtttgccactcccatccctcagcaaaccgtggtggtcactcggatgtgagttctgtccactgctggggcctcgggagtgaagctgcagagctgaggcctgtgtggtttcagtcgttttgcccggttgccgttttgtgtgtcgggtatgctgtgctcttggatcttggtcacctgaccaacacctgatttgctgtcaggtctctgctcagaagtccccaggaggcacttcctgccccatcaacttagcctcctcctgtctgtccctgggtcagcagcatctgcattggcctctccctgggcagagtacctcaaggggcttggcagccagaccacaagctctgagtgcagggccatgtcctgcagctgacggcccagcatttagtccgcttctgcccagagccagtctcttgggagggatcagtactcattggaggcatgagttcaccggggttgtgatggctgcaaggaacagaactgtggatagcacaagtccagctcaggggaggctggaggtggaagcaccacactgtagacgaggcctccgggtccactaggaggcaaacggggagagaacccagccctgcagcagcagagctgccaagcacgtgaggaggtgtagtggctggttaggctgtcagtcagggagaagtgggcgagccatttcttgagagaatggtgaggggtgcgtggatgtgtgcatcgttacgtatttacactgttcctatgagtatttccagagtggtcatatcgagctgcttgctaatggtgctagaaaaaaaatcttgtaactccaagttattttaagtagaataaattgtgtttttgtttttttacagcaccagtggaacagtgattaacaagctgaaggttgttaagaagcagacatgccctttacagactggggatgtcatctacttggtgtacaggaagaatgaaccggaacacagtaagagagaggaaggcttgccggggtcagacccgcacgggggtgcacgtgagggcgctctctgaacgttcctcctggctacatcccttcccataggaacgttcctcctggctacaccccatttcttgctcacatgggttcctgccgtgaatagtgtctgttgagtgggagtgtcgactttgcagcctgagcccagccattcctcaggaataccactgtggccatgagcagccaatcccaaaatggcagccaaggagaaactgatggggatggtttgggttctacaggagaagaacttgagttatggggaataaaacctaggaccaggggtctggaggccattgatggttctgcttttggagaccttacaagaaacatcaaaggttagactggattccagtaagttttttcagctccagaagtcccgtttttgttttgtggaagaacagtataggacaaggaaagttatgggagtccttcgaaggtcacccctgaaatacttttttttttttgagatagagtttcgctcttgttgcccaggctgaagtgtaatggcgcaatctcagctcaccgcaatctccacctgccgggttcaagcaattctcctgcctcagcctcctgagtagctgggattataggtgcccaccaccacgcccggctcatttttgtatttttagtagagacggggttttgccatgctggacaggctggtctcaaactcccgacctcaggtgatccacccacctcaacctcccaaagtgctgggattacaggcatgagccactgcacctggccaatacttatttatttaattttttaaataaataagagacagagtctcgctctgctctgttgcggaggctggagtgcaatggcgtgatctcagctcactgcaacctccacctcctggtttcaagcgattctcctgcctcagccttccaggtagctgggattacaggtgcacaccaccacacccggctaatttttgtatttttagtacagacagggtttcgccgtgttggccaggctggtctcgaacttgggacctcaggtaatccgcccgcctcggcctcccagagtgctgggattacaggcaagagccactgcacctggccacccctgaaatacctaaagaccacagtggtgagggagaatggggcaaatatgtcttaggcatcttcagcataaacttaaccagcccctggccacacggaaggatcttgtatctgctcctttgtgtagtttgaaattataagtgaggcatagattcttcaccttcttctgcctcctgatgccattttttcccgaggcttatttcttttgtgttggtagagatgttttagattacttgttttgaaatctcttaaactgatgaatttgttattagctgatgagtcaaaataatcaacaaaaacaaatggactggagaacagaagagaaaaatgagttctcagtttgcacaggggccaccacttttctgatttgattgattttcttttagacgtggcatacctctatgaatctttaagtgaaaagcaaggcatgacacaagaatcctttggtaagtaagagtgtagcaaagaagtgggtgcatgttaggagctatagcattccttttgtgttttgagatggagtctcgctctgttacccaggctggagtgcggtggcgcgatctcagctcactgcagcctccgcctcctgggttcaagcaattcccctgcttcagtctcccattttttttttttttttttttgagacggagttttgctcttgttgctcagcctggagtgcagtggcgcgatctcggctcactgcagcctcctcctgccgggttcgagagattctcctgcctcagcctcccgagtagctgggattacaggttgcaccgtcacgcctggctaattttgtttgtttgtttgtttgtttgttttttgagatggagtcgcgctttgtcgcccaggctggagtgcagtggcgcgatctcggctcactgcaacctccacctcccgggttcatgccattctcctgcctcagcctcccgagtagctgggactacaggcagtcgctaccatgcccagctaattttttgtatttttagtagagatggggtttcaccgtgttagccaggttggcctcgatctcctgacctcgtgatctacccgcctcagcctcccaaagtgctgggattacaggtatgagccaccgcgcccggcacgcctggctaatttttatatttttagtagagacggggtttcaccatgttggtcaggctggtctcgaactcctgacctcaggagatacacctgcctcgacttcccaaagtgctgggattacaggcctgcaccaccgtgcctggccttggggctgttgcattcttaagagcatttcaatccctagagtgtctgcttgagccctggttgtgtgctgcttctgctccttttgggttacagaagctaacaaggaaaatgtgttccatgggaccaaagatacctcaggtgcaggtgcagggcgaggggccgatccccgggtccctccgtcgtcgcccgccactcaggtgtgctttgaggaaccacagccatcaacatcgacgtcagacctcttccccacagcctcggcctcttccacggagccttctcctgcagggcgagagcgttcctccagttgtggtgaggtcacatctcatgaggtcttggtgctggttgcatggtttttgttcactactctttacctgtgttgttacagaggcagataagcgactgaggactggcatgaggttctcagtagtgagatttctgtaggagtcaatattgagtgtgttgttcccttcacttcccaagagaagtgaagatcagggactctagtaccattgtgtattttgcagtttcattgagactataattcgcataccataaaagtcatccagccgaagtgtacatttcagtggattttagtacatcacaaggtgtgggaccatcaccactcattgacacgaaaaggaaaccggtgcccaccagcagtgactccacatgtccccttcccctcggccccaccagcagtcactccccatgtccccttcccctcggccccaccagcagtcactccccatgtccccttcccctcggccccaccagcagtcactccccatgtccccttcccctcggccccaccagcagtcactccccatgtccccttcccctcggccccaccagcagtcactccccatgtccccttcccctcgaccccagcagcagtcactccgcatgtccccttcccctcagccccagcagcagtcactccgcatgtccccttcccctcggccccaccagcaatcactccccatgtccccttcccctcggccccaccagcagtcactccccatgtccccttcccctcggccccaccagcagtcactccccatgtccccttcccctcggccccaccagcagtcactccccatgtccccttcccctcggccccatcagcagtcactccccatgtcccctccccccagcccctggcagctgcgtgtgctttcggcctctggatttttctgttctagacacttcacagacatggaatcatgcgtgctcttttttgttgttgttgagacggagtctcgctctgtcgctcaggctggagtgcagtggtgcgatctcggctcactgcaagctccgcctcccaggttcacgccattctcctgcctcagcctcccgagtagctgggactacaggtgcctgcaaccacgcccagctaatttttttttgttttttgtttgtttgttttgagatggagtctcgctctgtcacccaggctggagtgcggtggcgcgatctcggctcactgcaagctccgcctcccacgccattctcctgggtccacgccattttcctgcctcagcctctgagtagctgggactacaggcacccgtcaccacgcctggctaattttttgtatttttagtagagacggagtttcaccgtgttagccaggatggtctcgatctcctgacctcgtgatctgtccgatcggcctcccaaagtgctaggattacaggcgtgagctgccgcgcccagccgtgactgggctctttcacttagcgtggtgttttcagagttcatccagaagaggatgttatttaaaactagttttgcagatgctgttccttacggcatgactcttacctcttccatggtcattgggaagaaattccatctgggtgcagcgtgacgggaatgttttctgttttcttttagggtttgtcacgtggaggatgtgtacatatggattctctaaattggatcgcgctatacatattatttttttttaattttcttagctattctctattctagattatgttttgaattagcttttccagtttaatagaaaaatctttttgagatttttgatttggggagaattgacagttttacagagcccaggaaaatggtgtttctccttgtttgttaagctcttcctgttcttcagtgaagtctcacggctttcttcgtgtcgtctgggctcattcttagtcctggagtgcttggctctcgcgttcttacattccatagcagtctgcagattcctatgaacagaagagcctctgaatctcagattaggctgtgtttcgatctgacaggaaagctggttccctgataaaaagtccagaaatgcccgctcagctcagctactcctgaggtcaccagggccttctgtgcactccacgctgctgtttttgctcaggtttttgcctcgaggtttcacagtggctgccagagctctgaacatcactgacacattcatggcaggcaccaggaagcctccggagaagggacctttgctttccatggatctgttggctgatccgcagcagcaagagccatgtctcccagaagactgctccctctgtctcatgagccagcctggctgctctgctacaggacactccttgtttttatgtctctctgtgtattccagtgggatttggggaaggagcggcatcgggtgcagggactcagtgtgccttcttgaaaccagaaacctctcacgctctctgggcctgtttccacttctgttgatgtggtttttactccgttgtatgccgttgctctgtcttcacacgggcagccacacctctcctgttcgttgatgttcttgaggccttgttgcatccgctccttccttcttcagaggctcctttggatgagcccagctcctcagcagcagagtgctctttattttctgtttttttgagacagagtcttgctctgttgcccaggctggagtgcagtggcgcaatctcggctcactgcaacctccgcctcccgggttcaagtgattcccctgcctcagcctcctgagtagctggggtcacaggcgcgcaccaccaccacgcccagaaaatttttgtatttttagtagagacgttgttggccaggctggtcaccaggagcagagtgttctaaaagcatacctcagtctgatggatgacatcccagccatctgaagagtaacatccagatgtgttgtaacattccagtgtgttgtaacattcctgtaacattccaatgtgttgtaacattctggtgtgttgtaacattcctgtaacattctggtgtgttgtaacattccggtgtgttgtaacatttggtgttacgcggtgtgttgtaactttctggtgtgttgtaactttctggtgtgttgtaacattctggtgtgttgtaacaatcgcggtgtgttgtaacatccggtgtgttgtaacattccagtgtgttgtaacatttggtgttacatgctgtgttgtaacattctggtgtgttgtaacattcccggtgtgttgtaacgttccagggtgtgttgtaacattccggtgtggtgttccggtctgttgtaacattccaacattccggtgtgttggtgtgttgtaacattccagtgtgttgtaacatttggtgtgttgtaacattccggtgtgttaacattccggtgtgttgtcacattctggtgtgttgtaacattctgatgtgatttcgggactcacctgggaggacttctcaggtgctaattggggacactaagttgcaggcaagactgtggagagtgagtgctatgtagtttccacctgatatttctggagataagaggaacagcggagaccaaacccatgacagacaagtttctactagcctgtctcctgtagactaaacacaaccccggcttctcagagcctctttgatttacctttgttttaacatcataaccttaaatttatgagtgaaagaaaataacacttcaagatgaaagcatctcagcactgggcacagtggctcacgcctgtaatcccagcactttgggaggctaaggtgggcagatcccttgagcccaggagttcaagaccagtttgggcaacatggtgaaaccgtatctttacaaaaaatacaatataaaaaatacaaaaattagccgggtgtggtggtgcatgcctgtaatcccagctacttggaaggctgaggagggaggattgcctgagcctgggaggcagaggttacaatgtgctgagattgcaccactgcactccagccttggcaacaaagccagagcccatctcaaaaaaaaaaaaaaaaaaaaaaaagacctgtaatcccagcactttgggaagccaagacaggcgaatcacttgaggtcaggagcttgagacctacctggccaacatggtgaaaccccgtctctactgaaaatacaaaaattatccaggcatggtggcaggcgcctgtagtcccagctactcaggaagctgagacaggagtttcacctgagagaggaggatcacctgaggctgggaggcggaggttgcagtgagccgataccgcgtcactgcactccagcctgggcgacagaccaggtctcaaaaaaaaaaagaaaagaaaacatgccagatttgaatagccacctgaatgctgaagttttaccagctctcttgggctgtgtacccttcatcgtatcttccaggttccttaaaacctacccttgggcacagctgggatgtgcactggctcttcacagctagatccagcatgcactgactctccccgtgcagggacagccccagaggaatagaggtggcgttccggccgctccagcgtggcccacagcgtttcaagtgcagcaagcacagacaggacgcggggttactagtattttggattgactgcagattttgaactgtctgcctagatgaactataccatgtccctagggccaagtcccatgtgcattttgtggctactagaccctcttcagaaatcaaacacaaaatagctctggcctgtaaagaaaacaaacttcaccagtaaaattgtttcctgttcctatccaccaatgtgcatagcacagtgtgtagtctgggtaatacggtttgcataattttttgataatgttctacttaaaaagggcagcgtatttatatattacttatgtaattaaaaaaaaaattcttctggccgggtgtggtggcttacgcctgtaatcccagcactttgggaggccgggtggttggatcgcctgaggtcgggagttcaagaccagcctggccaacatggcaaaaccccatctctactaaaaatataaaaattagccaagtgtggttgcgggcgcctgtaatcccagctactcgggaggctgaggcatgagaatctcttgaacccaggaggtggaggttgcagtgagccaatatcctgccactgcactccagcctgggtgacagcacaagactctgtctcaaaaagaaaataaaaataataaaaaataaaaattcttctatctgtatgcctaagtgtatgcatactaacaaaataagtatagttactgcttattgagcagctactaaatgtgaggcagtgtgccaggtacattctgtaagtggtaagatggtgctcctctccacgttggctgagcacggggcgctggagatgatggcgtgagtgggtgccggctgggggccggcccacaggctgtctctttccttctgttcgtatatgaggtggtttgtccccaaaactattctgttttctttcagctgctgtaagccagtttcttgtgtttttttttttcaaataataacacttacatttgaatactgtaagctagatatgtattatgctgtaatatgataaactaagtctttattaagatataggttattcacacctgtaatccttattcacacctgtaatccttattcacacctgtaattccagcacttggggaggccgaggtgggtggattgtttgggctcaagagtttgagaccagcctgggtaaaatggcaagaccctgtctctaccaaaaatacaaaaaacaatttagctgggcatggtggtgcacacctgtagtcccagatactcaggaggcagaggtggaaggatcgctttagcccaggaggcagaggttgcagtgaatgaagatctcgccactgcattccagcctgggtgaagagtgagaccctgtctcaaaaaaaagatagaggtgattagaaagtctgcctgtttttctgccaaggtcattcctgtcgttatgactctggcttcttgctcgtggagatagcgctctccctacaagtcactgtgctgtatccttcccgttatcacacctcttgtaaaatagttcacacgcagcaccatctccacccgttggaagctatgcatccctccactggagcatctgtgctttacacagacttctgtttttttttgtttgtttgttttgttttactttgtttttttgagacggaattttgatcttactgcccaggctggagtgcaatggcgcgaacttcgttcgctgcaactccgcctcctgggttcaagcagttctcctgcctcagcctcccaagtagctgggttacaggcatgtgccaccacacccggccaattttgtatttttagtagaaatggggtttcactgtgttggtcaggctggtctcgaactcctgacctcagatgatccacccaccttggcctcctgaagttctgggattacaggcatgagccaccgcgcctggcattttttttttttttttaagaaatgaggtcaggccgggcgcggtggctcacgcctgtaatcccagcactttgggaggccgaggtgggtggatcacgaggtcaggagatcgagaccatcctggctaacacggtgaaaccctgtctctactaaaaatacaaaaaattagccgggcgtggtggcgggcacctgtagtcccagctactcaggaggctgaggcaggagaatggcgtgaaccagggaggcagagcttgcagtgagccaagatcacgccactgcactccagcctgggtgacagagtgagactctgtctcaaaaaagaaaaagaaaacaaaagaaatgaggtcttggccaggcacagtggctcatgcctttaatcccagcactttgggaggctgaggcaggtggatcatgaggtcaggagatcgagaccatcctggctaacacggtgaaaccctgtctctactaaaaatacaaaaaaattagctgggtatggtggcgggtgcctgtagtcccagctacttgggaggctgaggcaggagaatggcgtcaacccaggaggcggagcttgcagtgagccactgcactccagcctgggcaacagagcaagagtccgtctcaaaaaaaaaaatgaggtcttgctctgttgtgcaggttgggagagtgatgtggtcatggctcactgtagcctcgaactcccgggctcaagtgatccactcacctcagcctcctgagtagctgggaccatatgctcgtactgtcacgcctagttaatttttttttcttttttgtattttttgtagagatggtgccttgctgtgttgcccaggctggtctaaaactcctgggatcaagtgatcctcccaccttggcctcccaaagtattgtgattacaggtgtgagccccatgcccagcctcagacctctattttttatttttatttttttttccccagagggagtttcgctcttgttgcccaggctggagtgcagtggcacgatcttggctcactgcaacctccgcctcccgggttcaagcaatttttctgcctcagcctcttgagtagctgggactacatgcactcgccaccacgcctgtctaatttttttgtatttttagtagagatggggtttcaccatgttggccaggctggtctcgacctcctgacctcaggtgatccacttgcttcggcctcccaacgtgctgggattacgggtgtgagccaccgcacccggcccaaagctctgttgtaacaagtttatgacacagtgtgtatcatatgaccacgggtatgtgggtttgccctgcgttagactcggtgctcgagggctaagcctggtcacagacatctccgcatttgtttctctgcaaatgggctccttgcccccagctccaccccacgtagagataggcacaaatagagttaagatgtgagttgagtgagcacacactcctcgtaagccacttgtcattcctaaactacgacatctcaggctgccagctgcactgggctccagtcagtgacaccttacaggcatggttctctcctgagctggatggatcagcacctatcttgtttgattcctctcacagggtctgggggtggtggcatctcccctaaaggaagtggtccctctgtggcaagtgatgaagtctccagctttgcctcagctctcccagacagaaagactgcgtccttttcgtcgttggaaccccaggatcaggaggatttggagcccgtgaagaagaaaatgagaggaggttagtgtctggttgtgtgtgtcctcagtcctctcgtgtgctcctggggcatgcgggggccgctgccatgctccgtgctgtggggcattgcttcctgcaggggcatgtggaccctgcctcaggttgatgcctgtaacacctccggcattttcattcagaaaacctgggcctgtttttttgcggtttgcataatccagatagaactgtgatttgctacaggctgttctcttggtctggaaatagtgcattctgaattgcagaattaatctcaaaatcctccttcctggccaggtgcagtagttcatatccgtaatcctaacactgggaggccaaggcaggagaatcacttgaggtcaggcgttcgagaccagcctgggcgacagagcaagactttatctctaaaaataaaaatcaagcctgacaccgtggctcccgcctataatctcagcactttgggaggccaaggtggacggatcatctgaggtcaggagttcaagaccagcctggccaacatggtgaaactccgtctctactaaaaatgcaaaaattagctgggtgtggtggtgcatgcctgtaatcccagctacttggaaggctgaggcaggagaattgcttgaacccggcaggtggaggttgcagtgagccaagactgtgccattgcactgcagccggggcaacaagaacaaaactccatctcaaaaaaaagaaaatcaaaaagaaagccctctgtcctggtaggacaataatttctaaaaatgtagcttaaatcttcacattgaagatgatttagggagaagtctgcactttgaaagccaaagttaagattattagaaaacatttgggaatgttatggtagaagcattgctgtatagcagtccagagagcagccagccactggggcactgtgacaggaaggttctaggaggggtccccagggaaagaaattaggttatctgacacgtggggttgatcggtgtggggaaggtgtggaaagagtcagcaacagttacacaggaaaaataagcacaggaatgaggaaattttaattctagcaaacatgaaaaattgtgtaagtcacacaacttaatctagtaaactacttggctcagcagtgaatacttgcataagcataataatacaaatacagtatcatgaactaatgtaatctgttaatgtaatgttggcaggggtgtctcaggacagagtttttctctaccttaatagatgtcaggaatgatgtctaaaattgataaatcaaatgtaccatgataacttagaaacacagaggtaaataccagaagaaacagctcaaagacatgaaaatagttttcctccgaggagggaaattgggtgaggagcggctgagacggagggtgactgcctttgttttcttctaaatatattatgtatacatttttttaagagacaggatcttgctttgtcacctaggccagagcgccgtggtgcagtcttggctcactgcagcctccacctcctgggctcagactgtcctcccacctcagccttccgagtagctgagaccacaggtgcacgctaccatagctggctaattttttttcccatttttttagagatggggtttcattatattgcccagactggtcttgaactcctgggctcaagcgatctgcccacctcagcctcccaaagtgctgggattacagttgtgagccattgcacctggcttcttctaaatacttggctttttaaattgtgtacagtttctttaattaaaaataaaaattaattgattaccaacatctgagcattatagaaaaataaaaacaccagaagagggtggggcgcggtagctcacacctgttaccctagtactttgggaggccgaggcgggtggatcacgaggtcaggagattgagaccatcctggctaacacggtgaaaccctgtctctactaaaaatacacaaaattagccgggcgtggtggtgggcacctgtagtcccagctactcaggaggctgaggaaggagaatggcatgaacccgggaggcggagcttgcagtgagccgagatcgcgccactgcactccagcctgggcgacagagcgagactctgtctcgaaaaaaaaaagactgcatgtatttccttctcggttacgacagttagaacacatccctttctcctgtggacggggaccttgacctgaacctgcgtgtatttccttcttggttacgacagaacacatccctttctcctgtagatggggaccttgacctgaacgggcagttgttggtcgcacaaccgcgtagaaatgcccaaaccgtccacgaggacgtcagagcagcggctgggaagccagacaagatggaggagacgctgacatgcatcatctgccaggacctgctgcacgactgcgtgaggtgcgaccgtgttcacccttggctcacggaacatggcactgcaggttcttcgtcccgtgtggggcagggctgggcatgagacaagcctgcaggtcctgtttggcctggcatctgctgaggttactctgtcacccagataagtgggtggagtgggtggagtgggtggagctttctcagcccactgcaacctctccctcccaggattgagcggttctctgacctcagccttctgagttgctgggactacaggtgcacaccactatgcctggctgactttttttttttttttaatgttctaaatattttttattcctttttttttttttttttttttttttttttagatggagtctcgctctgtcaccaggctggagtgcagtggcacagtcttggctcactacaacctcagcctcccgggttcagacgattctcctacctcagcttcctgagcagctgggactgcaggcgtgtgccaccatgcccggctaatttttttgtattttttagtagagacagggtttcaccatgttggccaggctagtcttgaactcctgacttcaggtgatctgcccacgtttgcctcctaaagtgctgggattataggcgtgagccactactcccagccaccctgctgatttttgtgttttttgtagagacggtttcgccatgtagcccggggtggttttttgtttttgtttttgttttttggagttagagtctcgctctgtcacccaggctggagtgtagtggtgtgatcttggctcactgcaacctccacctcccaggttcaagtgattctcctgcctcagcctcccaagtagctgggactacaggcatgcgtcaccacatctggctaatttttttgtatttttagtagagacgggagtttcaccatattagccaggctggtctcgaactcctgcactcaggtaatctgcccaccttggcctcccaaagtgttgggattacagacgtgagccaccccgcatggctaccactttcattctactcgtggcaccaacaaggaggaaacctggaacccagagccggaggctgtagaccccacaagttttgagtgtgtgggtcgtgtgtgaccccgtgaactctgcaaacagatgaaaggaactctgcacattttaaatgctccttatctgggaaggtgtatttcgcatagaatgaacgtaggagccgctgaggaagggcctccttgcttttccgcgggaactcaagagtgacaaccttccaacttctgggccagaaacacttgctgtctctgttgtttgtgttcctgaagtcataatctactcgcctctgtctttcctgaaaacacagaggccgtgtggcctctgatttcttttcattaaccaagactgacttaaagggtttttaggttgaacgatggctgggcccctgtaggcccttccgtggtggggctgctgcggaccttggtcgagggtcgcggttgcatctgtgggactgtctggacactgttcctcttgcactttcagtttgcagccctgcatgcacacgttctgcgcggcttgctactcgggctggatggagcgctcgtccctgtgtcctacctgccgctgtcccgtggagcggatctgtaaaaaccacatcctcaacaacctcgtggaagcatacctcatccagcatccaggcaagtgagggcatccacaccagcacccgggcacgtgagggcggtccctccaccaccacccaggcacgtgagggcatccacccagcagcacccgggcacgtgagggctgtccctccaccagcacccgggcacgtgagggtggtccctccaccagcacccgggcacgtgagggcatccacaccagcacccaggcacgtgagggcggtccctccaccaccacctgggcacgtgagggcatccacccagcagcacccgggcacgtgagggctgtccctccaccagcacccgggcacgtgagggctgtccctccaccagcacccgggcacgtgagggtggtccctccaccagcacccgggcacgtgagggtggtccctccaccagcacccaggcacgtgagggcatccacaccagcacccgggcacgtgagggtggtccctccaccagcacctgggcaagcgagggtggtccctccaccagcacccagacaagtgagggcggtccctccaccagcacccaggcaagtgagggcatccacacaccagcacccaggcatgtgagggcggtccctccaccagcacccgggcacgtgagggcatccacaccagcacctgggcacgtgagggcagtccctccaccagcacccgggcacgtgagggcggtccgcccagacccctccttccgcagcactgcgcacgcgagctcccagcagtgtgagctgtgtctgcctgccatgtctcactgccggtgaatggcgctgtgtcctttcaattctagacaagagtcgcagtgaagaagatgtgcaaagtatggatgccagaaataaaatcactcaagacatgctgcagcccaaagtcaggcggtctttttctgatgaagaagggagttcagaggacctgctggagctgtcagacgttgacagtgagtcctcagacattaggtaaatcatgcccctggctcagagcagagtgtgtgagccagaggagcatcacaaccgtgaccgagagctcactactgggtggacagcatgggtcctgagatctagttctgccctgagcagccaagctcttaaatggcttgagcttgttttctgatattggatagtattagcacctcccctgagaggcgtggcagggactgggtgaacacttagcggggtagccagggggtagccagcagagcgtcagccgcaggcgactgctgtagacatttgcaccctcggctgacacccttccctttgcttcgactcgtcatgggtgtggcatctctggctgtgacagagggacatcattccatgttattttttcccacatgagcacatgtattctttgtagttgatctagcgactataaagtcctatagtataaattgcaatgtttatcatttgtcaggacgttattacagaagaggcaccatcaccaggccaagacaatcccagcctcagagaccttatttatctgctgacatgttgaggtttcctaatgcacaagaccggggtctgaatgttgggtcgaggccatgatatttaaaaagacaatgaacgacaaaaaaaaacacttgaaacttttatctttatttccttttgccaagtttagcatgtgactgttaagcaaaaagaaggaaaccaaaaccactttagcattaagattttgctgcctctacccagccattcatacgtgtgtcataatcgttaacaaaatgaaatgtaatgtactaacaaattttttttttcttttttttttgagatggagtgtcgctctgctgccaggctggagtgcagtgacacgatctcagctcactgaaatcaccacctcctgggttcaagcgattctcctgcctcagcctctcgagtagctgggactacaggcgcatgccaccacacccagctaatttttttgtatttttagtagagatggggttttaccacattggccaggatggccttgatctcctgacctcgtgatccgccggcctcgacctcccaaagtgctgggattacaggcatgagccactgcgccctgccaatggcacaatcttggcgcattgcaacctccgcctcccgggttcaagcgattctcctgcctcagcctcccaaatagctgggattacaggcatgcaccaccaaacttggctaatttttttttcttttctttttttttttttttcgagacaaagtctcgctctgttgcccaggctggagtgcagtggcatgaccttcgcccactgcaacattcatctcctgggttcaagtgattctcccgtgttagcctcccgaggggctgggattacgggcatatgccaccacacccagctaatttttgtgtttttagtaaagacagagtttcaccatgttggccagactggtctcgaaatcctgacctcaagtgatccgtctgccttggcctctcaaagtgctgggattataggtgtgagccaccgcgcccggccgctaattttgtatttttagtagagacagggtttcaccatgttggccaggctggtcttgaactcctgacctcaggtgattagcccgcctcggcctcccaaagtgctgggattataggcgtgagaaacaaatttattttttgtttgtttgttttttgagatggagtttcgctctgttgcccaggctggagtgcagtggctggatcttggctcattgcaagctccgcctcccgagttcacgccattttcctgcctcagcctcccgagtagctgggactacaggctcccgataccatgcccggctaattttttgtatttttggtagagactgggtttcaccgtgttagtcaggatggtcttgaactcctgacctcgtgatccgcccgcctcagcctcccaaagtgctgggattacaggcatgagaaacaaatatttttatgaagctgggattcggctgcatgtacagctcggtaatgtccccagcgtttgaattgggaaacagttgctgctgtgcatttcttccatccgtatttgtgcacatgcgcagtgacgtcaatgtttagacgtgaagcagtcgagtcacagagtgtgactgggaattggaccttgatagacgtttgataagtttgttatccagacaccgatcggaaagggtgcacctaatgcactctacaaggtctgcatgagggcctctttttgccagtttagaaggagaagtaggtaatctcattttcatttacattttttccttatgaaaaaaatgtcttttcactgtgccttgttttttacctggttgggtcttacctgttggccttattggcccctggccttggtgtgaggcgcagaaaagcctttcaaatggagaggagagcctcgtgtattttttcctacaggttctttttttacagttgacatttttatctgctcgtttttggaagtacaagggaagtgtggaaaagacaagtgattcggggctttgcaggcgcctggtgtggctcccagtacgttgcccaccgcgctctgcttttaacgggagagtaggcgggtcctgaggagcacggggcgtgcgcgcacgtgctggcccttgccctgctctggcgtcgtctcctgggagcacacgtcagtggggacctagtgaccctggggatggggctccaaagcgtgggggctgagctggggatgcagagtggcgtgtccttgcccttcgactcgttctggtccctctctaacactggggtgctggacaggaatggggcccggcccttcccctcacaccaagcagctgagcgacggtggagctgagctgtgatggctgcggacccgcgttgcaccggccctacctgagaggcttggggcctgcacacagctcggccctgtgcttccttgcagccagccatacgtcgtgtgccggcagtgtcctgagtacagaaggcaggcggcgcagcctccccactgcccagcacccgagggcgagccaggagccccacaggccctgggggatgcaccctccacgtccgtcagcctgacgacaggtgagccgcgccgccctcaggcctcagccttcgcgtgagtcactttgtggctgtgcccggtgctgacgtgcacgtggccgcgctctgcccgcctcctgtctgcactgctcgccccctttgggccctggcctcattggtctccctgcactcacagttggttgcttttcgtgactgattttgggttgggaaatcagataagtaactgttcattcgtagcccctcctgaacactcctgggaattaacaaccctgaccttaatacttggcctctccccagccactgcctcagggcagctgatgtcccccagtgggtttgccagacccaaagtgatgatcgcatatctgtccctcaagtaagaggcgggcttctccccagcagtggcgatgtcaccagaagctgccctgcgtcaccagagttggcttaatgcgaaatgtttccccgtcaggtgcctttttccagcaaggggctccaggtgctatccaggaagtcagaggagagctgggcagggggtatggaggcttcacttctctgccctgctcactccagactcatagaatgggaagatgccctcaggggtcctggcttcctggccacgggtgggggctgagcacatcacgaggccactggcctgggatggatgtagagccacatccttgtgctgcattctcagtggcttcttgtagaacccgtggacggaacggacaaagcagtgcttggcgttggtatggatgcccatccaccagcctgggtttgcttccgccactcagcagctctgtctgggtcactggacaagctccttcctttgcatggtgggaccagcgcctccctctggggtcctgggtccctcagtgggtgctcagtgaacctgggtggtgaaattgccgtccttatggccggcatgttgacctcgcagggtctttcctgtgtgggtggcgagtgtccagggaacttggctgtgtgggctcagacttctgctgccacatcgattggtcttgtgcaccgtggctgtcctttgtttatttgagagatggctgttctctcacctgagcggaaattgaacacacagcttgttttattctatatcataggttctatgggcttgtcctctctttataggaaataatagaaaaccttcaacagatcggccgggcacggtggctcatgcctgtaatcccagcactttgggaggccgaggcgggcggatcacaaggtcaagagattgagaccatcctggctaacatggtgaaaccctgtctctactaaaaatacaaaaaaaaaaaaaattagccaggcgtggcaggcacctgtagtcccagctactcgggaggctaaagcaggagaatggcgtgaacccgggaggcggagcttgcagtgagccgagatcacgccactgcagtccagcctgagcgacagagtgagactctgtctcaaaaaaaaaaagagaacttgcaacagatctttgaaatcttgctccagctgctaaatcaaagatcatttttggttattgttaatctgttttgactccccgagtttgggtggcagaaggtccccggtggtttagcagggcaggtctgcttcttccccggctgtctcaggtgcacctctcctcgctgtgcttcccggcggcctctctaacctgctgtctttctgccctgggtcccacgtgctccggctgaatgtgcgtgtgcttcagcagtccaggattacgtgtgccctctgcaaggaagccacgccctgtgcacctgctgcttccagcccatgcccgaccggagagcggagcgcgagcaggacccgcgtgtcgcccctcagcagtgtgagtgcccgcgccaccgcacgcaggcgggttcctatctgtccttcaggggtcaggtttcaaagcggtgttggccttagggtaacctgtgaagtaaggatgccgtttctttttttccatcagtgtgatcagttttccccacgtcaccatattgaataatctatcttttcccaccatctagtaacattgccccttcacaggctacatctccatccaccgggggctcggcttggatctgtgtctatcccctgccagcactgtggttgctttataatgtgtcactgttaaacctcttatatgaatgttgatgctttagtatacaactctggccaggcacagtggctcacgtctgtaatcccagcactttgggaggccaaggtaggtggatcttctgtgtccaggagtttcagaccagcctgggcaatatggtgaaaccccatctctacaaaaaatacaaacattagccagacatgatggtgtacacctgtaatcccagctactcgggaggctgaggccaaaggatggcttgagtccgagaggaggaggttgcagtgagctgagatcgtgccactgtactccagccttggcgacagagggaaatcctgtctcaaaacaaaacatatatatatatatatatatatatatatatatatgcacacacatacagttattattaaaaatggagcttgtcctttatttcatggctgttttaatgtattcctgcagaaatgtctgtctatgtcctttgccttttttttatgacttcctaatttgtcagagcttcttatatgtgaaagtgttaggtgaagaaagccctagccctgttgagcaccgcggttggctcctgccgcacacaccggtgttgctctgtgcactgagccctgtgtgagcagcacacaggaccacagcactggttctgtctggaatggcttaaaaatgttctgggcactcaggaaaccaaacaggttactgctggggtctgtaccctgagactgggcttggcaggggtggggcctagcctgcagcgtcgggacacatggccgtgggacacacccggtgatctgggcggtcgctgcctcgggggtcatccacggcaggcgctggccactgctgatgctgcacgtgggagggcaggtgagaagccacagagaacagcttgtcccatgtctcacacacgcggtggtcagcagatggcagctcggcccagcttttccccaggaatccaaactcttcactctaatttcacagagcatgcttcgtatatagaggcattggtgaagtggtcgtaggcgttataagacttaaggactcaatcctgtgagaattttagcgagggtttacctaacattatattttagggatttccattgtatagaatatcagacaattaaaaataatttcctttgggaggctgaggtgggtggatcacgaggttagaagatcaagaccatcctggctaacatggtgaaatcccatctctactaaaattacaaaaaattagccgtgtatggtggcgggcgcctgtagttccagctacttgggaggctgaggcaggagaatggcgtgaacccgggaggcagaggttgcagtgagccgagatggcgccagtgcactccagcctgggtgacagagcaagactctgtctaaaataaataaataaataaataaataacgtctacaaagccaaggtgacaacatggaaaaatacctaggtagaaaaaggccacctaggctgggcatgggctcacgcctgtaatcccagcactttgggaggccaaggcaggcggatgacctgaggtcaggagtttgagaccagcctgaccaacgcggtgagaccccatctttactaaaaatgaaaaaattggccagttgtgggcatctgtaatcccagctactggggaggctgaggcaggagaatcgcttgaacccaggaggcggaggttgcagtgagccgagattgctccactatactccagcctaggccacagagcaagactctgtctcaaaaaaaaaaaaaagccacctgaatatgtgcagttgggggcaagcatgttgcatgttcagagctagaatgaagcccatcgaagccgtgttagggtggtggagcaggtgagatttctttcttttgtgtctctcactgttttcctgggatgagcatgtggtgttcagtttaagaaacgatgtgggtctgaggccgggtgcagtgcatcacgcctgtaaatgttcagtttaagaaacgatacgggtctgaggccgggtgcagtgcatcacgcctgtaaatgttcagtttaagaaacgatacgggtctgaggccgggtgcagtgcatcacgcctgtaaatgttcagtttaagaaacgatgtgggtctgaggccgggcgcagtgcatcatgcctgtaatcctagcgctttgagaggctgaggtgggaggatcccttgaagccaggagtttgaaaccatcctgggcaacatggtgagaccctgtctctacaaaaataaaaaataaattagccgggcctggtggtgtgcacctgtagtcctagctactcaggaggctgaggtgggtggatcccttgaacccaggaggcggaggttgcagtgagctgtgattgttcccctgtactccagcctgggccacagagcgagactccatctctaaaaaataacaaaccagaaaatgtgagcctcgccttttttcagggatacaactcctcgccatcacagtccatcacaacctgggtggcgttagctggatgtggccccgccccgatttccatgagacccctcctgaacaatgtttccagaaagagttgagctcctgagcctggtgctgacgaattgtgttggagacagccctcagcgctgagtgcgtgtaacgagtgtcctctctccacaggtgcggtctgcctgcagcctttctgccacctgtactggggctgcacccggaccggctgctacggctgcctggccccgttttgtggtaatactggctcttcaggccccagttgctttgacctttgcatgttctcttggtgaacttgagggcaggggatggtggggtccatagcctgatgtttatagggatgaggccactgttggtcatcaaatgatacctattcctggctggactgcagaggtgtgtcaaattcgtgttagctcaaaatcaagccttaacagaattattaggggagatactcccaggacagaatccttgcagcggggttctgctgttacgataccaagaccaggtgctggggagactcggagagctgatctttttaaggagggagtggaatggaaatcatttctgcttgtcctctgtttaaaattgagttttatcattgaacttcttattctttctagaatctgtaatgaaaagaaatatgtttatcctcagtgtcgggcagacagtgctttcctgcgacatcattataaacaggtaacattgccccttcatctcggcagagctcaacctgggtgacaagtgtctggacggcgtgctgaacaacaacagctacgagtcagacatcctgaaggtaccgactcgctgcgggctggggagccgggagccacattttctccctagtgcagccagctggttctctgcattctattggtgtttatctgttttacctgacccgctgcgggttggggagccgggagccatgtttcctcactggtgcagccagctggttctctgcatgccattggtgtttgtctgttttttccgtattccaaaaataggtatttcgtttttgtgcctcctgccaccaattcgtaggagccgcttcccgcagctcttgttcccggcagctcttgttcccacagctctcggtgagggcttcttgaaggtgccgccctttagcaagaccagggccttttctctggtccctgtctcttctggccatttgccttcccacgtctaggaagctacctcggtttctaggatttacatatgtttaacatgcgcattcgccctcctgccgagcactttgctgacagcacacacaatggtggggccttgaggcttgccacagacacacctggcaggcgcccgctcagccccacactctgctttgatgcccacagaaggagctcaacagctcgtgtgtgtttgaagggcacagagaacagatgccaagtcctcagcttttcttgtgcaacagcctgggctcgttgctgggctgtgtgcactgtggcctggctttcatgtctcattcacacctgggctgtgtaggtcttggcagaacttttgagagactctggtaactgttacactggaaccttttgggacttccaggaggctcttggacaagacttctcgtgctgcaggccgtgaacgtgcagccctctgcaaatgccacttataagggtctgagctttggctttgcacactttcaggggccttttatgaaatgttttctctcgttatttcagtgtttcttcctctaaacgagtatttcttattcctctctttttttgcgtcacagaattacctggcaaccagaggtttgacatggaaaaacatgttgaccgagagcctcgtggctctccagcggggagtgtttctgctgtctggtgagttcttctgttgcctcctgctctaaggcgcatgtgagtgtccagggctgtgcctgcgtgtctgctctcccagtgacaactccgaccttcacccaccctggaagagaggaaaaagatcctgatgctttcaggttgtttttgtttgtttgtttgttttttgagatggagtctcgctcttgttgcccagactggagtgcagtggcatgatctcagctcaaggccccctcggcctcctgggttcaagcgattctcctgcatcaacctcctgagtagctgggattacaggcatgtgccaccacacccagctaattttgtatttttagtaaagatggggtttccccatgttggccagcctggtcttgaacttctgacttcaggtgatctgcccacctcagcttcccaaagtgctggaattacaggcgtgagccactatgcccggccttcaggttgttttttgaaagttgagcgtgggccgggtgtggtggctcacgcctgtaatcccagcactttgggaggctgaggcgggcggatcatgaggtcaagagattgagaccatcctggctaacacggtaaaaccctgtctctactaaaaaaagaaaaatacaaaaaattagccgggcgtggtggcgggcgcctgtagtcccagctactcgggaggctgaggaaggagaatggcgtgaacccgggaggcggagcttgcagtgagccaaaatcacgccactgcactccagcctgggggacagagcgagactccgtctcaaaaaaaaaaaaaaaaagacagttaagcatgaacctgtatgacatattccagcagcttctatccttgtaggggagggtgggtgtggccgactgccactactgctgcttgagaccctcactacagcagttactgctgttactgcttgagaccatcattacaggactgaacaaagggacaaacgtagaaatgaaaacaaaaagacaaaagaaacttttaaggaaaggcaacatggggaagaagaggagagctccctgcttctagtgagtaaaggctgcccctgagcttctacagcccttcatatttattgggtaacaagagcaaggaggaggtaacaactgggcagctgctaaattgatcacaggttcatactgttactgacaggcttcaattatgcctaatcataagaaacatttgtgtggcctccaacaggtggggccagcttggagggtctctaccacttgtctatccagaggtcctggggtcagttgtcctgggaccctcggggacttggtgaatctcttgcttgatgtgtcagtcacttggtgagggtcactcctctccaggggggcacacgatgctttgtggagtatgataatttatcactaagggaggctgtagaaatatatatatgagacaggttcttgctctgtcgcccaggctggagtgcaggggcatgatcacagctcactgcagcctcgacctcctgggctcaagagatcatctcacctcagcctcccaagtagctgggaccacaagcgtgtgctaccatgcctggctaatcttagtttttttatttttatttatttatttatttttttttttgagatggaatcttgctgtgtcacccaggctggagtgcaatggcacaatctcagctccctgcaagctccgcctcccaggttcaacaattgtcctgcctcagcctcctgagtagctgggattacaggcacccgccaacatgcccagctaattttttttttgtatttttagtagaggtgaggtttcaccatcttggttaggctggtctcgaactcctgaccttgtgatccgcctgcctcggcctcccaaagtgctgggattacaggcgcgagccaccgtgcctggccgatatctttgttaattaagggtatagcacattttcatttgtgttgcaaatgtttccactatagtagtagttcacttttgttgtatttattttaattttgatgtttaaattgtagatagccaaatgtacaaatcctttcctctgtgcaatttggttttcaagacatacttagaaatagctaattttctcattttcttcttgttttttgggagttttaatatttaaattttatatccatgtggggccgggcgtggaggctcacgcctgtaatcccagcattttgggaagccgaggcgggcggatcatctgaggacaagagtttgagaccagcctggccaacatggtgaaaccccatctctactaaaaaagtataaacattagccgggcacggtggcacacacctgtagtcccagctactcgggaggctgagacaggagaatcagttgaacgcaggaggtggaggttgcagtgagctgagaccccgccactgcactctagcctgggcgacagagcaagacttggtctcaaaaaataaataaaataaatgttatatccacgtgggattgttttgctgtaagaaaataaattggtggccgggcgcagtggctcacgcctgtaatcccagcactttgggaggccgaggcgggtggatcacgaggtcaggagatcgagaccatcctggctaacacggtgaaacccagtctctactaaaaatacaaaaaattagcccggtgtggtggcgggcacctgtagtcccagctactcaggaggctgaggcaggagaatggcgtgaacccgggaggcggagcttgcagtgagccgagatcgcaccactgcactccagccagggcgacagagcgagactccgtctcaataaaaataaattcgtatctagattggctttgttcttattttcctaatgtgtcgcccgttgtcttcaccccatttatggtcagtgcgttagtctcccactgctgtgaagtccgtgcgctgctgttgggaagatggtgttgctgggtaactggctgtgtttcttccagattacagagtcacgggagacaccgttctgtgttactgctgtggcctgcgcagcttccgtgagctgacctatcagtatcggcagaacattcctgcttccgagttgccaggtaaggagcccccgacttcctcatggctctagttctgtctgggttggcttcttggcttctgcctctcttttttttttttgagacagtttcgctgtttttgcccaggctggagtgcagtggtgcaatctcggctcactgcaacctctgcctcctgagttcgagcaattcttctgccttagcctcctgagtagctgggattacaggcacccgccaccacgcccggctaattttttgtgttttagtagagacggggtttcaccatgttggccaggctggtctcgaactcttgacctcggcctcccaaagtgctaggattgcaggcatgagccaccacgctcggccagcactcttttctttacagacaccctgtttgcactttgctcaatgttctaagcagaatttggcctcagtcaggagccggcaggacgtcaggccatacagggctgtggttgttttaggccctgggtctatttgcagttactcatgagtgtaacgtgggtttctaaaacagatttgtaaagacatccaatagtcaactggggtaattttatttcctcaattgggtttttattttttaatttttatttatttatttatttttgagacagagtctgactctgtcgcccaggctgaagtgcagtggtgtgatcttggctcactgcaacttccctctcccaggttcaagcgattctcctgcctctgcctcccaaagtgctgggattacaggcatgaaccactgtacctgaccctcagttgggtttttagttaaacatgtgtttcctttcctgaaatctcagaacggtccgaggaaactagttatggagggaccagaggccgtgcgtttccaccgcagcgtctgtcgttgggtctctgctgggattcaggtagctgagtgggtgcgtgcaatacatctcatagatgcgtaccccttctctttttccagtggccgtaacatcccgtcctgactgctactggggccgtaactgccgcactcaggtgaaagctcaccacgccatgtgagtgcagctgggggcacaggcgtcagctacagagtgatgaatgagttaactgcctgcttataaataggctgatatggtcattatgcttctctcaggttgcatcctttaggaaccggtatcttcatttagaaatcctgctcttcctttatcccttcgtttcatgcagttttatctccgtcttccacttctgtgtcttcctggctggagtagctttatctgttgtctgaggcatccggggcacaccccatcatttcaggcttagccgtttctaagtcgaaggctgcagtcactgagggcctcaggcccccctcgcaaagcgctgcacagctgggttctcgtccgtcccgtgagcaggcatttgtgattgctgtcacatcgtcaccctcacgtggtgtctttcccgtgctccttaaaggaggttcacagcgccatctgcattgccctgggaggcgtaggtcaggaggcatctcttaggttaggtgatcacgtaaatcactcctgtggcccaaggagttcagattaaagtgatggagacagtgccctcaggacgagatgttgtgtggactcagagaaaggcgcctccctcacagggattttgtggaataaaaaccttgctttgtgtttgagcacaaacagcacatggaagagaccatgttgttacaaaaagagatttcactgttgactggcagacagttttcagtagaaatgtgcagccatgctggtcctccttgcccacagtctgtggagagggaaggtggccacaggccatccagcttggtgtgtctgcctcagccctgtcagcagatgccacggggatgcctgaggaggtgcagcttttattctcttctctaaaaaaattatctaagatgtttgcacttcttttttttttttttttttttgagatggagtctcgctctgtctgccaggctggagtatagaggtgtgatctcagctgattgcaaccctgcctcccaggttcaagcaattcttttgcctcagcctcccgagtagcagggactacaggtgctcgccaccacatcaggctaattttttaaatatttttagtagagatggggttttaccatgttggccaggctggtctcgaactcctgacctcaagtgatccgcccgcctcggcctcccaaagtgctagattacagacattagccactgtgcgtggccagatgtttgcacttctgtttcaaaatttttaaagggataaagaagtttacctttgggggttagtttctttgatattgtgagaagcacacacactctttctcaggtagctctttctgtgtatggtttccgaatgcgtttatttgaatgcctttctgatgctctgttgtgtaatttatttgattgcctctccaatgctctcttgtgtaatttggccattttctccctgcaggaaattcaatcatatctgtgaacagacaaggttcaaaaactaagcatccagaggccctgagcagctttcagcactggaggtgaagagagcgtgtttttaaaatacagagacaagcacgtcaaggtgttttcacagccccctgagggaagggacgcagggtctccgacaggtgctctggggtgactcttctgtggagctttaccctctgagtgagaccctccccagagccccgggggccgcagcccgccctcctggtgagcgctgggcagggctcgtggtggcatcagcagcagagacgaagcctttctgtaacatgcggccgtcccgccgagaggggcagttttgctcttttgtacattttccgaaactacagttaaagcagaagtctgtttttaggaaaagtttcaagggagaagggcaagtttatcaaaaacattgtttcaggagaagggagcataagtttacagcctacaggacgtacacaatatcctgctgctgggaaaaccacagcattttatctattttttattttaataggtttggtgcttatcttctaataagatttaaatgtcacaaactgtagcacaaataatataatttataatttacaaattgactaaaattgggtatagtatggtatttgaaagaataagcatatgcttctgtttattaaaaaaagaaaccttccaatgtccaaaactgctaaccctcgacgtggccgccaagttagtcgctccttgctaaccggtgagtgaccgcggccccgagcctggggctggacgcaggtcccaggacatgctgctcccttgtgtgagtgaccgcggccccgagcctggggctggacgcaggtcccaggacgtgctgctcccttgtgtgagtgaccacggccccaagcccagggctggaggcaggtcccaggacgcgccgctccctcatgctgcccgggcccttcctccaagaccctacagagcctgaggggcaccttggcttccgcctgtgctagctttgccatgtcatctggaataatacttgaaattttgatttttggaaaaaaaagttttttatcttttgttgaaatcacctgttatccttgtttgtaaactgataacttttttgcttcttctcaggaatacagttttcaactgttgtcttgctcttgatagaaactgagaagcagcaatctgtatttgtggaggaaagtcctctcttttgcatattctaataaatgagccgcgtttgctcctccgctctcgtgttgggctcgtgtctggggctgcctcacttccccatgcgagggaggcaggccccatgcagagtgagctccgagtgcctcactgctagtgatggtcactctgtcacctgctgtccctcagtgactcctgtgaaacctgctcaggtctcttcattctgccaatgctgggaagccacaacctgttcatccagtgtggaggctttgtcttcagctgagcaccagaagaagccacaatgcagagaccctgagtttgtgcaagggtggggctgagaggggaggtcccgtgttagtgcaggggtgaggccgggaggggaggtcccgagtttgtgtaggggcgaggctgagcagggaggttctgagttagtgcaggggcgaggctgagcagggaggtcccgagttagtgcaggggcgaggctaagggggaggtcccaagtttgtgcaggggtgaggctgagcagggaggtcccaagttagtgcaggggcgaggctgagaggggagatcccgagtttgtgcaggggcgaggctgagaggggaggtccctagttagtgcaggggtgaggccgagaagggaggtcccaagtttgtgcatggatgaagccaaaaggggagtttgcacgtttgtgcaggggtgaggccaagaagggaagtcttgagttggtgcaggggtgagggagaggggaggtcctgagtttgtgcagaggcgaggctgagaggggaggtccctaagtgcaggggtgaggccgagaggggaggttgcaaatttgtgcaggggtgaggccaagaggggaggtcctgagttagtgcgggggtgaggccgagaggggaggtcctgagtttgtgcagaggcgaggctgagaggggaggtccttagtgcaggggtgaggctgagagggggaggtcccaagtttgtgcaggggtgaggccgaggggaggttgcaagtttgtgcaggggtgaggccaagaggggaggtcctgagttagtgcgggggtgaggccgagaggggagttcctgagtttgtgcagaggcgaggctgagaggggaggttgccagtttgtgcaggtgcgaggctgagaggggaggctggcattcgccaatgaagtgggctggggctaccctgcgtctgtgtcttagagagatcggttgatactcactcttccccttcccatctccaaaaagtagaaacaagaacacttgccctgtagaggatgctggtctttcctcaggaccagctgcacctgtccaggaagggcaggcagctcagagagcctctgggctccaggtgtcctagggactcactcctgcttccttagtccttcagagaagtccaactcctggcccactgtgaagaggatttctacctggagcagtcggaacagcttgggtttggctgtgatgtgagggaggaggccttgggagcagggcagttatcctcccagcgtggtaaggagccgtgttttatggaggcagggagatcagggcagttactcctcgggtgtggtaaggagctgtgttttatggaagcaggtggccgtgaactcattccgtcttttcatgagcttctgtacttcctcgtcctcaagacccagccatcccacccagcaaaactgaccggctgtggtggttttggagccctgctctccttgtggggtggctgcgtgggtcgtccacaggctttctggaggacagcctggtgctgctgcagatcccactgcttcttcctggctccttggcccagccttgggacaaacccagggcagggctgcagctgcccgctggccccacagaccgtctccccacgcactcctcatctgcggctccctctgtgctccctggtgcccctcagaagcgggggtcagccctgcccacccctccgtgtgctgcccaggctccaagccagggaagggggcctcaggttctaggtgaacccgtccaccccagtgaggcctctctgggatggcctctgtcatagcttctgactgcagccaggaagtctgggcagattggcttaaaacagactgagggattcaggccaaccctcctccctaggccagctacaaaggctgttttaaatctgctttaagtcatcttaatgacctcagggccagcaggatgggagtggtcgggcccaggtgtgagagccggggtccaggggctgctcccagcaccacacggccttcaccccaggggtgtggccaaggcagagaggcagctgagtttggaaggggcttccgccagcaagggtttcctggtgacagccccccagcttcgggctggcaggctgggagagtggagcaatgctggccctgaggcagctgcagccggctccctgaagaggccccagagtcactgccagggccgctaggttgccgggagccctgcactgggaagggaaggaaagcatgagaacggaggggatttaggaaagtagatcgtccctccagcctggcttgatggggaaaccagaacgctgtccccgcggccgtgcccgccctctgcctccacgtgggctccgttttggcatgcacgctagctcctgcgccttctgagggcggctgcagccgtgtagagaagccgggtcttgcctccctgaggacggagggccgcatgcagagcacagcctagccctgcagatccgcgcgctgaccagcagcaggacggagccgggtgatcttcgggggagccacctccagaaacgcctagtgctggtaactggtagacagccattattcaagcatcctctacacttagaattgagttacactgaaaacaaaggtgatgagtgctcaggacgcactactttctagttagtttaccgcacctgcctgttacctgcaggcccgagggtgtgtgcttctgtggcctgtgtgggatggcaccccttccagccttacccactcagctcagttggcctggttggaatgggccctgggaggagtgtttgcactgtggaaattggtaaatgcttcaaatcagggtggtttttaattttgcttttgttttcttctgaagagaaggttgttaaacaccagcacagtgctgcaccaggcagccagcatataatcatgagaaataagtagttgtttaagccactgcatttggggtggtttattacatagtaatgataaccatatcatggcccttgaaggcccagcatgtatgacccctgcctccacccctcagaaaacctcttctccctacctgcttctcctggagcccctcaggtgttcctctgcttctccaccgaaccagctaattctcacaaacagcccctcaggtaccagcccctccctctgcagcctctcctcattcagctcctgcagggctgcccccaccccgccagccagtctagtttccccccagcacctgtcactatcggaaaggaaacatctgtttaccgtttgtctccccctctcaaaaaaatagagcagggatcttgcctgtctgcccactgttgtttatttgtctgaaatgtttggccccagggcagcatctactgatcactgaccagttggctactgaacggtgaaggtctgatgagctgatgagccgtcccctgggcttgaaatctttcccgcggcacaaacaggcgccccttcctctgtcgctcacttttcacggttgtctccttctgaggcggtgagtctagatggtggggtcttaaagttcctcacacagagcagacacttggtcgtgcatgtctgtggaaggaatggactcaggagagaatgttgaaggccagtcagaccaggagtgagtgccgtgcgccgtgctgggagcctgtcactgtgagtgccgtgcgccgtgctgggagcctgtcactgtgagtgccgtgcgccgtgctgggagcctgtcactgtgagtgccgtgcgccctgctgggagcctgtcactgtgagtgccgtgcgccgtgctgggagcctgtcactgtgagggccgagcgccgtgctgggagcctgtcactgtgagggccgtgcgccgtgctgggagcctgtcactgtgagggccgtgcgccgtgctgggagcctgtcactgtgagggccgtgcgccgtgctgggagcctggcactgtgagtgccgtgcgccgtgctgggagcctggcactgtgagggccgtgcgccgtgctgggagcctggcactgtgagtgccgtgcgccgtgctgggagcctgtcactgtgagtgccgtgcgccgtgctgggagcctgtcactgtgagtgccgtgcgccgtgctgggagcctggcactgtgagtgccgtgcgccgtgctgggagcctggcactgtgagtgccgtgcgccgtgctgggagcctggcactgtgagtgccgtgcgccgtgctgggagcctggcactctgagtgccgtgcgccgtgctgggagcctgtcactgtgagtgccgtgcgccgtgctgggagcctgtcactgtgagtgccgtgcgccgtgctgggagcctggcactgtgagtgccgtgcgccgtgctgggagcctatcactgtgagggccgtgcgctgtgctgggagcctggcactgtgagggccgtgcgctgtgctgggagcatgcatttgtgagacccgccctgcccagtgctggccttgaatgtgggtccacttgggccgctggatcaaaacgccgcagaacaggcggcttaaacaacagaaagtattttctcacagttctggggcctggaactctgagatcagggtgtcagcggggccggttcctctttggtctgtctccttggctcgtgggcagcatctccttgagttctcacgtcatcttctcttcatgcgtgtttgtgccctaatctcttcctgcgaggacaccagtcctattggattagggcccacaccagtggcctcattttatcttaatcacctctttaaagaccacacctactaaaactggaacgatatagagaagattagcatggcccacgtgcaggcatgacacccaaattcatgacgtgttccatgtctgcagatacagtcacctctgaggtcctgggatttagggcttgaacatattgtaacactctgccatcaaagctcgcacgccacggggttttataaaaattgggtggttttgtttgttgttgtttggcaaaccccacatgctggataccattgacactccgtggtgggctgagccatgtccccgtcccgccaccacagatacccgtatccgatcacttgagcctgtgatgatgttgccttgcaccgtaaaaggggctttgcagatatggtggaattaaggaccttgagatgaggggaggatcctggattagcttgtgggccctctgtgcaacagtaggagtcgttgtaagagggaagcaagaggccgggcgtggtggctcacgcctgtactcccagcactttgggaggctgaggcgggcggatcacgaggtcaggagatcgagaccatcctggctaacatggtgaaaccccgtctctactaaaaaataccaaaaaattagccgggcgtggtggtgggtgcctgtagtcccagctactcgggaggctgaggcaggagaatggcttgaacccgggaggcggagcttgcagtgaaccgagatcgcaccactgcactcccgcctgggcgacagagcgagactctatctcaaaaaaaaaaaaaaaaaaaaagcaagcaagaagtcaaaggcaggaagaggaggcttggtgacagagaagaggtgggagggatgtgctttgcagagggagcaagggcctccagccaggagaggagggcaggctgtcgaagcagaaaagaaaacagatctccctgcagggccaccagaaggaaccagccctgcctgccccttcattttggacttccgagctccagaactgcaagagaataaatctagtttaagcagcaaagttggtggtaacttcttagagcagccacaggaagctcactaccccccacacactcatcccgtttggtttttgttttcaggaagggtccagtctgtctcagaggtgctgtggttggaggtggagtgtggggcatggctgagcacccaacatccgcttcaccctctcccctgctccccagcacgttccttcaccctgtagctctaggtctctgtggcagacactcagctctaactgctgacctgatggctccacttggtgttcaaacatcccagattcatgttgtcaaagagagctgtttccagtggggaccccaggcccaccacgtacgcccggcagacctgccctctccactgtcagaagatggcatggcctccctgtagctcaggcccaaccccaggagtcatcctgctggctgtcctcagtgccccaggcttctcttcaggggcttcttgtggctctgattgttgccccctcacctcactgctcttctcccagatctgtgcgtgcattggtcctccttgtcacgcacgttcagctcaaatattacttcctcaaaggtgcctttgagtactcgttctccttgcctttccctctcctgggacactgttcccaccagtacctgcatgattccttttttttcttttccttttctttttttgtttttgagacagtgtcttgctctgttgtcagggctggagggcagtggcgcaatgtcagctcactgcagcctccacctcctgggctcagatgatcctcccacctcagcctcctgagtagctgggactacaggtgcacaccaccacacccagctaatttttagtagagagcagggtttcaccatgttgcccaggctggtcttgaactcctgagttcaagcgatctgcccgcctctacctcccacagtgctgggattccaggcgtaagccgccacgcccagcaactccgtttcttacttgttggctcacattctcctgagaagtcctccctcaaccatcggcctgaaatagcagcgagcctccccagggttgcctctgccttttcttgactctttctgtcaccttctatgcttgttgtctggtccccactagaatataccttctgtaagagcagggatttgggacagtgcctagaatagtacttgcagacagtaggctacgataaatatgaatgacggccccatgcagatggtagcccctctcgctcgaacgcttcacccagttttattttcttttcatcagttaccgccctctgaaggtatccacacacaaacatgaaactggaccaaagcagggaccccccgcacgcagaatagtgctgggctcgcgtaaggcacctcagtgggtccatcagctgatgcatggacagacaaaatgggtgtatccagacactggagtatcgtgcagcgaggaaacgtgctgagtgtggatggaccttaaacacaccatgcaagtgaaaaggcgtcacagaaggccacatacgatatgatcccatttctatgaaatgtccagaagaggcacattcataaagacagaaggtgactgagtggttgtcgggctgggtggaggggatagggagtgaatgcaagaaggatccttctgaggtaacggaagtatccggaaactgggttggagtgatgggtgcacagctctgcacatttactacagtcgctgaactgcacacacaacacgggtatattttattgcatagaaattgtattaaagctgttaagaattttacttagattagcatttttcccacactgtgccatcaacttagtatatgattagattcattgtttctaactgtatttaaatttaatgtttgtcacattttgcttgctaaatttttaaaattttaaattactgtgggtacataaaaggtgtatatatttatggagtaccttgatattttaatacagacatacaatgtataatgatcaactcccagtaactggggtatccatcacctcaagcctgtatcatttctttgttaggaacattccagttccactctttttgttatttaaaaatatacaatacattattattaactatattcaccctcctgtgctatggaatactagatcttatgctaattaaatgttttccctatttctcccattggctacaccttaggatagtgcaatatgaaaatcaggaaactgagcttggtggagtgttttcttcattctgtcattttatcacatgaggacattcacgtaaccacggtcacaaaatacagaacagttccatcaccacaaaaatctctctccatctacccctttttagtcatccgaaccccaccaccactctataatgctgtcattttgtgacataagtggacacatcgtacagttcatgcagtgtagaccttcggagatgttttcctccctggatgtaatgccttggagcttcgtccaagttattgcacacatcagtggtcagctcctttttattgctgagtagtgtccatggcatgggtggtccacggtttgtttcaccacgtcagagtggcatgggtggtccatggtttgtttcaccacgtcagagtggcgtgggtggtccacagtttgttttgccacgtcagagtggcgtgggtggtccacggtttgtttcaccatgtcagagtggcgtggggggtccatggtttgtttcaccatgtcagaggacattttggttgtttccagtttggggtcagtaatgtacaggcttttgtgtagacataagtttatttctctgagttcaatgtctaggaatgcagttgctgggtcataaaattgtttactttttgaagaaactgcccaactatattccagagtgggtgcactattgctgttcccatcagcaatgtataagagattagttactccagaatacattattcccagcatttcatattgccactgctgtatattatttcagctgttctaataggtgtatactaatatcccaaggcagtctttttttttttttttttttgagacagagtctgactgtgtcacccaggctggagtgcaatggtgtgatcccagctcactgcagcctccacctcccaggttcaagcgattctcctgcctcagcctcccaagtagttggtattacaggtacctgccaccatgcccagctaatttttgtatttttagtagaagcaggatttcaccatgttagtcaggctggtctcgaactcctgacctcaggtgatccacctgcttcggcctctcaaagtgctggaattacaggcttgagccaccgcgcctgacctcaagatagtcttaatgtgcatttctgtaatggctagtgatgctgaacctggtcacaagcttatttgccactcatatatccttttagtgaaatgtgttttcatgttttttgcttgtcttctgtttgtgtgtgtgtatggtttttttttttttgagatggagtctcattttgtcacccaggttggagtgcagtgacacaatctcagctcactgcaacctccgcctcccagattcaagcaattcttgtgcctcagccacccaaatagctggcattacaggtgtgcgtcaccacgcctggctaatttttgtatttttagtagagacagggtttctccatgttggccaggctggtctcaaactcctggcctcaagtgatttgcccccttagcctcccaaagtgctgagattacaggcatgagccattgtgcccagaataattgtatttttttttactgtcaagttttgagagttctttatatattctagctactagtccttcaacaaacgtggtttgaaaatattttctcacagtctgtaactcatcttttcatcctcttaatgtggtctttctcacaaggttggtttgtttgttttgagatggagtctcgctctgtcgcccaggctggagtgcagtggcacgatctcagctcactgcaacctctgcctcccaggttcaagtgatccccctgcctcagcctcccgagtagttgggactacaggcacacaccaccacgcccagctaatttttttgtatttttcatagagacagggttcaccatgttggccaggatagtcttgatctcttgaccttgtgatccacctgcctcggcctctcaaggtgctggaattacaggcgtgagacactgtgcccggcttttttttttttttttgagacggagtcttgctctgttgcccaggctggtggcacgatctccgctcactgcaacctctccgcctcctggattcaagcgattctcctccagcctcctgagtagctgggattacaggcacatgccaccatgcccggctaattattatatttttagtagagatgggtttcaccatttggcctggctggtctcaaactcctgacctcaggtaatccgcccaccttggcctcccaaagtgttgggattacaggcgtgagccaccgcatccggtgaaaagtttctaattttttcatgaagtttactctatcaacttcttttgtgaattgtgtttttttggtcagatctaagaactcttccccaagctctagatgtgagaaattctgttttcttctaaaagttgtatattttacgcctcagtctgatcattttgtgttagaatttgcatttgcagataacatgatggcccatgtaaaaaatacaaggattttacaacaacaaccgcaaaacaccaaatgaaccctcaaactaatgagttcagcgaggtctcaggataagaaaatcaacatagaattcatcacatttgtgtagaccaacagtgaacacgtggaaaacgtcaaaaacgcagtgttacagttgtttgatgtgaaatactataaacttaaaaggtgcagaatctgtatgctgaaattacaaaatgctggtggaagaaatcaaaagaccgaaataaatggaggggccaccagggacgcagatgaaggaccgagtcagcgatgcccgtgctccccaaacgatctgcagcagttcccatcaaaatcccagaaaacttcgtagactgaagcgtattccaaaatccgcagagatgagcgcaacatcacagaggaccccgaggcgccctccaggccatttccttcctgacagctggaagagcggcctggcggatgagggaaggtggaaagccgttccccagcggccagcggcccgcgccgtccagctttgccctttttaaaggggaagcaaatagggtccaaagcagcgtcgcctttgatctggcacctgaagcgcgaagggcgccggccgggtggaggtgcggggttggggcggggacccgactagggcgggcggggaagtcacgcccacaccgagctcggccgcgcccatgccgagccccggccacgccacttccgccggaagctcggttcagcttcctgaaagagttggtcctgcagttccggaagttgcgtttctactagggaaaggtccgcaaactcttaaggtcactttctgaaggcggcctcatcacagtcggaggtgagctcgatccggaccctgtgggcagagggtccccggccctagggtggccacttgaagaagaggaggacgttctctgttccggaacgaaagtagcgcgtgcaggctgtttccggggacccgaggccgatgcaccgctcgccccgcccctctcacggccacgtctccgccggagcatccgggccgggcggcctccggggctgccagagcagcagggtgaggggctcggaggccgcggcgcctcggggctcgggctcccgctcccgctcccgctcccgcagtgcatgggcgggggaggctcgaggggcggcggcggggcctgggcgcgtccctgcagcgtggcgggacggccccgttccagtcacccccgcctcgctgcggtggcctcgggcctgggcgcccgccttcagctgcggcggagctggctctgtaaatgccggtgcccgcgagccctcctgaatgcttgtctgcgcccgacgagcgcggcctgtcccgaagctgtccactgccaccactcgggcagtgcttgctttagcctggccctttgcagctgaaaggcgtgacatggtgtcgggtggttcgtgggaagtcggggtttcaggagtccgtgtacttccttgtttgtctttgtcgctggccgacttgtcttcattccaggtggccagagcgagtggggccgggcgttgtcacgggtatgaacccgacgaatgtcagtcgtgtggcgggtcctgggtattgtgggtctgggtcactgcccccgcggagcccacctaggacagggacacccagggtcgccagcgagagggtaccgggcggtggttgggtggggtccgctactctaagtgggagcctggggggcgggcgacttccgtgctaaggcctctatgacgagaagcaagccaggcaaaattgtgagaaaagcgcgcctcaggcagaaagtttgaagaccctgagggcggaggatgtggccacagtgtaatggcaaagggggaaagcgatggcggtaaggatgttggtgtaggcaggtgctggattcttaagaggttggagtttattgtcactgggccagtgtaagccatttacagatgactcatggattttttttttttttttaagagactgggtgtgttgctgtattgcccaggctggtgtggaactcctggcctcaagcgatcctcccaccccagcctcccaaagtgctggtgttacaggtgtgagcagccacacccgtcgtcgtggattattttgaactgtcttttaaacgacatcaacatagcgctttataaccctttaatatcttttcaggcagtataccttaaatggcaagaaggaaataaatcatctgacatcactcagattgaagaggagctttttttcccccgattgccttaagaagtagcatactttcccaagtgagaatgccttcagttggcttttagcgattttgacaagcaacaactaaagggaaaatcgtgataattactgtcattttattgaggacacgggacagactctgtgccttgttatatttaatcctggcaaaattttgcgttcattttctcattgttttactggtgaggaaacaggctaaatgtgattaagaaatctttagcccaggctctcacaggtaagtggtggagggtcgggagctgaggccggagtcctgacttccaagcctgcccttcacgtctctgcagtgacatgaggcttgcttgcttttggttttcactttgtgtatagatctgtgtttacttttggatactagtgtggcctccaccaggtactcttttcctgaggaaatcgtgtttggtttttggctgtgctctgttgtttctaatacccgataggaacaggtgaaacgaggtggtgtagatggagccgtgaatgtttgtatacagaattcaggtgtgggggaagcagaaagtcctgtaggtgcctgaggtggtggtttctcagtatgaagtcccttgatgttacccagctgtgaacctagggttgtgtgtacctttcgcagttctaagtgacagctttgtcctgtctcttctctctagagacgcaggagtgcgagtgatcataagtgagactgattagactggcctctttatttaaaatagagccatgtttgtagtaccagctttctgtgatgcactggcagttgctcctcctcctcgctgcccggagatcgctttttgtcagtagtctgaggtaatgaggccctgacgactgagtcattccaaattttaactaaaaatcaagcaagactgggaatcgaccgagactgccagcttattgccctacagggagaagtatcactgtcaccaaactccaggcagttagtgaattctctctctggtccggcttcaggaggagctgcctgtaaagaggggccgtctttgtgacttacagtcaccgtcatggggtctctgttctggagaggtgggctgcttggacaccagcaggggaattaagtgagcagaatctgtgattgcactggactcagctcggtgcggttggctgtcaccatgttggcgtgccctctcggtggaacctgagcgtctttggctgtgttccttcttggtcagtgtaaggcccaggcgtcgtcactgtgggcctctgcagcagttctcctctgcagcagttctcctctgcatgttccacctgtaatggctgagtccagtcctgctggtcatcccatccttccttctgttcaggtggtggtgcctgtctgggccgtggccgtgatgctgctcttccagtttcttttttttttttttttttggagaatgagaaaataactttatttcattgtggggagcgggctgatgtccagcctcagaacttctggaactgcttcttggtgctggcagccttggtgacctggagcacgttgaggtgcactgtcttgctcagaggccggcaaggccggcactcgcccactgtgacgatgtcaccgatctggacgtccctgaagcaggggaacaggtgtacagacatgttcttgtggtgcttctcgaagtggttgtacttgcggatgtagtgcaggtagtctcggcggatgacagtggtcctctgcgtcttcatcttggtcaccacgccagagaggatccgccctcgaatggagacatcaccagtgaaggggcatttcttgtcaatgtaggtgccctcagtagcctctttgggtgtcttgaagcccagaccaatgttcttgtagtaccgcaggagcttctccttgccagtttctcccagcaggaccctcttcttgttttgaaagatggtcggctgcttttggtaggcacgctcagtctgaatgtccgccatcttcccggccactgaaaaaaggtgctcttccagtttctaactccctggactccctcattggaactgaagctcacagatgtttcagctggactagtttagactttgctgtattttaaaaggcagtgttgatgctccaggattcaaatacttaatcattttgttttggaaccattagctttgtagcagaggaatgtactcagcagaatcagcagaactgaagatttaattcggcaaattaaacctgtgttggcactttaggagttgggagtgttcaaggtggtgggaggcagacggggaatgagtctctgtcttcaaggatctcgccatgtaatgggcacacacgcaatggcagacatgacgtgctgtggtggaggccacgtgaggtacagtgatggcagagggggtagacgagacactttacctgcggggccaggagggtctgcacgcgcaggcacacaccgtcggttcctttacctgaggggccaggagggtctgcacgcgtaggcacacacggtcggttccatataatcaccccacccccgcaaggcagaagcaaagacatcacaaagcaaaacgcaagttttcttttgctaggaaattttcaagaggaccagatgtacagggtaccagtattcagtggcgcagtcgagtccacattccaccgcgtgtagtcctccgtgccagtttgtaattcatctgtcaaaggggcaagcctgtgataagcagccatcattttgctgatgctcctccccttgttttgtgggtgtcttctccattcccaggtgggcgtggccggctgacccccagttctcttggagtgtgtctgggattgtagctgaggggcaggcttggtggagatcgcagtgtttttcctggaaagtgattttcagagggttctgtgctgtgtgtaaggacaggtgtgtagttcagatccctgcctaggctctaaggcccatttatcacccacccacccggaaaatccagggatgagagatgttactagatgatcatagacgcaaacatgagattgagaattcgttgcacacaggattagcttttgaccagccttggtaacttccttcacttctgtgcttcagacattgctttaatctttaaatatttttatgtgccaggcaccctgagtcaagacatctaggatcctttgtttacagtagtttcttgattagctatgcgagatttatagttactaatgttaggacacatttctattcacagtgctttctggttacaaacccttaatgctagttttacactaatagcatacgtaaccttttaatattctgaacaacactgttatgaactcataactgtctctggcctgtaggatgcaaggtggcagagaggaatggtggattattatagttatgagcagatactcacaggtctgcacgcccttcagtgagtcattgactgtgtcagtggactgggttacacccaccacccataggtttcctcttttacgggtgaccagtctagatggcaggtagagtaaaaacccctagaaagacaggcacgtcctgctgcggggtcagtgacacacatgctctcgaggaccagccacgtgggcttctcttttttttgttgttttttgttttttgagatggagttttgtgcttgtctcccaggctggagtgcagtggcacaattttggctcacgcaacctctgtctcccaggttcaagcgatgttcctgccttagcctcctgagtagctgggattacaggcacgcgctgccatgcctggctaatttttgtatttttagtagagacgaggtttcaccttgttggccaggctggtcttgaaattctgacctcaagtgatccacccaccttgaccccccaaagttatgggattacaggcatgagccatcacacgcagcccttttttttttttagacggagtttccactcttgttgcccaggctggagtgcaatggcgtggtcttggttcagtgcaacctccgcctcccaggttcaagtgattctcctgcctcaggctcccaagtagctgggattacaggcgcctgccaccacgcctggctagttttttgtatttttagtagagatggggtttcaccatgttggccaggctggtctcaaactcctgaccgcaggtgatccgcccgccttggcctcccaaagtgctgggattacaagcatgagccaccgcacccggccccatgtgggcttcttgtctataccttctgtgtgggatttgtaagctagaggcgaaggttgtgtaatgtttctcatgaaaaatgttaaacacagaacataatgtaggttaatatgaaactgattttaaaggaataaatgccaacatttctgcagaatgaatggaagctcatgctagtgtcttacctgttgataaggaaatgagttaataatatcaccagcacatttcagggtggataatcacttgccaaatgttgggcaaagttttgctcccctgaatgtagcccggcagggcaggctgagagagctaacccagctagaggtaaagacgggaacgggccctgccgtgagatgccctttctgtgcccccactccaaggcagctgcctttctggtgtccttgtacaccctgtatagagttaccacatcccatggcacctgctttttaaagttttgtttctctggatctgagttgtccaacctgaaggggtggggctgccggcaggagccgtggccttgggcagagtcactcactagctgagaggggggcctgtgagtctggtattgtaatttttaaattgtttttgagatggggtctccctctgtcacccaggctgcagtgcagtggtgcgatctcagctcactgcaacctccgcctcccggtttcaagtgactctcctgcctcagcctcccgagtagctgggattacaggtgttcaccaccacacccggctattttttgtatttttagtagaggtgggggtttcaccatgttggccaggctggtcttgaactcctgacctcaggtgatctgcctgcctcggcctcccaaagtgctgggattacaggggtgagccaccgcgcctggcccaaattaattttaaataaaatttaaagctcagttgccctgtgtgacacctactccacagattcagagctgcgctgtcccagcagaatgttctttagttggcaccgatacagacattaagctccttcaggaaagggcccagtgtggctgggtcagcatcttagcctcaaaacctaggatgttgtgggtgctccaggattatttgctgaatgaaaaagtttgtatttgtttcttgtacgtatgcaaattgggaaccaaatgctaattttgtaattgatacttgaaatctgacaagtttcataatacattttgtctctctctcctgtcaggtatcatgatattagctggtttgacatcaagtcatttgtgagtcatcagatcttctcctgaaaatgggagacacagtagggcccctcccaggagctcttggctgttgctgatggcagaagccaag

SEQ ID NO: 1155 - DNA, 15466 bp, Homo sapiens
acgcgagcgggaggctgcgccagcggcgcccgccgggggcccgccgcactctgctctcggcctcccgggctgcggggacgggacggctgccggcgcggactttgcgggccgggagccgagtccaggacagagccggaaccgccgagggaggcgagagggcagtgcgcggagatggcggccgcggcggcggaggaagggatggagccacgggcgctgcagtacgagcagaccctggtaagtgaagctgagctgagccccaggagtgcgctccgggacccctgctccaggttaccctgggaagcgcgaggaccaggggcctaccctaatcctgtcctagcattttgagctggggaaactgaggcttggaagtctgaggctgcagggccgaagggatggaaaactgcatgctggtttctggctgaggctgagggcctgcagaggacaaggacaccaggtacttgtctcaggtgtccttcccctcaccccacaacatgcacgttttctttgcacctccccttcaccacctgggcccaagtctcagcaccccactgccccttccgcggcaccattcacaccattgaactttctctacgccactatctccaccacccaagacattctctgtgtccctgccatgtgcatggcaccatgctaagcatagaatcgagtgtgtagaaagatggtcagccccagaccctacctctggaggctccacacccagcgttggctccaggagcccctcagttgactctggaaaaaggtggcttgccactctgggggacaggagctttagggagggtgggtgaagcaggaatgggtgtgggaattgggacctttgtctatgctgatgcggggtatccagcccccacccaccccagggtgtgtcccctgacctcattagaagcaggggtcctgggctctgagctgacttatcgcccccattgttacttggtgtttgagaagccacgtgaccctcctcatgtcactggggtggaagacccaagccctagggaaaggaaggggcccgtggttcctttttaccagcttgggctggaatttgcccaggaaggtggcagggagggaacgtcttggagaggagaggctataagtctgggaggtgcccagttaggagaaagtagctggatgaatcaggatgtcagggagaggtgggagtagagcaagggtagaggggccaacccttgggatggggtaggagacacttgccaatctgcccagaccaggataggagcatggtcaaggaagccaggcacctggcctctgaaatggtgcctcttaacaccagccacctctccatctccgtcccttccagctgtctctggaatgagctctcagggtcgagctctgtcccgggcactctgtgctccagcctgctcccgccccccttcaccatcctatccctttgtctttctctcccactctcacctccctcctcctacaccgtgcttgcctcttaatactctccattctcttcctcctccgtacttcttcctctctcatccccttctttctcttctccatcccttcgccttccctctcttttctcttctactttctcctctctagttccctctcttctctttgctttccctttcctatctctcaccctctctctgtctctatctttccctccctccctcccccccatcccagccccaacaggagccctttgtgtcccgaagctctgcgggtggcagccagaatctactcctccccgccccccaacacacgcccagcttggcaggtctagccatggttcaggcgactctcccgtcccatcaccccagcatccacagtcacagcccagccatcctcagcctccgctgtcccccaacccaccgctgggctcagtgcagctccagaatggggctgaggccaccaagccctctccacccaccctaagtgagaggctttccactcccagctgggctggcaggctggtgggggtggcagtggagaatggggacaaggggattagggtgggtgggagaggtgcagctgagttggtcacaggccggaggcccagcaggaacgtgataaggattggggctgcgcctgctcctgggcccaactcagctgccccgagctccacgaggctcttattgttgcccatgtgcccctgatcatcccttactccctggccttcccgcctcccacttttagactgtgccacaggtttttccaccttttcctcttctggggcttccctctcactcctcttcagtgccccagccccaggcctgtgagaagaggaccgattattctgccacccccagagctgtgtccctgtaccttggctgtccccatcactctggccaggacagcctccacagtctgcaatgtgcattgttcccacacctcgggccagagtgggaactgtgcgttcaagagggatatccagtgtgggggctgggagaagaggagtggaggctctaagaactctccctgcgttcccactcagcccatgacctcgaatgcccccatcccctctgttgctccagatgtatggccggtacactcaggaccttggggcctttgccaaagaggaagctgctcggattcgcctgggagggcctgaaccctggaaaggtcccccttcctctcgggctgccccagagctcttggaatatggacggagccgttgcgcccgatgccgcggtgagaactggggtgggggcaggggacctggctgtgctgtgctgagggaagcagaggccattagagctgctgatgggggagaggggacagttgagggggcagtaaaaggggtaggagcactttggtgccatcctcccccttcttcccttccctgcacccagtctgttctgtccgctgccacaagttcctagtatccagggttggtgaagattggatcttcctggtcctgctggggcttctcatggcattggtcagctgggtcatggactatgccattgctgcctgtctgcaaggtgagggtgacagctggcagggggaggactgggaataaacctcctgcgtccatgccacactcgtctagacatggaggaaggcgtcttggcttcttggccactgaccactttccccagccagtctgactgcccagattcaggcatcatctcggccactcccacagggcacagcttcttgcatcccctctccaagtgatcctcttgcctagattgcgctttgtcccagtgaataccctcagggaccctttccttcacccatgccctgactctgtgtggtactccctgggacagcctgtcgtatcagcgtggtccactggccaggcaggcagtgggtgtgtgcactgggggtccagcaggtcctcttcccacagcccagcagtggatgtcccggggcttgaacaccagcatcttgctccagtacctggcctgggtcacctaccctgttgtcctcatcactttctcagccggattcacacagatcctggcccctcaggctgtcggtatgttagaagagaaggggagggcagaggcgggacccctgaaatgggtgcatcgaatgcctctcctgagactgttccctctccaggctctggcatccctgagatgaagaccatcttgcggggagtggtgctgaaagaatacctcacactcaagacctttatagctaaggtcattgggctgacctgcgccctaggcagcgggatgccgcttggcaaagaggtaactgcaggctggggaatgaaggagtccctcctggtggaagaggaggccaggccaaggtcagggcgggccccctcccgactcaccgcctgccccaccccgcagggcccttttgtgcatatcgcaagcatgtgtgctgcccttctcagcaagttcctctccctctttgggggtatctatgaggtaaggggaaccctggggcaagtagggggcagaggctgctgagcccacagctgaccccctcttgccaccactctcgccagaatgaatcccggaacacagagatgctggctgccgcctgtgccgtgggggtgggctgctgcttcgcggcacctattggaggtaggcagggctcctaggtcagtccagccccacaaccctgcccttggcctctcctccttggcccctcttatctgggtctgaggccttaggccaggcccaggcctcaagtgctggtctccctccccctcacaggcgtcctcttcagcatcgaggtcacctccaccttctttgcagtgcggaactactggcggggcttcttcgctgccaccttcagtgccttcatcttccgggtcttggcagtctggaaccgggatgaaggtgggggcacccaggggatgagggcagcccgagatggtgccaggtagggggcccacgaggctaggcctgcctccctctgctgttcttccctttagagactattacagccctcttcaaaacccgattccggctcgacttcccctttgacctgcaggagctgccagcctttgctgtcattgggtgaggagctgagggggctgggggtatcagagaggaggggggtttctagaaggctccttttcactcaggtgcctcttccctttccagtattgctagtggcttcggtggagccctctttgtctacctgaaccggaagattgtccaggtgatgcggaagcagaaaaccatcaatcgcttcctcatgaggaagtgagtggctctcggctcctctccaggctgctttgagttgtataagggccacagtaggtcaggggacagtgatggggagagaatggcccagtcaaaacaggcacttcactgagaaatcagccagcagtgttttccaggctgactgagcatttttatattcatatgaattacctgaaaattggcatttttaagtttatagtcagcggtagaggacatttgggaatcaaagactaaggcctcctcaggtcctctgggctggcccatataggaatgctccctggagagtgtttgagcctcaggttccccccatgacccatggggatagatgagatctcttttttttttttttttttgagacggagtttcactcttgttgtccaggctggagtgcaatggtgcgatctcggctcaccgcaacctccgcctcctgggttcaagcgattctcctgcctcagcctcccaagtagctgggattacaggcatgcaccaccacgcccggctaattttgtattttttagtagagacagtttcgccacgttggtcaggctggtctcgaactcccgacctcaggtctgcccaccttggcctcccaaagtgctgggattacaggcgtgagccactgtgcccggccgagatttttttttttttaatctccagaacacagctctctcagtgtgaccctgaggattgggagtggggagggcgagacatgacttcccttgggactgacatccttcagagagagggcagccagctgaacctgctccctacgcacctctggtcaactttacaagtgaccccagcttcccccaacattgaccttcactctaagtcactgcagagagacaaagagaggcagaaacttctccaccccatcacacaatatgccctgatgggcttctgagggtggagggtggaataacaactcggagggccccaagggagggcttggaggatggactttctgctgctgctacccacctacagagtcaggggctgacagaaaggtctttgggtcagacccctgctcttagaataaccccagtccaccatcagccttggggctatcgtatcataaacagcaaaggagaccttctgtcaggactgagtgttttcatgaaagagccaaggctctgctctgacctcagccctgagatatgcgaggccacccagcccttggccacccacgactgatgtgaaacctacgactctagacgcctgctcttcccggctctggtgaccctgctcatctccacgctgaccttcccccctggctttggacagttcatggctggacaggtaaccacaggcagaacaggagttttgtgctttcccttggaaggcattcctccaaagccaacagccccagtgtgactgtgggaccccttgttccccgtgggatcccatggcctcttcccttcatcctgtcggtttcccagcctgaggcaccctgttcactctagctctcacagaaagagacgctggtcaccctgtttgacaatcggacgtgggtccgccagggcctggtggaggagctagaaccacccagcacctcacaggcctggaacccaccacgtgccaacgtcttcctcaccctggtcatcttcattctcatgaaggtgggctcctcacgtgtacactgctaacctttacatagcttgcccttctaagcacctgccacgcagtgctcactcctcgaagcctctccacagtgccatgggaaaggcactattatcacccccgtttgaaagatgggggagtcgaaacacaagtagctggcccaaagtcacacagctagagggcagagcgatgatctgaacccaagccatctgcttccagagtccttccccttgccatcacctgggaggcctgggggtcccagggtagctaggagggttacggggtggctgggagggttacgcccacctgatcagcgaggtagacttctcctgggtggcgctgtgggctgcctggggccaggtggagcctcttcgcctttgaaccaccccctgcctgcagttctggatgtctgcactggccaccaccatcccagttccctgtggggccttcatgcctgtctttgtcattggtgagttctcagctgcctgctcacccagcctgcaccttcctcagcctctggccacccccccagccaaccctctgcccaagagcgggtttttggtccagccctagcccgaaccctgaccccacagggctgtgccctacactgaatgacccgttggcccctccctcaccctctgaccctctctcttcctagtgccccctgccctccccctccactgcctctttctcttcccacccccctccctgaaggagcagcatttgggcgtctggtgggtgaaagcatggctgcctggttcccagatggaattcatacggacagcagcacctaccggattgtgcctgggggctacgctgtggtcggtgagtgcctcaggtcccatcggccttgggagacccccccacccacgccccagccacagggtccgagactctggtgccccctgctggcagaaaccaggcttccctcagatgcacaggtccaatcccaggactgtattgggcagccctgagggacccactcaggacctgccctggttgtggagggtcttctgggacctgggcaccctgaggagactgagtgtgactgtccccaggggcagctgcgctggcaggagcggtgacacacacagtgtccacggctgtgatcgtgttcgagctcacaggccagattgcccacatcctgcctgtcatgatcgccgtcatcctggccaacgctgtcgcccagagtctgcagccctccctctatgacagcatcatccgaatcaagaaactgccctacctgcctgagctcggctggggccgccaccagtacggagggctgggtgccaagggggctgtgggtgaagggcagagggcatcctagatccccctacagccacctctagcaaggtcctggagcctacgaagctgggagatgagccaccttcgtccacactctggaggggctgtagctggcccctgctgttcagaaagaagggtgggagcaccccttggtccttagctcccgtccccatggatgggctctggagccctccttgtggccctgggatggcaatgctctgggcacctctccccatgctgaccacaaaccaagcgcctctctcggcccccaggcagtaccgggtgcgtgtggaggacatcatggtgcgggatgttccccatgtggccctcagctgcaccttccgggacctgcgtttggcactgcacaggaccaagggccgaatgctggccctagtggagtcccctggtgaggccaggaggggtcccaggtgctaggggcattgcccagggtcgaagcttcgggaaggggcagggagctcaggaccagtctccttggttccaaagggaatggaccagcacttgccaggtgggggcttccctctggtgtgtggcctgcatgcaaggccccccactctgagtgtgagagaaggacggggctggagggctccctctcagctcctgagtccttccacctgttctgtccagagtccatgattctgctgggctccatcgagcgttcacaggtggtggcattgttgggggcccagctgagcccagcccgccggcggcagcacatgcaggagcgcagagccacccagacctctccactatctgatcaggagggtccccctacccctgaggcttctgtctgcttccaggtgaggggaaaagccacaaacgcttcctaaatgtcattgtgtagactgattgggagggtggtctggggccgtggcctcaccagccccttcctgcctatgcaggtgaacacagaagactcagccttcccagcagcccggggggagacccacaagcccctaaagcctgcactcaagagggggcccagtgtcaccaggaacctcggagagagtcccacaggtaagcccatgtctcctgtgtccacagagcctcagccaagctactgagatccattagagtccctgcccagccctgttgctggggtacatcccagctggaagaggctgcccacatgggccagggctggaactgggatacctctccctgtgtcttccttacctttcctggtcctctccccaaaagatgacattgccccctggggccttatgtttgggaacacagggagcgcagagtcggcaggcatcgccctccggagcctcttctgtggcagtccaccccctgaggctgcttcggaggtgagtggctggagcctgtcctcctagcttgctttttccccagctccctctccaatgctgagaccacgtcattaaccctgcagtgcctgcctctattctccctgcccttcggccctccctgctgtcagctcaggtcctgtggcgtgccctttcccctgggctccaccacttcccctcacctcccctctccctataacctcaactcctcatctttctggtttggctctaacaaaactgaagaagttggaatcctgtgagaagcgcaagctgaagcgtgtccgaatctccctggcagtaagtatgcctgctcttctagcatctcggcggcaccgggcagggagggcagggtctaggctggataaactccagagcccctagctgccagcctccctccctctctactagagtgacgcggacctggaaggcgagatgagccctgaagaggtaaggtgccactggactctggaccctgtttcttcctggttgtgttcaatcatcatgttggctgctgtccccatgggagggaccacggggttggaaaaagggcaggccagctttcagggaggtgaggtcagctacaggcaccttctccctaaacctcatagtctcttcccctcagattctggagtgggaggagcagcaactagatgaacctgtcaacttcagtgactgcaaaattgatcctgctcccttccagctggtggagcggacctctttgcacaaggtagggccagcagcctggcccagggctggtctaggctctcaggacacagtggggatcttggtccccctacaagtttggactcaggccagtggggaaggagggaggagaagggagttggctcagtgcggagatgttttttagacatactgcttggatgatgggaggtgggagcagcctcctcctgctctgtggtggagccaggcatcgtttttcctctgctcagccttgccctcgagggaactctggaccaacgaagcaacaaagacagggattgagctgggtggaagccagaaggccaggccagggtcagagctaggcgggaggccaccacagcccagcaaggttgatacgcccatgcggaaaaaaacgggtgagaaacaggcaggataagaaaatgcaataaacaagccaacaaacatccaagtaggggtggggagactgcagagtagagataaacaaagatgagaaacacccagtggggggcttggaatgccagaccccagaaagtctgccttaatgtgggccgaaggaaaactggtacggacgcgggaagatggctcagcagaactgcaaagcagcctgcagaaatgcggcgaggaactgagcagactgcctggggtgggcgaggcagaccccagaggaggccaggagctctctgcgtccaggactcctaaggggggcagcctgcattggtaaaatggctcctgggaccagcagaagccaaggggtgttttagctaaacttttgacaggcataatgtacaagccttgaagcgttggggggtttgggggaggggataagcagcaggtagatgtacccaaaacctgcagcttgggcattcagcttacacacaagctctgcctaagagccagtatagcatggacaagcggagactgaggcaggaagcataggggacaaaagagaaacaaaaaggcaaaaataaaggaacttagaagtccttggatgagtggcaaactgcagtgcagttgcaagaaaaaaggtaataggcctgagagggcttttatctaaagcccttcttcccaaaacctctgaggcctttccacaatgatcttactcctcaaacatccatgatgatgatcatgctgacatttttcgagtgcttgctatgtgcgagacactgtgctaagctcttcaactgtttaatcatcacaagcacgcacttagatattgcgatcctccagtttttatagataagaaaactgagattcagagaggttgagcaagttgcacaaggacacacagctaataagtagcagaactggcgcagtggcttacacctgtaatcccagcactttgggaggctgcagcaggtggatcacttgaggtcagcagttcgagaccagcctggccaacatggtgaaactccatctctactaaaaatacaaaaaattagccaggcgtggtggcaggcacctgtaatcccagctacatgggaggctgaggcaggagaattgcttgaacatgggaggtggacgttgcagtgagccgagatcatgacactgcactccagcatgggtgacaaaagcgaaactccatctcaaaaaaataataataagtagcagaactgggcctggaatctaggatggtctgactcaaaagcctgtggccttaaccatattaatacacagggaaactgaggcatgcagcgaggaggtcacgtgcctgagtcagcacagcagagtcaggcccagagcccagatttcctggccctgctcccaggattctttcagaaggccatgttgtccctctccatgtcagttcactgttcccaggcccaagaagtatgggccctccaatgggttccatgatgtctaattgaattaaatgaaaaagaacaaagtagatatttgttacaaacttaaaaatcagaagagaagaagtctttgaggaaccaactaacaaaagtacaaagaactagaagtgataagaacataaaagattagaattcaaaatgtccttacaggcctgaggaatcaataggtagtcgcccaattaagttcaggaggggaacattcagataagagagagaaaacactggagactacttaggaacccgtgcaactggagatcgctgtgccggctaataagtaattcattcagaggccacccacggagaagcaatggtaaaggccagagtggcggccacagctagggccagaccaactgaacccaaatccttactctgccacatgctggcttgctgtgtaccttggtaagtttcttagcctctctgtgcttcactttcccgatctgtaaaatggggatcacacctcactgggttttctaagaattaaaggacttgaaacatgtgaagcacttacaatagggcctagcacacagtaaatactcaatatatgttaggaattactgttactactcctactacttatactgagagatgaattttaaaagatagcatatgctgggcatggtggtgggcacctgtagtccaagctactcaggaggctgaggtgggaggactgcacgagcccaggagttcaagtccaacctgggcaacatagtgagactgtcttctaacacaaaaattttatttatttatttatttttagacggagtctcactctgtcaccaggctggagtgcaatggtgcgatcttggctcactgcaacctccacctcccaggttcaagtgattctcctgcctcagccctcccgagtagccgggattacaggagcgtgccaccacgtctgactaattttttatatttttagtagagacagggttttaccatgttggccaggcatgagccactgcgcccggcccagaaaatttttttaactaaaaaaaattgtttaaaaaaaatactgtaatgagagaagagctgaagtgtggaagaaatgaatgttttcagaaaaagaagagtgattatgtgaagctgcaggctggaagctggagtacacagtagaatgtgaggctataaagacaggctggggttggcttgggaagggtctcatgggccttctagggagtctgggctgtactcaagtttgacaaagggcataggataagcagggccagactggagggaagggaggcagaaagaacccatcaggctgttgcagccccagtcttagtgaggatagtgaggctacagtcagtaatggccaggatgtttaggaagtgaattggtaaggcttggtgactgtcaggggcaagtggtttgcaaacctgaaaggcatatcgcccgccagaagctcacctggttaggattgtggagaaaaagaaaattcaagggaactatttaataggctccttgggagaagatgagaggggttatttgaccataagaagacaaggctaagggattagtaacataggaagccttataataaaagcgtttccctctgaagtcagacaaggaaattaaagctaacttgtagcacgtaggactccagttagccagaaggaatcgctaaccacatgacaactgtgttataggtattcaagaaacacagaagaacttttttttttttttttttttgagacgacagcgtctcactctgtcacccaggctggagtgcagtggcacgatcatggctcactatagcctctgcctcctgggctcaggtgatcctcacaactcagcgcccccaagtagctgggactgcaggcatgcaccactatgtctggctttttgtggagacagggtttcgcatattgcaggctagtctcaaactcctgggctcaagcattctacccgccttggcctcccagagtgctaggattacaggcatgagccatcgcgcccagaagagcttattctaaaattgaacttcttgcccctctaagtactgtcatgccatgggtggagaaatttaggaaagttctggaaatccctccctaaagaatttcaaatgtgtaagaacatttaaaaagtgttaaggcaatttaagtgagttctgagtaattggtacacaagaagctgttattactgctcatcttgattcaaacattaagcgaagaggcttacaagtaaactcagaacagtgagataaatgataggccaaaaattccaggaactgctgagtcaggagagcgtttttcaagacatctggccccaagaaaatctacttaaagcataaggagaactggctgacaatttctgaacccctggtgattatatgtgaaagcttaggggagggcttaaagcaagaaaaacatgggaagatgggggtgaccgttgtcctcctggactgcaagctgcatctcaacagaacttgggatgctgcttggaccctagaaaaggcagactgtatgagaggcatagcgtgcttcaggccaagactggaatgccagagcaggggagagagactccaaacctggccagccaggtaggagggcaactgagaagcagtggaacgagaggcataggattcagggcccaagtgcccttaaggtcggtgtgggctctcccttctcggtatatctgcaactaaacaggactggggttgtgcgtccctctccggtgtgatgaaaagtgactggggctgcacagccactcctgaggacccgcctggaacaagtcacttcactgttgagccccatgctgcttctcctaatgcttagttctcaggacagtactggaattaaatgataatgtaagacctagcacggagcctggccaatcactagatttcacgtgtgaacagttgttctgtcccacgtccccctttctaacatgggactaagaattactcccccatcctatttctccgtcagtgtaagcaatataaggattttgagtatcaagttcctgaggcctggacacagaaacattctcattattattacgattgttattattttccctccagcagtcctgtctccttccctcccaatctggggcacccctcctattccacaccaaccttgtcctgggcccctgtggcctgtcatttagagctgcccctcgtccatcaagtccaatcgcttttctccccacactgcagactcacactatcttctcactgctgggagtggaccatgcttatgtcaccagtattggcagactcattggaatcgttactctaaaggaggtgaggtgatggtggcctccaaagctgctccacttccaaaaagtcatggaggcttatgtccagctcacctggggaggaaggcggggaggagtctgacatctgggtccagacatctgtccctctcacctttccagctccggaaggccatcgagggctctgtcacagcacagggtgtgaaagtccggccgcccctcgccagcttccgagacagtgccaccagcagcagtgacacggagaccactgaggtgcatgcactctgggggccccactcccgtcatggcctcccccgggagggcagcccttccgacagcgacgacaaatgccaatgagcccctcgtgggtggcctaggatggtgctagccatgcccgtcagcccagaatgtgcatctttcattccttctgccttcggaaggcaggaggcagctacagctggaggctgcaccccagccccctccagacctggggtgccagcttctcccagttcatcctacctggaatctgacccactacccacctgcaacaagtcttccagaggcaggaagataggccctgccctggcaggatgggttggggtcacttgacccctgctccccctttgaggggaaaggggtggaactaagatgggtttataactggaacctccaatgaccagatgtatatagagatttacaaagatttttatattaatttaataaaacaaattcttaaatagaacaaaataaacacctaatgagccacttatatatagaa

SEQ ID NO: 1156 - DNA, 17933 bp, Homo sapiens
ctccgccgccgccatcttggaccgggcccggtcagcttccgcggagccatcggcagacgccgcggcctcccttgagccccgacccccgtcgtcagaacaaccccgggcccactcccccaaccccacttccgcttcgcgccgctatcgcgatagcgcccgggcccggggcgcgagaaaaaggcggcgggcgctcgcctcccccgcctgtcgcgatacgctcctcagcggcggcgccagctcctgtggtgagagcgtcaggctcgactgggccggaccccttcccttcctccccccggcgccatcggccgccctccccgccgcctcccgccctggcgacaccgccgtctgtcgcgacatggcctcccctcgcctgccccctgccgccgcctctgcagcgcggggctcccggcggggggcggctccctccctctcgccctcccgttcctgcgcctctttcacgttcctcagcgcctcccgggggtccttccgcgacccggaccccgggccccgcccgccgccgcctccccgcgtggcatcgcgtcgggccccccggtaggggtgtgagggtgcgaagcctcccgggcgcgaggtgcccgcccctctccgcgtcggtattggctcctggctggaaggatggaggcgcccctggtcccaggtgcccgccctctcggggctcaggtgcctgcccccctcggcctcggtccttcgcgttgtggggcagcctccgcgccggggcttctccctcgacggtggcggggagggggggtggtggtcgggacgaggaccccagctgggtgggggagtcacccttcccaggaccgaggccgccctccgcatccctcctcactgctcccgggagcgcagcctcccctggatctcaggttccagctgcccgtctgtatcggatgggagcctcttgggagaggagtggaggagaaactccccgttagttggagcctttgccgaagtttccacctctgtagtctgcagctcttccctctcatagcgagtagcgccctgggtggctccagcctcgccatcccgctgcactgggcgcctgcctttttgggggagtttggctttcccccacctggggtacaggaccgtcctcagtgtggcccacgtctggtctcagctctcacacttctttgatcctggcgtctgcccctggctttgcagccttgaactcccctgcatcgtgactctccgaccttctgggtgtgggcgtctcccagtgatatcaggaccactgtggtcttgttgctgggggctgctgggatcccctggcgctcaggtgcctggtgaaagacactaagccgccacgctgtccatgttagtgagctcccactgcgggcagcaccagcccctctttctgagcagtccctgcctctcagtgcagggcggccacccaccccggggtgagctctcctgtccttttggtgaggggttttgatgtctcccctccctcccttcacccctgcctgagtatgaggcttcttccatcttcacaccagtctcctcctttagggtgtcagctctccaaggaccaagaagcccactgcccttgatatttgcatcagatcccacactgtgggtttgttgacttcccatctacccttacgctgggtgtcagcagttggagaacaagggtttcgccttctggccccgctgctggtaccccatgagagtaggaagcttcctagacccgggttcctgtactgcgaggtgggggctcttccctctggggctgtgccttctctccagggtaaggaccctttcttggtgtcacctcccccagggataaggttcttgccatccttggtattggtatggctgcttttctggatttgaggtgtccacgcctctgcatgtgtccccaccgtaaggctgaggacccctctcggatgcaggtgcccccggctaatgcttccaaaaccccctcttgatttgtcactgtatggggtaaggcatagtttcctggctgtgtggatgtaagatacctgagtctcaagcgggagactccactgtagaccctgtccctgggaccagagacttctctggtgtagactttccaaggtgggagattccagccccccacccttggcatggggcatctcagtggagatgactacctctaccccaggccctaacgcatccttcttctggagtctcagagcctctgtgtggccacgtcagcagccacctgggttaaggatcacccttcaacatcacttctcagagctccttgctgcagaggcggaagctctcccagatcaaaggtgcctcatgacaaagaccactctgtgggcacatgacggcccccaaggttaaggaccacccggtgttagtttcccagggctgacctcctgcccctccctcctcgagtctttgtgtggtggtatcatcttccctgagatgaagtctggggggctcttctttactggttttggctctgattttagcgtgttggctcctgtgaggctggtgtcctgctcacctccccccaccccgccacccgccttgtgggtcccttccctgtggggatgtgtgttcctcttgggtaagtctcctcctgggccgaggttcccagattcctcagtgctcttggagagcctttgctgctggagcacaggttcttcacgcctgagagtggacctgcgatcaccaccttccttggaggatcttggtggatgcccccctgactacagcaaatggggctctttcttctctggcggcgtctctgcttcgagactcaggctccagcttcccttctctctggtcctttgctggggggaccagaggtacagataccctcatgatatagggattttcttagcggggaaggtgttgtctctactgtggctaaggctccagcctctctaggggacaagtaccctgggcctctggcacttgccccttctctgtggaggagctgcctcctcactgggtctcagctgtagccgacttcgatgtcacactgttctgtctgaaacatcacctccctgggttagcgctcttgttcccctcctcctggcttgtgacccctccaggacttccttctcttgctgccacagtgtggtctcctgtctgtgggtattcttcctctgcactaggataccagtcctttccgtgtggagacacagggagggcgtcacctgcctaaggtgttgattgccttgtttaggggtgtagaccatgagacctcttctctctctgggctggagcacctgcccatgaccctctgttgggttcttgggatggaaagagggagtgtaaactctcgtttcacattcttgttccccctatgcagtaagaggcttttctgtgttggggtgttggactttggtgaggatccctgcacacctgagctctggtgtccaggcccttgccttgtgtgagctccctgggtcaaagaggctttcccctcctcagcctgaatccccactgtggcaccttctcctgggtccttttgttggttgctttgccttcttagagattccccaggtagggcgtgatagctgacctgggcgggggctgctgcggctttctttaggttgggccttttactgaggagatttaaattccctcaagtgtaaggtagcacccctacctattatcacccagaatgggtccctgcggtgttgggaaaattctccctgggggtaaggtaccagccctgtcctttgtgggcttcttgttctaaagcatatccgtcccatatggttgctgctagtcacatgtggtgattagtaactagttaaaaatgaaaaattcagttcctccattacacttgccacatttcagatgttcagtggccaacagatatgcgcaaatagagtgtttccagcattgcaaagttctgttggatagcactgtttgccagatgttcccttctttgtgggtgaggactcttttggtgtgacttccctctgtattgaggctcttgttcctcagtatggggctgtttctgtctttacagtaagtgactactccagggttccctgccctgcacacgtagagtgggagcggcccgtggatcccagggaactgtgcttttcattgtaggccccctccctggaggggaagagggcaatctccgctggtatctcagaagtcttcttctgaggcataagcctctcttcccagggctcccctggtctcgctgtcaggccctaaggtatgtcttcccttggactaaagctccttggaactcccttttgacctcagtcttctctgggttccaggtaacttcctttaaaataaagacgctcctctcttgaagttttgggttcctgccctgatggtctatgtctccctgactctaaattaccaatccacttgctatgggattcctccgtgagtgcagatcggctccctcacagctgcggtacctttgcaccctcttatcttagtaagatttctgtcttctcccaggtctctcttgggtactgccttctgcccccaaatctctaagccttcttggtattagcttctttgggttaggagtgttatttccttttggtttaaggatcctgctctggaataaatgtcttggtggtttgagtcccttctacttggcattcagccctgtctgcatgagcgggttcagctcttcacagctttcggcatctctgctcgccgtcgttttcccccacccccaatctttcttctcctacctacagcttacacacacacacacacacgcccttctctgtgagctgccagtttcatttgtctcctgacttgtctgagggatgacctctcctagccacctctgcccagcccctctgagtaggaagtgtgatctccagggctaatgcctccatcccagtcatcagctgtgtgcagcatgactgtcctgctctgaaaaacctttttgagtgtattctggggagaaggtactccatgctctaggaattttccacttcctgagtcagaggcacacaaaaaagtatgtaacttttcttgtttcaacaaacttatggggtcccctgttggccagacactatgctgggcagtcaagcgagcatcaggagaactggggctggtctcttgtcagatagcaaatgcttcttctctttaccagtcccacctacctcactatgctgactaggtccatgtctctgggtttttaccagccagggaatacgtgttaattcctctccaatctctcctagcagcgtccgtctccaagagagtatgaagagagtgcgtctgtagggcagggaagatggcggacaagcgcaaactccaaggtactagactgacttcctgctgcacctgtagccacatgctccctcttctgaggactgctctttagatacctgccacctgggcaggattctcacagccttgttcctccctggccaggtgagattgatcgctgcctcaagaaggtgtccgagggcgtggagcagtttgaagatatttggcagaaggtacaggggctgagaccctaataatctgggtcttcagagaggagggcacaggaaggcggctcaggacctctgggtgttgaccagcgggaggggctacatatgcagatgctgaggacctaagagaatcagctctaagatggattgggggtaggggttggggggggtcctcgagtccctagcataaggaagaatcactggagtgggtactgggacatcccctcccacactgacttctcaattctctccatccctcagctccacaatgcagccaacgcgaaccagaaagaaaagtatgaggctgacctaaagaaggagattaagaagctacaagtgagggggctgggggcctggacgcctttgtcctgagggtagagggaactgggagagtggactgctgggtcccagggagaaggagctgtgggccccagttcctgggtcctgaggtctgactttcttgcttttcccatctgcagcggctgagggaccaaatcaagacatgggtagcgtccaacgagatcaaggacaagaggcagcttatagacaaccgcaagctcattgagacggtaggagcccagagcctgagtcccagagaggtgggaaggtcaccagattcttgagatcccaaggggcggaggcagagcggccagaccccagaggtcctcaagagaagtaaggtttctgcacctaagggaagtgaagaggcagcggactcagagctcagaaagtagggtcacgaggctcaggtcggagtgtctgctggcccttagtcagctcctttcccacctttgagagcccccctgccaactgcactctctacagcaaatggaacggttcaaagttgtggaacgagagaccaaaaccaaagcttacagcaaagagggcctgggcctggcccagaaggtagatcctgcccagaaggagaaggaagaggttggccagtggctcacggtgagttggggtagagaagaggaggtgaactctgaggatcctgagccctgggtgtaggcggaaccctagctgatgggcttcctcttcctctccctcccctagaataccatcgacacgctcaacatgcaggtggaccagtttgagagtgaagtggagtcactgtcagtgcagacacgcaagaagaagggcgacaaggatgtgagtgagggagacccgacacctttgggatggggatgggcatgggaatgggctggccagcaggaggccagtcatttatgctcctgggagttggggcctggattcctcaggcggacagggccaacagccgggattagggatttgagagacaggattgggagggcttagcagctgcacgcgtggggcaggaaggaggtcagacagaatctcagggtcccctgggtgtctgggtagaccgtggggcctttgtgaagaggagcgacttgggggaaggtgagtgcaggttgagcttgggccacagagtaaaagtgagacctgaaggacacccatggcaagaggcctcctggcacccagagggccctggtcctagggagagcacagtgggtagagacaaggcagaacatggagaaggcagagaaccaggcctgaaggaagacaggagtctgggacaaagctggatgttggggtcccaggttctaaaatccgggattgtggggtatgagttcaaagggatacaaactgtacagacttgctgaaaccagaaagacagggaggggagagccgggtcctcagggaagctgtgggtgggagagggtcaggaagtggaagatgacagggttgggtgtcagactctgaggggtttgggaaccaggggctttcggggagatgatgggtccttgaacagagcagagatttggaaccaaggctaagatgttaaatcctaaaggggccttgaggggagggcaggagcgaggcttaggaatctgggctctctcagggataaatgggtagggttgggggcctagtgatgacagatatcacaattctaaacagcaagctcctcacaaatgggggttatcattgttactgctggagcaggtcggagggtatctgtatgccagaggcagtcacagtggtgggcgggctcagttgagaaatctgggctgtcaggtgaggtgcagatggaggccaagtcgtgggatggcacaaggacctctgggtcttttagaggtttccaaggactcctggagccagaaaggtgtggggagaggagggagcagtgggatcccaagatgtcaaggctaagattggtccccacagggctcagagggtgggtggaccccatactgccccaccccgaaggggatggcgtggaggctttgggtctccacaggggtcagggactgaggacaggttctgtgggggcaggaggggccaagcaggtgctctgcagcccctgagcctggccctgggctcgccagcagaagcaggaccggattgagggcttgaagcggcacatcgagaagcaccgctaccacgtgcgcatgctagagaccatcctgcgcatgctggacaatgactccatcctcgttgacgccatccgcaagatcaaggacgacgttgagtactatgttgactcatcccaggaccccgacttcgaggagaacgagtttctctacgatgacctggacctcgaggacattcgtgaggccctggggctgatcgtggcacaggaagtgagggcccagaatgggctgtgtgagccagctaagcatgcccttcttctgcccccacagcacaggcgctggtcgccacctccccccccagccacagccacatggaggatgagatcttcaaccagtccagcagcacgcccacctcaaccacctccagctctcccatcccgcccagcccagccaactgtaccacggtgaggccccacgggacactagtaccttgtgtttccagcagggcaggactcgaggagacaaatctgggtcactccaaagtggctatgggagcgtaattgaggaaacacagatctaggtatccagggtctaggctcttggagcacacgctaaggtcctatatctgggtccctaaaggacataaagagcaatagggtgcatcccgcgccagtttaggtcctggatctgggaagtgggaggggccggtgcctgggctgcctgaggaggctgggtagctggccaccttgggcagggatccaagggttggcttccctgtggagagcaggttcccagatccttaagaggctggtgggtcagtgctggctcccagaaaacaagaagactggagagcctgaattgagatggtttctccaggcagattaaggacagccatttgaccagctctggggccgcaatggcagtcaattgggcccaggtccccggggcattcagagattggcggttctccatcagagccccagaggtcacacaggtttctattctgcctcccctacctcaggaaaactctgaagatgataagaagaggggacgttccacagacagtgaagtcagccaggtgggtgtgagcctggaccgggtgggcacgccattcactcctctgttgcttcccaaaggcatcttgaggcctgagcgccggccactgtgctgggctggtggacacaggtggctcagaaatcagtgctgccctgagggcaggtgggcagggcaagtggacaggtgactggtgctgtggtcaagggggtagcacacaggtcacccttggcctggccaggcagtcaggagatgctgctgtggagtgccctgggcttcacagtcaggtgagtttgcctggcagggagaggtggcagccagtaacatgggcaagttgtgacagaaagtttggaagtgaggagagatgagtctggccaggtctgcagggccaggggcccaactgtgagcacagggactgggactgtcaggctgaggggctcaggctttgtggacctgagtggcctccagagtccaataagcctaggaagcgatggggcctttgctgtgctgataatacacactgcaaatttctgagaggagacggtggcgggcagtgcttcttcaactcctttgacatctcccaggacaggagcacgctttcggaaacgctgctacagaacaatgttaggcaggagcagcatgggcctgaggcccctctgtgggctaacgggatggatggttccaaggggacaccctgagtgggcattgaggaggctggtgtggagactaaggggacccgcaggtagtagtgagggcgggcaacagggccaggaggtgatgaggagagacactgaggcaggtactccaggggccaggctgggctctgccaccttcccaggcccccactgccaagcagcgatgcccaggagagaagtgggtagtcagtcctgttgggcgcttggtaagcgcaaggtgcctgtggggtggctggaaagaagcccaggaggtggttaggctcagcagcccgagtgctgtccgcagattgcctgcggtagggataccatgagcacatttaccctcccaccactttctggagtgctggtaacttccagccctgtgagtagcttctgtgacccttcaggtgacattcagaattactatccaatttccagctgtttttccttctactcttggacattaggcggctccagctaatctcatattgagaacacttaagtgtttcccactagtcctctggcttccaacagatggatcttctctggctgacaacctaagttgtgtgtcagatccctgtgggggtgtccatggggcggtgtccaggcaggacttgggaagctgggcaggctggaaatcagtgtgagtgttttaagcatgaaggtgattgaagccatgagggtgagtaaggtcacccaggtccccaagagggcaggagcaggtgggggcagcgaggccagagaggaggctgctgggacaaagatggagcctgaggtgggggtggtgagggagaccagctggcccactgggtcctgaccctctgctctctcccacccgcagtctccagccaaaaacggctccaagcctgtccacagcaaccagcaccctcagtccccagctgtgccgcccacctacccctccggccccccgcctgctgcctctgccttgagcaccactcctggcaacaatggggtccccgcccccgcagcacccccaagtgccctgggccccaaggccagtccagctcccagccacaactcgggcacccctgctccctatgcccaggctgtggccccaccagctcccagtgggcccagcacgacccagccccggccccccagcgtccagcctagcggaggcggaggcggcggcagcggaggcggagggagcagcagcagtagtaacagcagtgccggtggaggggctggcaagcagaatggcgccaccagtgagtgaggaggcagcggggtggggggcgtgggcggggctgggcagcaggcagcagccctttccatttactctttgttcccaggttacagctcagttgtggcagacagcccggcagaggtggctttgagcagcagtgggggcaacaatgccagcagccaggccttgggccccccttccggcccccacaacccacctcccagcacctcgtgagtgtctcggccatcggcagggttgggatggcagccttttgaaacagagaggcgcaggcgcctcacccccgcatcggtgggttctgaaccccccgcccttgctgctgggaatggccaagcgctatcctccatctccctcgggtgttacacccccacttctttccagcaaggaaactacatcagcctccctgctttgcccttcagaacattctaaaatacgttctcatctaagtggaagttttctcaagagccccataccctttcctccccatttctgttacctgcctgaggccaattgactgccaccggagggtcactgtttcacttttcaaagtgaattgtcccgaagtccttattcctctgcagccactccttcaaatcttagctcagaccattccactgggtctgcctgtttcccgaagaatgccctaagaaagatcagtgtgcacaaaggaaaggcctgcttcctgccccctcaccccagctccagctggcctgcccaagggggagtgggccctgtgaacacctgcccagggcaagtggttttgatcagcctgtggcctggtggagcacccgagaatcctcacccccacccccacagctctgctctgctgatgagaaaccattccaaagattgggctctgcctttgtttgcccagagaaccacttctttctcccatctgtctgccctcacctgcccctctcagatcccatctgatctgtgcagtctcccctctctccagccaggcctctctgcccatcccaccctcagggaccctcctctcaaccccctcttccatgctctctctccaggaaggaacccagtgcggcagccccaacgggggctgggggcgtggccccaggctcagggaacaactcagggggacccagcctcctggtgccactgcctgtgaatcctcccagctccccaacgcccagcttcagtgatgccaaggcagccggtgccctgctcaatgggcctccacagttcagcaccgccccagaaatcaaggtgggctcctcggacatcccccgagcctctgtgtcctgactctgttgtttctttcctccaggtctctagctgcaccccttgcccccaccctctttctggatctctctctggctttctgtccccttctcacacttgctctttctccaggtctttctgtaccaccctccccgtgaccttgatctctgggggctctcatacctcctctcttgttccctccaaagctctgtttctctgggtctcttttcctttctcttggttgcacttgttgcttgctctctctgggtctccatcttcatcccccccgcaggccctcagtttctgtccccgtttgtcctcacaaggcatagactggtgtactttctgcacaagtagaaagactggttgggtgaatgcagcctggttccaccctttaggaagcttccctgctggggcagctgcagggaaggttgcggtgggcccaccgaggggcatctgacctgacctgggagacaggcccaggaaggtctgagagggggtgatgtttaagctgagacctggaccaggcaggggggctaacagctgcaggaagggcttcaggaggtgctttaggaggagcatgcatctgcctgtgtgcttaggaagctgggcaggatgcagcagagaggagagaggtgtccactctgcaggagacagtgccaccagctgcagggctgagatagtgggtgtagcaggataggacggtggggtcctgatcatcgagggtcaggagctggggcttggcttgtgagccagtatactgtagcgcagcttccatggggggaccagtgtgtatgcccaggctgtccaggaggcagtgtgcgcgcccaggctgtccaggaggcagtgtgcgcgcccaggctgtccaggtccaagtcttggcattgtcctttctgtgccttcatctgggaaacggcaatagtcacgattatacctactatgtagggttatttggaagactaaatcatcctcataaagctcttggaacagtttctggcccaacagaagcattaattttttttttttttcttttttgagacagagtcttgctctgtcacccaggctggagtgcagtggtgcaatctcagctgaatgcaacatccgcctcctgggttcaagcgattctcctgccgcagcctactgagtagctgggattacaggcgcctgccaccacgccaggctaatttttatatttttaatagagatggggttttgccatgttggtcaggcaggtcttgaactccgaacctcaggtgatccacccaccttgacctcccaaagtgctgggattacaggtgtgagccaccgtgcccggcccaaattttagaagtaggtggacaggatatttatagtgcgtgcatttttctggaaaaagggaaacagcagctttgagattttcagaaggggtccatatcttttaacaccaccaacaacaaaaatgaatcgctggggtgggtggtcgggaaccatggcaaggtttggagtagagaaggaacaacatgacttcattggaaaggtcccctggggctggtgaggacaggatagagggagggtggtctgggcaggagaggacaggcctgggctgtgtgggacatggtggcacgacagggaagggagccatccagtggggtttagaagcaggacggatagctgggcgtggtggctcacacctgtaatcccagctcttagggaggcagaggcgggaggatagcttgagcccaggagtttgagacctgcctgggcgatatagcgagacaggatggataagccttggcgactgactcgttgtggagagtccagcacagggctggggtttgggacagctgcacgtggctggaggagatgggaggaaccagccctgactttggggaacagaagcctgctgtaacctttgtaataggaaacgaggctgtggctgcggggctggagacccaacctacctgtttccagcaaggagactgaagcctagccgggctgggcccaccccgattccagtcaccccatgccagtcacaggcagacagctgagcatgtagacctcctgcctccttcaagacaggcgggagctctcccagcgtgtaggtgtccctagtgaaggagcgtgtactattggcacatcctttgacaaaaatggtagcgcactgtacatattctgcaggttggcgtttacttctgtagtatgtcacgaacttgtattttgaaaatctcggcgtagtattccatgctgcagagtcccactcacgagacgttcctctgctgatgaatgcgtcgtggtctccgattgtttccctacagtttgatgcttttacctgtcatgggtagattgtggggagtgggtcgttggccctccacggcccccaaacagggcaggtgagagcatctggggcctgtgtcaggctgcacttgctcctgcagcccaagtgctcaggccaggcctcttgtttcctccccaggcccctgagcctctgagctccttgaagtccatggcggaacgggcagccatcagctctggcattgaggaccctgtgccaacgctgcacctgaccgagcgaggtgagggacccaggatggtggggaagcagcgggccaaagaggaggggctgcccctgacccatcctcaccactgagggggccggacccccaccctccccacagacatcatcctgagcagtacatcagcacctccggcctcagcccagccgcccctgcagctgtcagaggtgaacataccgctgtcgctgggtgtctgtccactgggccctgtgcccctcaccaaggagcagctctatcagcaggccatggaagaggccgcctggcaccacatgcctcacccctctgactctgagcgtattcggtgaggggccacagggaagggggatggtctgggacttgagtcttacggaggaggcagtggctgaacctgtgaggctgtgggtagagcaccaggcccctgacttgggctctccactgaaggtcagcaccgccctgggtctttctgtaccacctccccccgcagggatgcatgtctgagcacccttttgatcacgacaggactagtaggcagctggcactgaccttcctgttgctctcacaggcagtacctcccccggaacccctgtccgacgcccccctaccaccaccagatgccacccccacactcggacactgtggaattctaccagcgcctgtcgaccgagacactcttcttcatcttctactatctggaggtacagcagggcccccggggcagcctcgggccccccggcttcgccgccaccgccgccgtcccccctcgggctggaggggtgaggtgggtgccccactgcggccactgggaccgcaccccctccctattcccactcctgggcccctgccccaaatccacctgtccccgtccccgccttccagcccagagatgttagaactgcttgggttgacagcgaggctggtccactgaggcacacctcagccccgcttccagttgcccactggctcacccgcggcccctccccagccctgctccagcagccccagtctaggccgaccccactctgctcattggcacattctcaggcctccctggagaccactggggagctgtccagccccctcccaaccccagtgagtcatgagtgacctccaccctcatccccacttgggaaattttctaaattgcctcctctctcagctctcatcacacattagtttttcttccttctcaaagcttctctgaaagcaattttcacctcctgtctcattttccttctcctgatcagcattggtatgttctgtgcccccagccccatctccaagaggattgtccagcccaactgtggtctgtggcgggggccggggttcagccctgatgtcctgccccattcccctggctccccacccagtttgggggccccctgatccccctctccactgttcctcccccagggcactaaggcacagtatctggcagccaaggccctaaagaagcagtcatggcgattccacaccaagtacatgatgtggttccagaggcacgaggagcccaagaccatcactgacgagtttgagcaggtgagggccccgccccctctcttcccgctgctagggttggggtagagtccccaggctccaggcagcccctgctggcctctgctcccttgcctccacctttcagctggcgcagtccctcagcctgaccaagtactcctccctctggctgtctgctcagcctggaacaccgccctctcatcctccacttggccagctcctaggcctcctgtaggtctcagcccaaatgtcccttcctcaaagaaaccttcctggagccacccagcccagtgcctcccctttgcagtgctgggcacactcgcctggggtgtgggattttcccagtatgtgtccctgcaccaggctgtgggctctgctgccgagggaccttgatggcccccacttcacctccaggtcccagcactcagcagggcaggggctcagtgcggaaactattttttttgaatgggcttctcaagttctaatactgggaaattcctgctgcttgcaaacactctggaaccaacctacctgggtttcagcccagtccagctgggcgactctaggcaagtcactcgaacctctgtgtctcaattaacttatctgtaaaaatggggggaagaccacctacctaatgcagttgttatgaagattaaatgagttaataacatgtaagtacttaatggtgactgctacatagtcagtgtcatggattttttttttcaaattactttcagttggtgtgttctacagtgatgtttttttccaccaaatacttccctgatgccgagccccttcatggggatgaagtagtacaaggtccttgtcctcagagaactcagtcccctctcctggttctcccaggttgccatctttgaagcacttaagacattcatttagaacctaggtcctctcccattgtgtcctcagatgttaaccacagacttcctgtcctttcctggtttggcccaaaaccatcctccaagttagtacatttcagggcatccagtcattcagaaattcccacaccacttcgtcaccaataaaatgtccctgcagagtgcttggatttagactctgagactgttccattctctagaacaagggtgacagtacccactgcctcgaggtctttgtgaagattaaatgctaggctgtgcatcctgtactcacgtgagaggtgctcaaaagccacagccctcgaggaaacgaaggctgtgcactcacacctggggctggggccccgttctggcagctggcttcggtggaacctctgcggccccctccgtttcctcctcgctgaagtggcatgataacatttcctacccaagaagaaccttgtgaggatggatgagagtgtgtgcgtgcagggcagctggcccggtgcctgacacatccacagccctaagaattgtcccctttgtctgttggtccggcccagatcccagaccacctcctcgtccactcactgaccgccttctcccccggccagggcacctacatctactttgactacgagaagtggggccagcggaagaaggaaggcttcacctttgagtaccgctacctggaggaccgggacctccagtgacaccggcccctccctctacccacccccttcccccgcatgctgatccccctgcccaggtgagggccctgccctggaagactggagggaggccccaagccacggggcatccccctctcccaggaagcagggagggggccgggaggttttcctctcagccccaccctgggggcccgggggcgagggctgccccctcctcccctccccagtgagggacattttttggtaaacctattttcattttggaaaatatttatgaataaatagttttatatga

SEQ ID NO: 1157 - DNA, 17820 bp, Homo sapiens
gcgcacgcgcggccaggcgctcgggatacagaagtgatgtgagtgtctgcgagcgtggtctcgcgggcgggtgacgtcatcgaggcgagagaggcggagccgtggacagtgggcgggaggctgccaacggttttgagcgtagggggaggcgtgagagggggatctcaggggaggaggtcaatcgcttgccccccactttggcaaattggggactgaggactggaagggtggagagtaggcggaaccaggtggtcgtcggggcagaggatctcgggctaggcttgagggcggcgtgcttcttagggacgacttagggcgtgactgagggttcacaaggtttcttttggggtggtcgggagggagagattctagggaacaaggaagctcgctatggctttcttgccaggaggggtcgaagggaaagtacaagggagctggagctgaccctgggtagaacgggtgaagggatgggggagcgtgaggttccgccctctcttgagactggaaccaattgagggactagtagggcagggggacagaaattgggctcctagtggatttgggtccgtttccgttgggacgttttgggtgtgagaacttaagagctcagttgaccggggatagcctgtgccggagttgatctgcagcttccagcactcgtagtcgggaagaggagcttcagcagcgctgttgtcccacagtaggtcttctgtccgcacccgctctgcgctgcaccctcttaacgctgttcccaggagctggggaaagggatgcttttgcccactcccatggcccctggaactggtggaaacctttcctctaaccagaaagcctcgatatccttaattcaccaaggatccttggcgtggagtcttcctcccttctcccaagtctttctccgtgaacttttcctcctggactttgctaaagcagaacctcccagctctttgctgtctccggttgtctcttccctgtattcatggcaacatcagctgacagccccagttcacccctcggggcggaggatctcctgagtgattcatcagaaccccctgggctcaaccaagtgtcgtctgaagtgacctcccagctctatgcttctttgcgcctcagccggcaggcggaggccacggcccgagcccagctgtatttaccctccacctccccgcctcatgaagggttagacggcttcgcccaagaattgagtcgaagcttgtcagtcggattggaaaagaacttgaagaaaaaggtgagggaagtgtgtcttggagaccactgtggcactagacaccagagagtcttgggattggggttggtaaaaataaaaagctttgatgagatttgaactcttcctgttggatttcatattccttttaactgcataggcagccatgcttataagggagggagtgacctgggacaccataatttgaaaattatgaaacttcccagtgtttttttgtgagagacatctctgctccgagtagatagagcaaacctatggggtaggttggtgagctatttcccgtgcactgggaatgggtaaggtttcttgatcccaagagggagctagggacttaggatagcagctccgatccttccagctcaacactatgttgatagtatggttccaactttggcatgtacatcattaagacatagcttagtcaactacaacatgttacagagaagatagttattagtattgtatagaaaaggtgtcagagtcaatttgcagactggttaggtcttccagagtttgaaaatgatagccataagccatacagtccttacatttgttcttgaatcggcaagaatctccgcaactcttgtcttatacctcctcgattattttatttacactctctttctggcttctgtagtatttgaatttctgattcaagtttaggacatcccttattggatccgtttggtttttcttgttttccaaagtgctggagtgaaaattctaccctggcaataggtaggagatagataacacagactgcatctgatttccatgtggcttttttccaggatggttctaagcatatctttgagatggaaagtgttcggggtcagctccagaccatgctccaaacctcacgtgatacagcctatcgtgagtaagccccttccctagaactatgaaggagaacctagatgtaaggggtgggagaaagtggacagaggaagcaggcaggaaaacctctgagcaagagatttcaggagaaaagtctcccgttctttgggagagggggtgaaggagtgagggaactggaaaggaaggccttttctcttcaggtggcccctgtttttgtcattacctgactctggctttggggtccctctggctgcctgcaggggatcctctcattcctggcgctggctcagagagacgggaagaggactcctttgacagtgatagcacagccaccttgctcaagtgagttctccttgtggttctcctagcttgtttgctttcttggaaatccaggtgttttgttccttatttctccctttattgcttttgtacctcttaagaacccaagaggcttatcacttgcctttcagttttcatctttttctactgtctcctgccccctttactccttcaggaacacaggtatctgttgcctagtacctggctttctcttaacctgcagtcattcttcccctctaaagagttagcttgtttctgctgaaacctttaagtgaatcacagacctgtgtgttatttatagcactatggttatatagctttacgactttggacaagtctcttgccctctctgggtctcagtttcctcatttgtagaatatcacagttggacaagtggattccaaaagctttcccagccctaacattctctacctgatttgctcagcacccggcccctgcaagacttgtctccatctagctcagcccaagccctggaggagctgtttccccgctacaccagccttcggccagggcctccactcaatcccccagattttcaggggctgagagatgcattggattcagagcatacccgccgcaaggtaagatgcaaacgcttcctttcgaaagcagcaaagattagaaagaggggacccaagtgttgaaaagggctgagggggcctggcgtggtggctcacgcctgtaatcacagcactttgggaggctgaggcaggcggatcacgaggtcaggagatcgagaccatcctggctaacacggtgaaacccgtctctactaaaaatagaaaaaattagccgggcatggtggtgggtgcctgtagtcccagctactcgggaggctgaggcaggagaatggcgtgaacctgggaggcggagcttgcagtgagccgagatcatgccgctgcactccagcctgggcgacagagcgagactccgtctcaaaaaaaaaaaactaaaaaagaaaagggctgagggttaagagcctgaaagctgggacttaaatgtttttctgaggagggcttttttgaccattccatctaatatggcaccacctcctttccaagtagtcagatcgccttcttatttctttcatgtagcttatcgttctgatatatcttgtttttttctcctctctaaaatttgagggtccgtatcttgtttgtcttagtactggctgcctaaggtctagaatatacataacacagaaacactctgtgtttgtcgaatggacacaaactctgctagcttgtgcacaggatttacagctactggtgatatactgagctttatctctgtgagcctctgccttagtgtctgaaggggacagagaaatagacaaaggagaggaaaagtcaaaatcactggttgccatttttggaagcctctctttctccatgttaaaccccttggcatgaatgaaaggctttcccctttatccttgctgtgtttattcattgtgtccaatgagcttctgaaggtaggagtaactttgcacattttgctgtgtgggctgctgcatctctgccaaaaggtttatgggatttttactcaggagatccaggaaaaggaggagcctggaatctaagcacttatctcctgaaaaggtacagaaacatgttggagatcttgagcctcaaggtgcttgcttcagaattttcctgattctccctctccagacctattctgttcttgggacccaagcttcttggctccagcccactcccccactagaggagctggaaagtttggtgctgtggtcataccaaagatgggcaacacccagactcctcacccttttccccagcattgtgagcgccatattcagagcctgcagacccgagtgttagagctacagcaacaattagccgtggctgtggctgccgaccgcaagaaagataccatgattgaacaactggacaaggtaccagggtagcaaaatgtgggtgggtctctccatgaagagcattaaggaataataaataagtgggtggccaaccaatgtttcttggtacatgctgagagctgggcaaggggttggtttgctgactgttgggagaagatggctgttgaccctgcccctgtgggtagaaagaggcaaaaaagttattttgaaatttcatcttacttgccctacctaagaccctggcccgtgtggtggagggctggaaccggcatgaggctgagcggacagaggttctcaggggacttcaagaggaacaccaggcagcagagctcaccagaagcaagcagcaggaggtgagcgccctggagcatatggcattagaacctgagtcacagatctcaagatggaaaggggcagaaatagctctggaattagggtttccaacagattgacctcagtcttgtagtggctgtcctgacatttcttctcatccctcctttcttctcctttaaccgtttctgctgtccaacttgaatcatcaatgtcttaatttttcccacaccatgtagtcttctatctggccccttagtcatttagttaactgtgaagtttcaagtttacattgtcaatgctttataaaatatagcacacacagatttcccacagttcctctgccctgtattcctctcttcctgaaagacagtaacccgcctggaacaaagcctttctgaggccatggaggccctgaatcgtgagcaggaaagtgccagactgcagcaacgggaaagagagacactggtgagaagattggactgggttaattccactggaagctgttaattacttctagagagctgtgggctattggtggattgtgggagattataatttgagttgcaccagagcactgtttcccaaagtgtgttccttagaacactaattcagctagatattctattaaaaaaaaaggctctgctaccaagtcggtttgagaaactctgcaaattgtatcatcattagaatattagtgtcatctgaagaattattttaaaatataggctaggcacggtggctcacccctgtaatcccagcactttgggaggccaaggcaggcagatcatgaggtcaggagtttgagaccagcctggccagcatggtgaaaccccgtctctactaaaaatacaaaaaactagctggacatggtggtgcatgcctgtagtcccagcgacttgggaggctgaggcaggagaattgcttgaacccagcaggcagaggttgcagtgagctgagatcaagccactgcactccagcctgggtgacagagtgagactccatctcaaaaaataaaaataaaaaataaaataaaataaagatttctgggactcacctgcagaggttttgattcagtagatatatggtggaactcaaatcttttcagaaatttcctgggtgatttttttcaatctggtttgggacctctggtgtagggcatggccaaaaaaggtatgaaattgactaactcaagtttcttttcgtgtttttttttttttttttttgagacagggtcgcgctctgttgtccaggctggagtgcagtggcacaatctcagctcactgcagcctctgccccctggattctagcgattctcccaccttagcctcccaagtagctgggactacaggcgtataccaccacgcctagctaatttttgtatttttttggtagagacggggtttcgccatgttggccaggctggtctcaaactcctgacctcaagtgatctgcccgccttggcctcccaaagtgctgggattacaggcataagccaccatacccagccacttcactcaagtctcttagagctgaaatgataaggtgattagccatatgaattagtagctgggattggaacttgttgcatgcataatgcatgcttgctacatgcatgctggtacttgtagtcttaacaggctatatctgacagtcctgatgatgatgggtgatggttcacgattataggctggatattctagtcttagtggaatttcttttgacgatgatggtggtaactattgtgtattgagtacttactatgtgcctgatgccgtgctaaatgccttacatatgctttttactttaatgctcagaaggcagaccctgttatgatctccagtttacagataagaatgtatgcctaagaacacatagtaaattccagaaccaggattcgaacctgagatttgaacccaggtctacctggctctggaacaggaactcttatctactatattataatcctatgagcttgtcaactattgtgtttgtttgttttgagatggagtctcgctctgttgcccaggctagggttcagtggcacaatcttggctcactgcaacctccgcctcccaggttcaagcaattctcctgcctcagcctcctgagtagctgggaatacaggtgtgcaccaccatgcccagctaatttttatatttttagtagagacatggtttcaccatgttggccaggctggtcccaaactcctgacctcagatgatctgcctgcctcagcctcccaaagtgctgggattacaggcatgagccactgcgcctgtcaactattgtggggtttcttttggttttatttgagatggagtcttgctcgatgtcgcctaggctggagtgcagttgtgtgatcccagctcactgcaacctccacctcccaggttagagcgattctcctgcctttgcctcccaagtagctggaattacaggcacccaccaccacgcctggctaatttttgtatttttagtagagatggggtttcaccatgttggaccaggctggtctcaaactcctgacctcaggtaatctgcctgccttggcctcccaaaatgctgggattacaggtgtgagccaccgcacccggcctaattattgtgtttttaatgagcataattctcagcaggcaccttgtatgagggtcagagggcagatcgctggtctctgaagagcctactaaggagcttggttttcttctgcggctgtaggaggaggaaaggcaagctctgactctgaggttggaggcagaacagcagcggtgctgtgtcctgcaggaagagcgggatgcagctcgggctgggcaactgagtgagcatcgagagttggagactcttcgggctgccctagaagaagaacggcagacctgggcccagcaagagcaccagcttaaggaacactaccaggcgctgcaggaggagagccaggctcagctggaaagggagaaggtaaaagtggcagttggaagagctgaggaactagggagtagatgaagggcaaaataattgaatgggatggaatgttagaatatgggggatacatataggcaggaatggagagtagagagccatgtgtgggagacaaggttgagagtatagggccagcaggaagggctgggggtaatgaatacgtgaaaggccaaagactgaaattcaacagggatggggaaataaaacaaatgggaggagctgggggaagcttggattttagggtttgggaggatgaactggggagtgtaggtaaccaggagataagaaatgaggtatgtatatacatttgatttgtctttcataggagaagagccagagggaagcccaggccgcctgggagacccagcaccagttggcattggtgcagtctgaggtgcggcggctggaaggagagctggatacagctcggagagagagagatgccctgcagctggaaatgagcttggtgcaggtcagaaggcagaggtttcttgaggttttgttctgacagaagtagatctgaggcagagggacctctcaggagttgtggcagacactcccagttcaggtgtttggggtttaattccattaacagtttctatgtagtatgggtagttttctgtcctaaactcagagctatttcttactgagtgaccatttcccacaatatgtcagactgacctagtgttacttttaggattaaatagatttaaatctattaaagataccttatgttattttaagagatgacaccacacttagtgggttgacagagcaggtgaaagcttttgtcagagacttgattccaattgtaacagtgtgctttgtaattctcattacttgaataacttgtattaatttctctgagtaggtcagggacccaggagggcaatgattttttaatttacttatgaaacttccataacagcacatggcctggcacagaattgtactcaaaaattgtttgtcagatataattacactttgaaaaactctttccatctagctaacacactgaattttaaattcaaactagtcggactcttgccatggaatagagcaggagttggcgaactttttctgtaaagggccagacagtaaatatttttagctttgtgggttgtatggtctcagttgcaactacccaactctgctgttataccacagaagtagctataaactgtacgtaaacaaatgggcacagctgtgttctagtacaacttatctaaacaggcaatggagggctgaattgggctgtagttcgccgatctccagaatagaggaaaggattggagagagctgtgttccagcccatgggggagacacagcgttgaagaggaaagagtattgcattaggacttagggcacttacgtctacttctagctagaattttgacctttatgggcctctgtttttatgtataaaatgtgtaaggacaaattgatgaattttccaggtgcaagccagtctgagaggctatgttccttataaatggttaacttaaggaggtaccagtgaggccagcatttgagaaccacaatcctttggcccggtatggtggctcatgcctgtaatcccagcactgtgggaggccaaggcgggtggatcacttgagcccaggagtttgagaccagcccggccaacatggtgaaaccctgtctctactaaaaatacaaaaattatccaggtgtatggtgcacacctgtagtcccggctactaagaaggccgaggcaggagaatcgcttgaacccgggaggtggaggttgcagtgagcccagattgaaccagtgtactccagcctgggcaacagagtgagactccatctcaaaaaaaaaaaaaaaaaaagaattgacctagggcttcaggtgttacaatgagatcacatgcgataaagactaagaaagcatccgggtgtggtggctcgcacctggaatcccagcactttgggaggccgaaacgggcagattgcttgagcccaggagttcaagaccaacctgggcgcaatatggcagtacctaaactctgctaaaaatacaaaaacttagccgggtatagtggcatgcacctgtagtcccagctactcgggaggctgaggtgggaggatcaactgaaccctggaagtagaggctgcagtgacccgtgatcacaccactgcactccagcctgggtgacaggagcgagaccgagtctcaaaaaaaaaaaagacagaaagggccaggtgtggtggctcacgcctgtaatcccagcactttgggaggctgaagtgggaggattgcttgagtccaagagtttgagaccagtctgggcaacataatgagaccccatctctacaaaaaataaaaatattagctgggtgttgtggcaccagcttgtagtcccagctactctggaggctgaggtgggaggatctcttgagtctgggaggtcaagactgcagtgagccatgatcacaccactgcactttaggctaagcaacagaacaagactctgtctcagaagtaggggctgagaaataaccactatttggatttagaaattgagttctttgggccatgcgcggtggctcacacctgtaatctctttgggagactgaggcgggtggatcacgaggtcaggagattgagaccatcctggctaacacggtgaaaccccgtctctactaaaaatacaaaaaattagctgggcgtggtggcacgcacctgtagttgcagctacttgggaggctgatgcaggagaattgcttgaacccgggaggcagaggttgcagtgagccgagatcgcgccactgcactccagcctgggtgacagagagggactccatctcaaaaaaaaaaaaaaaaaaaaaaaagaggttgagttctttatagtaaaatactatacgtggaaatcagattttagtgagttgaaggactgtggctgagaaaatggagacacttataggttgactgcttaaggaggaagaggcactgccatttattgaatgtctactggctttcaggtactctactcagggtattttttttttttttttttttttttttttttttgagacggagtctcgctgtgtctcccaggttggagtgcagtggcgcgatctcggctcactgcaagctccgcctcccaggttcatgccattctcctgcctcagcctcccaagtagctgggactacaggcgcccgccaacacgcccggctaattttttgtatttttagtagaaacggggtttcaccgtgttagccaagatggtctcgatctcctgacctcgtgatccgcccgtctcggcctcccaaagtgctaggattacaggcgtgagccaccgcgcccagcctcagggtatgttatatcagacacgtagaatggatttgattgctctgtcgaacatttattttagctaagaaatttatgtctttcacccatagtcattttcactttgatgtatgtttaaagtgcgaatatcttaataaggaaagggaacctctttcactccttgaggcaaaattcttgttcttcatctcatatgaggggaaagttggtactggattttgtctacattatatcctccatcctcttctaagcccaaacagatttgggccgttatcccaccttccttcactccaggcccggtatgaaagccagcggatccagctggagtcggagctggctgtgcagctggagcagcgggtgacagagcggctggcgcaggctcaggagagcagcctacggcaagcagcctccctcagggaacatcacaggtacgtgggactcactgggtgtcacttctctcagccacagcacgtatcgttagtgccaggcctgtgttcccttcaatccctttgccatggtccagcactgtgactcccagggtgcgctaactcccatcagctgggacctgagtctctctcgggagggctgccttcacgcgttcatggagagccagaagtgcctgggaattttcatcccatagggagtagcccttaaccaagaactgatgggtgcagaatgatagatggtccagctccctcactgggacagtgctgaggtatgacctgtgctgtctccagagctgctctgtcggactgagcctcctcgcagcctggcctcacttctcctcacacccattctgctgccgagattttctggaactgcttccgaaataaatttatttaagtctctgcttctgaggaacccatcctaagaccccagctttgtccttgccgcttcctgtgccatggccaggctagctgactggctatctgggtcactgtcatgtgcacacatgatgtctttttctcagttggtcacttcttctgtctccagtctcaggcctcttctcctacctgtgccctgtaggaagcagctgcaggacctgagtggacagcaccagcaggagctggccagtcagctagctcagttcaaggtggaaatggcagaacgagaggaacggcaacagcaggtggctgaggactacgagctcaggtcctggtccccagagtgcccctttcaggccccagcccctttcccatgggtagagcccaaactgggaacggtgaagagctgctcccttgattgatctgtcctcctctacatgggccccagctcctttcagaatatcagatgtccaacatttcccttctggctctttttagctcccaagtatctgcttccttaaaggccctgagtcacttcttctctctttgcttcagactggcccgggagcaagcgcgagtgtgcgaactgcagagtgggaaccagcagctggaggagcagcgggtggagctggtggaaagactgcaggccatgctgcaggcccactgggatgaggccaaccagctgctcagcaccactctcccgccgcccaaccctccagtacgccttaccccttgagctaagcttctccgttatgttctatttttatttttatttttgagacagggtctcactcttgcccaggctggagtgtactggtgagatcatagctcattgcagcctcgaactcctgggctcaagtgatcctcccacctctaactcccaaagtgctgggattccaggcataagctaccatgcccagcaagaactgtgttctagattccttctttggaaatctagctccctcccaagggaagtactaagttcagctcctaaggcctacatcaggggagaaaaatcggtggactttacaaataataactgcctcagcaaaataaatccttttttccatggccatagctcactcagactggccccattccattgggcataactctagtctcccagtcccaagaggggacaaatgatacgtggtactagttttgtggagggacagctgaattaattatgagggaaagggccaaaaattgttgccaagtcctgccccagagtagagtagggagtctcacttcctagcccttcatacgttgatacttcccacttccttcttttaattatgaaattctagcaggtgtggtggtgcgcctgtaatctcagctatatgggaggctaaagcagaaggatcacttgagctcaggagttcaagactagcctaggcaacatagtgagacctcatctcaaaaaaagaaaaagaagaaaaaattaggatattttaattttaattttatttatttatatacttatcatttatttatttgagacaaggtctcactctgttgcccagagcgctcaagcaatcttccttcctcagcttcctgagtagctgggactacacacacgtgccattgcccccagctaatttttaaattttttgtagagatggcatctctctatgttgccaagcctggttcaaactgccagcctcaaacggtcctcccaaagtgttgggattacaggtgtgagccactgcatccggaaatttataatcttattaaagtgtttgtaccatgtcttatctctttaaacctactgtgctttgacccttctttctgcctctctcctggtcaggctcctcctgctggaccctccagccccgggcctcaggagcccgagaaggaggagaggagggtctggactatgcctcccatggccgtggccctgaagcctgtattgcagcagagccgggaagcaagggacgagctacctggagcgcctcctgttctttgcagttcctcctcagatcttagcctcctgttgggcccctcttttcagagccagcattctttccagcccctggagcccaaaccagacctcacttcatccacaggtaactgggggcagaagtcactggggttccccttctgtgcatgaattggctccctctttcgtaccctgctttctgtctgatacttgagcatttagtttcccagatgcctttagtgatcgcaagttgcaaggagcagaaatctgctcacattggtccaaataaagggattgagatctcatggaaatatgacatcgctggacttaatgagaactggagttgggaacggggtactatcaggaactgaggcagctagctggcccttttctgtgggcctgcatagcctcctgggtccacctctcctgcacatctgctcttttttcttgctagaccagcattcaaggttctcacccttcataacttcagtttacacatgggtttgaccagctgtgatactgactctagctgagcctctagacatttatagagacatcggtgtctcagtttttttaggtccagtttaaagaggccatctgattggattggctgaccttgggtgtggtgtccacccctagtttaatgtcacctgtgatttgagtggatgggggcattctgtgtggtacaaacatgacaacctaggtcgaattaaaaatgagggatggggccgggtgcagtggctcacgcctgtaatgctagcgcgttgggaggctgaggtgggaggatggcttggtgccaggagttccagaccagtctgacccatatagtgagacctcatctctacacaaaataaaaagttagcaggatgtggtggcacacacccaaatttccagctacccagggaggctgagacagaaggattgcttgagccaaggagtttggggctacagtgagctaagaagttgccattgtactctagcctgggcaacacagcaagactctgtctcttaaaaaaaaaaaaaagagattacagctcacgcctgtaatcccagtactttgggaggccgaggcgggcagatcacaaggtcaggatatcgagaccatcctggctaacacagtgaaaccccgtctctactaaaaatacaaaaaagttagccgggcgtggtggcaggcatctgtagtcccagctactcgggaggctgaggcaggagaatggtgtgaacccgggaggcggagcttgcagtgagccgagatcgcgccgctgcacttcagcctgggcgacagagcgagactccatctcaaaaaaaaaaaaaaaaagagagattagttgtagcacaattaaaaattttttaattatgtgagaataataaaagaatgaggcatattcgggggaagaggtcagaacatgtgtgttactcatttccattcttcagggagtttgtgagggtatttatttgtttagagtttgagtaccacagctttcttctgtctatatttctgtcttagaattcagctgtgccatctctcagtcacctccaacccttccctctccagctactttaaacctccatcttcatcttctcttagctgtgatgttcctcttccatttaataggcccctttcttctgagtattaggtgagttgatttgtggagaagccccttcccccctgaacacacttgcacccacccatacctgtttcactttatagctggggccttctctgcacttggggccttccatcccgatcatagggcagaaaggccattccctgaggaagatcctggacctgacggggagggcctcctaaagcaagggctgccgcctgctcagctggagggcctcaagaattttttgcaccaggtaagagagattccacccagactagctcactttcttcttccctttctcctttcctctttctgctctgggaatccaggactctggcctcattccctgtttatgactaactctttgtcccagcttcttctctcagatccctgggcgtttttctctatcagtccctagggaacttgacaatcttattcacccacagttgctggagacagtgccccagaacaatgagaacccttctgtcgacctgttgccccctaagtctggtgagttccaactctgaagaaggttggggctggggcctaggaaagatcggagttggttatctaggatgaatttttaggagctggcaaaagtaataaagccttataaatgctgggtggtgggacttccttggttctatgccccatttcctgattcttggcattctttccttttgctaggtcctctgactgtcccatcttgggaggaagcccctcaagtgccacgtattccaccgcctgtccacaaaaccaaagttcccttagccatggcatccagtcttttccgggtccctgagcctccctcctcccattcacaaggcagtggtcccagcagtggttccccagagagaggtgagcatgttctggtttattagggaaaaaaggagggacagtcctgagtgtggatccagtacaggcacttacagtccttctgaattcctggggaaatgggctgagggctggggagacaggccctaggatgacgcctgtgattattgcgatgtctgtcaggtggagatgggcttacattcccaaggcagctgatggaggtgtctcaactgttgcgactctaccaggctcggggctggggggctctgcctgctgaggatctcctgctctacctgaagaggctggaacacagcgggtacaagcctgggaggaaggaggaaggattctccgggtggaagctggattatggggagtggagtgggtgtgttttacactgaattgaatcgttgtccttttctggggaggaaagtgaaggatgagaggtggatccacagatcttctctaactgccccacacttttcttttatctcctcctttctattgcttttttcttctaaacaaaaaaatcttttccccgggtctctctaccttcgtttttttcctctttacccctcagctcaaaactcagaatcctagacttttgactagctagtgtaactcgttatttacttccactaatgtctcctcccagttgatgcccaggtctatcgagtttgatcttattcttaagagatagaattggggagtagttcttccatccagtattgggtaaccggggggacggagatccccatcctcatacctttgatttgtgtagcaggactgatggccgaggggataatgtccccagaaggaacacagactcccgcttgggtgagatcccccggaaagaggtgagggaaagtcaggcagggaccaggggagaaaagggctctcactgaccagctccttcacctctgcacactcctggctggcccctccattccacccctgcattctgtagcatggcctttcctccctgcagactcatctggccctctccacgtgcatttcctcagtggggtggggaattgagaggatctgacgctgatttcttcctctctcttccctcaactctcagattccctcccaggctgtccctcgccgccttgctacagcccccaagactgaaaaacctcccgcacggaagaaaagtgggcaccctgccccgagtagcatgaggagccgggggggagtctggagatgagcccccctaccctctctcctctttgttctctcattgttgttattttaataaatgctcattagtctgtatcagagtctctggctcataggaatttggaaaatagaggttttgtagggaatcacttcgtaaagaaaccacatttggttgagtactttttttatatgttacatgtttatatgtcatttcctgtgggaaaagacatgaatgctttggaagacggtctatgacaagatttggaaagttggggcggctaagattcagtggacaaagctaaaacctgcagagcaatgaactctgggtggtagtggaattatgggtgattcttagttttttaatacgtttctgtattttccaaattttctaaaacaagtatatgttactttaataatcagaacagacccaaactttaa

SEQ ID NO: 1158 - DNA, 50944 bp, Homo sapiens
agtttcccgcggaccctgagaggagcggccgccgcgagtgactgcaccgagcccgagaagtcgccgcgccccgcagccgccccgactggttccccgccttgcccgtgggccccgccgggatggggaaccgccgggacctgggccagccgcgggccggtctctgcctgctcctggccgcgctgcagcttctgccggggacgcaggccggtgagccgggagggaagagatgggacccagggtccacgactcagagaggctctaaaagagcgaggggtggaggggggtggaggggcgtggaggggaagggcgtgggcgccgcgtgcggccccggtgtgatgtgggcgcatgagtatctgactctgggtgatttgtgggtgtgacagctcggggtgggggtggggatgtgtgagtgcgttttctggcgagcgcgtgggaatgcatgcaatgtgcaggtgtgtgcatgtgtgtatgtgtgtgtagcatgtgtgtgcatttggagtgaagttgcgtatgtgcttgcgtgtggaggttgatggtgatagtgtgactgtgagtgacagggcagtgctgggacggtgtgtattgcgacaggtgagtatgcacttgtgctcttgtctatgtgctgattttcgagggtaaccgtgtgagtggttatgcgtgtgattgtgtgtctctgagtgccgctatgaggggtgtagttatgatttttgggtgcaaataattgcccatgaggatgaaggtgggtggggacaagtattggggggtgctcttcgggaacccacagtttcctttgcgtctctttaaatggcttcacctcattctcccttttcctcctctgccccaaattggcgagcgcccatctcctcccctccctccctgttgccccctcccccaccccgcggtccccagagccgcgatcagcaccatggacagggcttcggggagggccgcggtgaggggcgagacggggcggggcgcagggcggggcaggagtggaagttgctccccccctccccaccccagctgctggagccttgggtgtttttcccgaggaatttctcaggagcccccaaggggtcccgggggccgccggatgggtgagtcagcgctgacgcacgcccagctgcgcgcatctggctgggcgccctgtcccgcccctcagggttcagagtggggggcgcttcgggagtcaggggatggcgtagcttctcaagtgttggagatggggcttccctgatctgagagaccctagactaggtcctcctggaaatccctttctaaggtgagctcagtctcccaacacacacacacacacacacacacacacacacacacacacacaccacagcacacttcttactttggagtccaggaaggtgcctgtccatatggttaatccctgattggactatgccgcattcccacgctcacacatccacatggtcatggaatcttaggcatccactctgaatataagtcccctgggactccaggaatgtgaaacaccgtgtccaggcaacccccttcagccacccgccaaatggtcccagcttttatgaccctcccacgtgctcaaattctcacacatgctgcccctgacatccgaacaaacactgtcaacattcacaacccatcacccactcacccactgggtcacactctcacacagaacggcactcccccatcagaagtccgaggtgttaaagtcacagacacacctgcaagctcacggcaagcgttgcatggccacacgtcaagcaagtgtatctaatccctccattagaagccaaatatttgcacacattgacacctggagaaacgacatatgcccagctattctctgcctgtctcactcagactcacccacgcttgtacaatctcatgcacatacacgtatttgcacacacatcgcacacctggggggttcccagccatgccctgactcagtccccgcctctgtccctccacatcccagaccccacccaacatccccgtgggggccctgaccagcacaggggagagtggcagggggcaggctgggcccctgacagacccccccaccccttgtcccctgtaggcaggactcaatgcagcttgtgtgcctttttgtcataatgccagctgtgaaaagaaagggcagtcagtttctgaaaggtcattccagaggggacacaagtttcaagcaggagagctttgagttggatgccgggaaggactttcttaatgtaaatgagtggtagttgagggaagaccctctttcctctgcagagaggttagggtgcgggtcaggggagagcctccaggctgggtgaggtcgtcggtctcaatcctgccctgggccccaggctgagatggggcagctgggatgattgttccgtggggaagtgactcttgtggtcagcagagcctgggagcccagatctcagccccaggggactgcaacccagatttctcttaatgacagcctagccacaaaacaggcaattagagatgggggctggggtgatgggttggggaaggcgggtggagagagagagagattgagaagagagagagagaatgagagaaagagagagagagagagaaagagacttggacacagatggaggcctggaaagacccggcacagaaagtgggacagagagagggcgggcagggatggggagagaaggagattggaggcaagaggaaacagaggctgaaacaggcctccgaggagtctggaaaatgagggttctgacctaggaagagtgggaatgggggtccttcatccaagcccgtgcctccccaacgtcttagcccccccgccccagctccccgtggtgagatcagcagagccgcccccaggggtgaggtcatggcagattctggagaatccagctcccgccaagaggctggggcagggggtcagtgggacagtttgctgagggttgggggatgggggaatcagacaggggctcggggcccaggggaagcccccacccgcccctgcccaagccatgtggttccacttagcactggctgggctgcctgctggggtggggctggtagcatggcctagattaggaactgttgggccagacaagtcctttccttagctgggatgaaagagggagagggtcagacaggggaggtctggaggttatcggagacagctggtcagaaggaggaagtcagagagatgaaatgaggaggtcatgggtcagatggaggagatcaggataggcagtgggagaaggtcagggggtagtcagagggaggaggtcagagggagttgatcagaagggaatgtcagagggaggaggtcagaggggaatgtcagagggaggaggtcagaggggaaagtcagaggagagatcagaggggaggctcagagggaggaggtcataggggagagtcagagggaggaggttagaggggaaagtcagaaggaagaggtcaaaggggaaagtcagagggaggaggtcagaggggaaagtcaggagaggagatcagaggagacattcagagggaggaggtcagagggcaaagtctgagagaggaagttcatagaggagggtcagagggaagaggttagaggtgaaagtcagagggaagaggtcaaaggggaaattcagaaggaggagtttgggatcagacagaaaaaggagatcagagggaataggctggggtcaggcagaagaagatcagaaggtcagagggggtaaccagaaaaagaagttagtgggcatggtcagaggcagatggtcagagggaggagatccaaaatggctgtagtcaaaaggaagaggttgtgggtgatggtggtcaaaggaggaggttagagagagggaggaggtgggggaagaaaacacactggaagcccctcctctccacgtgggtttcccctggcaagggggctccaggcctgggatatagccctagggagcctgcgcgggagagcagggagagggggaccgttccactctggggcttaggccaggaagttttgattcatcccagaactaggtcaactttttttctcaccaaaaaccaaggggaaaaaaaaaaacagagtcaacaagctgctgaggtcggaacatctgtggggtggtgaggaggcggggggtgctgggggcccaggccggctccttcttcctgagccacaaacatggtgggagggagggagaggctgagccccctaaaaaaaccctgagcctctatcctggagtcctgggcttattctagctgttccccacctctgcctgacacccccggcttctctctgctgcagatcctgtggatgtcctgaaggccctgggtgtgcagggaggccaggctggggtccccgaggggcctggcttctgtccccagaggactccagagggtgaccgggcattcagaattggccaggccagcacgctcggcatccccacgtgggaactctttccaggtgagttggagtaggaggcctgggtacctccccggagggaggcactgctgggccctctgagctgccttgttccctctgcccacccagaaggccactttcctgagaacttctccttgctgatcaccttgcggggacagccagccaatcagtctgtcctgctgtccatttatgatgaaaggggtgcccggcagttgggcctggcactggggccagcgctgggtctcctaggtgaccccttccgccccctcccccagcaggtcaacctcacagatggcaggtgagcatggggagagtgggcgggggtccgtggataaggggtggggtgagaagcacccgcactgaggccgtccccttgcaggtggcaccgtgtggccgtcagcatagatggtgagatggtgaccctggtagctgactgtgaagctcagccccctgttttgggccatggcccccgcttcatcagcatagctggactcactgtgctggggacccaggaccttggggaaaagactttcgaggtaggagttcagtgatgggggaaactgaggcagagggtgggatgttttgtctacagcctgaatctggagaggatattaaagaaggaagatgtcaagcttcaatctatccccaggaagctaagggaagcgagttcatgctttcgtgcaccgttgcagcctgtgattgtgagattgcagagccacaagacaataatttttttttttttttgagatggagccttgctctgtcacccaggctggagtgcagtggcttgatctcagctcactgcaacctccacctcatgggttcaagcgattctcagcctcccaagtagctgagattacaggtgtgtgccaccacgcccagctaatttttgaatttttagtagagacaaggttttgacacgttggccaagctggtcctgaactcctggcctcaagtgatccacccgccttggcctcccaaagtgctgggattacaggtatgagccaccgcgcctggccaagaccataaattgtgacgatgcctacttggcttgttgtgggaagatccagttgtgccagtgcatgcttgtgtgtgccgttgcagtgcatgactgtgagattgcagagccacaagaccataaattgtgacagcgcctacttggcttgttgtggaaagatctggtggtgtcgtgtgtctgagactgtgacctgagatggtgctggttgctgtgatagtgtgtgattgtgtgggggcggttatgactttgggagccagcaggcagctgtgttgtgtggttgtgtgatatgtgttctgggtgtggagacctttgttagctgtgtgtgaccgtgatgtgtgtcacctctgggaggccagggacctgatctatctcatgttcctccttatccccagtaccagctcttcccacaacaagccaagtaggcatcgtcacaatttatggtcttggccgggcgcggtggctcatacctgtaatcccagcactttgggaggccaaggcgggtggatcacttgaggccaggagttcgggaccagcctggccaacatggcaaaaccttgtctttactaaaaattcaaaaattaactgggcgtggtggcacacgcctgtaatctcagctacttgggaggctgagaatcacttgaaccggtgaaggaactgatgcacctctagtggggcagatgtgtgggatgtggcttgtggttgggatcgggtgtgcccctgataggatctttccttctcttagttacagggggtagagagatcactagggctgtgatggggtcatctcttccttatacttagcatgctctgggtgggggagcattgcaccctggtgccaggaggtgggcaggactgctgggggttagggggtcagagtaagcctatggctgtatggctgccctccttgactcctacacccccaacccccagggagacattcaggagctgctgataagcccagatcctcaggctgccttccaggcttgtgagcggtacctccccgactgtgacaacctggcaccggcagccacagtggtgagtgagggactccatgactcctaatctcaggacacaggctgggtccttcctggctccagatccctagaaagagtgaattctcatcccccagacatggggttaagtgacccgtgacctccaacacatcccaggcatgaatgactttgacctcaagtcatattcctgagccacccttgaccccaggttacatgaataacgttgactccaggtcacagggctgagtgaggacccacgggccatgagccagcctcaccccaggtgacctgaatgatggggtctctgctggtgggatgctctagacctgactggaacccttctcccaggctccccagggtgaaccagaaacccctcgtcctcggcggaaggggaagggaaaagggaggaagaaagggcgaggtcgcaaggggaagggcaggaaaaagaacaaggaaatttggacctcaagtccacctcctgactccgcagagaaccaggtaagggccctgagacctctcacttccggttttgaccacctgacttccggtcttgactgtctgacttctggtcttggtgcttgacttctagtctcccatctctactaatctctggtccctcatctatgatctttttctctggtctcggatccatgagctctgacttctctcagctgactgatgactgtcagggtgactgataacagggtgggggtgggtcccatcttatgatctctcccatctctgaccccctcaatctccagtcctggggcactagagggaggggacagacccagataagttcctgattttaagggagttcttgatgagggctactgtttaaggggggatcattggctgggttgaatgacgtgttcattagttagtgtgtcattgtttggggttccctgcttggggtcactggggacagttattcattgggagagtcattaattgggggcattatttggcttccctgatagggattgctggatagtggggaatcattgagggagatattaattgaggtcagtgtttgggctgcacctagctggggatcacagtggaaggtcatggatagaaaccattattggtgttactgatgtccctagtttggggtcaatgactggggggttgttggtgggtggtcactgactggaagtcatagtggggtcactcattggggccacaagttggaagagtgattttcagggggtcgcagatggggtaattggtttgggagtccctgagggaattattagttaggaagtcattgatgggtggaattactatttgggggtcattggttaggacgcttttgttgcgctcatttatgggtattcactgttggagcatcactggttagaggaataattgattaggggtcaccgatgggggttattagttggagagtcactagttagtgctaatagccaagagatgtcactggttgaggtcactggttaggaaaatcactgaatggagcagtaacaggttgaggccattgatgggagtgggaggggttgtttgtgggtctctggttctagaatcactggggtctgttgatgtaggtcattcttggtgggtcactgggttggggggtccttggtgggggtcattgcttggggtctttggctggtgggggagtcactggttgcactacatctcagttccagatcttcttggccaagaatacaaacaccaggagtagtgggcccctcttcagccccttcctcagccttgtcccctcacctgggaccccaccaccctcttcccacacccccccaacccccaccttgacccagttcctctgcagctgtccaggccagaaggagccgccactccctctctgactgtggcctgctggccgctgaactctgccttgggagaggacatgtgggctaggcttccgggagcctggccctgaatgttggaccttgaccttgaccactgggcttcagggccagcctgactcagcacctcctccatccacggtggctccctctgctggcagccctggtccagctggcacacttttgtctccattggcctctggtgctctttggggagcctcctctgtccctgtccccggactgggagctcctggggacagtgggagggtgcctcccttttgtcttgattgccctcacccgagacccaaggctccctccatccctgctccagacctccactgacatccccaagacagagactccagctccaaatctgcctccgacccccacgcctttggtcgtcacctccactgtgactactggactcaatgccacgatcctagaggttggatggggatggaagaggggagaccccaagggttacgggggtggcagaaaataaggaggtcagggaaaactttggtctttcctaacgttctcagaggagcttggaccctgacagtggaaccgagctggggaccctggagaccaaggcagccagggaggatgaagaaggagatgattccaccatgggccctgacttccgggcagcagaatatccatctcggactcagttccagatctttcctgtgagtttctaggtggctggggttaggtgcaagagagtgggattcctattaaaatttttttaaaatttatttatttaggcagggcgcagtggctcccgcctgtaatccgaacactttgggagacctaggtgggcagatcatttgaggtcaggagattgagactagcctgaccaacgtggtgaaatcccatgtctactaaaaatacaaaaaattagctgggagcggtggcgcgcgcctgtgatcccagccactgggaaggctgaggcaggagaattgcttgaacccgggaggcagaggctgcaatgagccaagatcgtgccactgcactccagcctgggcaacaaagtgagactccatcttgaaaaaaaaaaccgaacaatttaaaaaaattatttaatttaattttttctttttttaaaaaaacttttatcttaagttcaggggtacaagtgcaggcttgttacataggtaagcttgtgtcatggggttttgttgtacagattatttatttcattactcaggtattaagcctagtacccattagttatttttcctgatcctctccctcctcccaccctccaccctccgataggtcccagtgtctgttgttcccctctatgtgtccatgtgttctcatttagctcccacttataagtgagaacatgtggtatatggtcttctgttcctgtgttattttatttacttacttttctcacatcttgaggtcttagaagggatttctacctggagccacgaaaggccagtctctcttttgacttctgcacctgcttgtgtcaggcactgtgctaatagttgactctgtgactagagagaggcgcttggcttttactccaagcaccaggagatgccacttgagcacttgtgaaggaacatgatctgacttggagctttaaaagctccccctgggccgggggcagtggctcacggctgtaatcccaatgctttgggcggctgaggcgggaggatcgcttgaggccaggagtttgaggccagcctgggcaacagtgagacccatctcttaaaaaaaaaaaaaaaaaaaaaaaaaaaaaagagctctctggctgctgaatggcacatggacagtagggggagccagaggggcagcagggaagcccgcaatctgcagtcgggacgtgacctggaggaagatgggagggacgcagagaagtggaccactttgggacatgctccattttggtcttggagaaagatggatacgcattcgatgtaaccgaacccaagctcggtggcttgatgtttgaaaggaaaacaagagagacgagaattggtggaaggaaaagcaggtttattccaagagacagcaaaccaagaagatggtggactgttgttccgaagcaccatcttaagtcagtacaaattttaggctttttttttatgttaagggcagggagaagagaagagggtagagatcaagaggtaactgaggccaggtatggtggctcacacctataatctcagcaatttggtaggttgaggcgggaagatcacctgagcccaagagtttgggacaagcctgggtaacatagcgagaccctatctttacaaaatatacaaaaaattaatcgaacgtggtggttcgtgcctctggtcccagctgaagcaggaggatcgcttgagcccaggaggtggaggcttcaggaagccatgatcacaccactgcactgcagcccgggtggcagagcaagacctttctctagagaaaagaaaagaggcttgggccaggcgcggtggctcacgcctgtaatcccagcactttgggaggccgaggagggctgatcacgaggtcaggagattgagaccatcctggctaacatggtgaaacgctgtctgtactaaaaaatacaaaaaaattagctgggcgtggtggcgggcgcctgtagtcccagcttctcgggaggctgaggcagaatggcgtgaacccgggaggcggagcttgcagcaagccgagaccacgccactgcacttcagcctgggcgcgagagggagactctgtctcaaaaaaaaaaaaaaaagaaaaaagaaaaaaagaaaagaaaaaaggccaggtgcagtggctcccagtttgagttcagcctgggcaacatagcaagaccctgtctctacaaaaaaataaaataaaaaatagctgggcatggtgctgtgtgcacctgtggtcccagctactcaggaggctgaggagggaggatcacctgagtctgaggagatcgaggttgcagtgagccatgattgtacccctgcattctagcctgggcaatagagtgaccctgtgtcaaaaaaaaaatgccaagcaaagcaagcaagcaagagaaggaaggaaggaaggaaggaaggaaggaaggaaggaaaaaagagagagaaaaaaggaaaagcctgcctgggcaatagagtgactctgaaaaaaaagaaaaaagaaagaagaaagaaaaagagaaagaaagagaaagaaaaagaaagagaaagaaagaaagaaagaaaagaaagaaaggaaggaaggaaggagccaagcatggtggctcacgcctgtaatcccagcactttgggaggatgaggcgggtggatcacctaagtcaggagttcgagaccagcctaaccaacatggtgaaacctggtctctactaaaaatacaaaaattagccaggcgtgttggcgggcacctgtagtcccagctactggggaggctgaggcaggagaatcgctagaacccaggaggtagaaggtgcagtgagctgagatcacaccactgcactccagcctgggggacagagcaagactccatttaaaaaaaaaaaaagaagaaagaaaaagaagaaggaaagaaagaaagggagaaaggaaaagcctaggtgttccacaggggaggcgcatagacacatagttgtaactaacttgcccttgctaccttgttacctggagtgcttgttgtgtgccaagcattgttttaattcattcatctttgcatgatatatacacaggcgtcattcatccactgactttacaggttgaccggttacctgtaagtggccataggggttgactaagtttcccaacttagttagatcactcagttagtaagaggcagatgcaggatcagtattgggcagcagtctctggatttcacgctcttcattcaccttggcatggcattgcccggtggatgcggggggctgagcttctcagtgcatattggttacagtagaggagaaggggctctgagggtggactccgtgtgtgtgtgtgtgtgtgtgtgtgcaagtgtgtgtgatcagataactgaagggcttatgtccaagttcacatctcttttctctccatctcccctgaccccaccccagggtgctggagagaaaggagcaaaaggagagcccgcagtgattgaaaaggtgaggggtctggattgtgagggggttgagaggcttcatgatgacagcggtcaccgacactcacttctcccttcaggggcagcagtttgagggacctccaggagccccaggaccccaagtaagtcatggctgtgtttccttcttccagtctttcccttccagctgaggggtgtttaatcccctggagtgaggagttggggtgtaatgttgcctggccaagtggagggtagtggacatttgaggcttaaagggtgagtcaaaatagggaggatgaacaatatagagactgggcaacatagcaagaccccatctctttaaaaatagccatatatttttttaaaaaatagtggcacccaactgtagtcccaactacttgggaggccaaggtgggaggattgcttgagcctaggagttggaggctgcagtgagctatgatcacgccactgcactccagcatgggtgacagagtgagaccgtctctaaaaaaagaagaggggtccgagagtagcgttgggggtgagtgggggtcagtattgcattaggggagttggagtggctctgtagtggggtagggaggtcagcctgaggttagagtcagtggtaggttgaaagtcagcctagctcaaactttgcacttcctgtgactcctgtttctctgtccccaacagggggtggttggcccctcaggccctcccggccccccaggattccctggcgaccctggtccaccggtaagagactcccactggggtgtacacttctcagaggagtgaggtttggggctgggagcgtgacagtctgaacatagatatgagggtgtggcactcgggaacaccatcccggggctggcactgacctcttctgttctctgtctcccatctgtgaactatttctctggttcaccttgtgttgctggggcctactctttgcttttcttcttttgcctgtctctgtttctgagtgtcttttatctctgtctttctcctgttgtgactctgtctctgtctctcttctgtctctctctgttggtctctgtccctctccctccgtccatctctctatgttcgcctctctctctatttctccatctctgtctgtctttcactggcttttctgtctctgtctatctctctctgtctctctgtttctgtctctgtatgtctctccatctgcccccatccttctccatccctctctccccttctctttgtctctgttccatctctgtcttttcctttccacttctctctacttctctctctttccttgccatgatccctctttgattctgtgtctctctccatctctccctctctctctctttctgactcatccttctgtgcctcccctgtcctcgctctctctctccctctctccctgtctccacctctcttcccccatccctctctcagggccctgctggcctcccaggaatccccggcattgatgggatccgaggcccaccgggcactgtgatcatgatgccggtaagaaggagatggagtggcccagccttggggagtggagtcctgatccaggagggggcctctcctgggggcttccctcaccactaaattcctcccagttccagtttgcaggcggctcctttaaaggccccccagtctcattccagcaggcccaggctcaggcagttctgcagcagactcaggtgagtgggaggtgtggacatagtgggaggaaccccagagagtgatagagcctcggcgtaaggaggggctgggcaggagaagggggttatttttctcctgaagatgcctctgtggggaatgttgggggtcttgtgggaggccccaagctctgactcctctgtctttccagctctctatgaaaggcccccctggtccagtggggctcactgggcgcccaggccctgtggtgagtaaggcgactgcgtggagggggcggtgcatgcattagtgaagaatcatctacccacactcctccatctctcctcccccaagggtctccccgggcatccaggtctgaaaggagaggagggagcagaagggccacaggtgagacttgtggagatagggcaggataggatgggaatagccttcccccaggaccacaagatacagtgctggatggggaaagtgccaaaggggctggggatacccttgcaattgatgactttcctagagaatggtggctcacatctggaatcccagaactttgggaggccgaggtgggaggattgcttgaggccaggagttcaagaccagtctgggcaacatagggaggccctgtctatacaataaataaatatgtccttccaagctgggtacagtggcacacacttgtctcagctacttgggaggctgaggagggagtattgcttgagcccaggtgtctggcctgggcaatacagcaagaccccatctctaattttttttaatacaatagaataagtccctctttcttcttattttcctttccttcctcctttttgctttcttctagggtccccgaggcctgcagggacctcatggaccccctggccgagtgggcaagatggtgagtgacagctaggtccccagaccaccccttatccatccctcaacacccaacatgagccttggctttgtgaccttggggtctgctggtgtcgttagtgggaaaagagtgctgaaggcagggaatggcagctccactgagtgtgtgtcaaaggaatccggccaggccgtagagtcaggaaggacttgcctgcaggagtgatgcttgccctgagatctgaaatagaaccagatgaacagatggggaagtggaagaaacagcacggcaaaaaagaggcctgtcacatggaaggaaatgacaaacaagtcaacttcagatagagtcatgcaccacataatgatgcttataagatgattggctgcgcgcagtggctcatgcctataataccagcacttagggaggccgaggcaggtggatcatttgaggtcaggagtttgagatcaacctggccaacatggggaaaccccgtctctactaaaaatacaaaaattagccgggcatggcagcgtgcgcctgtaatcccagctactcgggaggctgaggcatgagaatggcttgaatccaggaagcagaggttgcagtgagccagtgcacaccagcttgggtggcagagtgagattgtgtctcaaaaaataataataataataataaataaataagatgctggtcccatgagattataatactgtatttttactgtaccatttctatgtttggatgtgtttagacatacaaatacttactatagtgttacaattgcctgtgatattcagtacagtcgcacattgttcaggtttgtagtctgagagcactaggttataccgcatagcctgggtgtttggtaggttgtaccatccagagttgtgtaagtgcattctatcttgttcacacaatgacaaaattgcccactgatgcatttctcagaatgtatccctgttgttcagtgacatgtgaccatatatatatatatatatatatatatatatatatatatatatatatatgtaaaacatatatgtaactccagcctgggcaacagagcaagacgccatctcaaaaaaataaaataaaataaaatcagccatggcatagcaactggtatctctaatcccagcactttgggaggctgaggtgaaaggatggcttgagcccaggagtttgagaccagcttgtgcaacatggcaaaacccggtctctacacaaaatacaaataaaaaattagccaggtgtggtggtgtgcacttgtagtcccagctacttgggaggctgaggtgggaggattgcttgagccaggaattcgaagctgcattgagccatgatcatgccactgcactccagcctgggcaagagagcaagacctcagctctaaaatacataaataaattaaaaaaaataatatcttagccttggcatggtggctcatgcctgtaatcccagcagtttgggaggctgaggtgggtggatcgcttgcattcaggagtttgagactagcctgagcaacagggtgaaacccccaccatctctaccaaaaatataaaaaattagccaggcctggtggcatgcacctgtggtcccagctactcaggaggctgaggttgcagtgagctgagaacgtgccactgcactccaacctgagtgacagaaggagaccctgtcaaaaaaaaaatcttgatgttgatgatgaagttgggttcctaatttggtggaggggtacagggaaggctcatccttgactcttgggcttactttctccatagggccgccctggagcagatggagctcggggcctcccaggggacactggacctaaggtaggtgatgggggctgagataagacttggtgggagctgtcaggcttatggggtcaaggctcactggtgtctctggacagggtgatcgtggcttcgatggcctccctgggctgcctggtgagaagggccaaagggtgagtgtgtgaggtccctcccccaagtctaagccctcctcccaatattcaagcccccccaacttctccctcagtatcagagtcatgatccctgtgtccctcctcacaccccatctgccttcccagggggctggtctctccgcccacacccttccactctgaactcccctctgttccctctccagggtgactttggccatgtggggcaacccggtcccccaggagaggatggtgagagggtaagtttggaagagagttagggcctggtttggaaagtaagtttggaagcctgagtgagaatcagagaggaagatctggaggtctcagtggccagcttgagagctagggacaaattgtggggtgaggaggtgagacttgcaggtctaggattggagtcaggggcctgaatggaatcccatgaacttagtctgcaggttcccagggatcctggtctaattccgagaccccctggaaggggctgcccagatgaggggaggtggctctccgagggttgtaccttcctgttcccaagtaatgacgcttttccacagggagcagagggacctccagggcccactggccaggctggggagccggtgagtatcagggatccctgggccccttgcttggtgcaggggagggagtcaggactcccagggccccaggactcataggacccctagagctcacatggccacacagaggtgatgtggaaataattcgcctgctcccttgcagggtccacgaggactgcttggccccagaggctctcctggccccacgggtcgcccggtgagtgtcactggctctctgcatccctgtctgtctttttgtttgttttgagattagggtctcgctctgtcgcccaggctggagtgcggtggcgagatctcagctctctgcaacctccggctcctgggttcaggtgattctcatgcttcagcctcctgagtagctgggactacagggacccaccagcacacctggctaatttttgtatttttagtagagacagggtttcaccatgttagttaggttggtctcgaactcctggcctcaagtggtcctcccaaagtgctgggattacaggcctgagccactgttcctggcccctgtctgtcttttttttctcgcttttctgccttctgcatgtccatatctgttgctggcttctctgcctgctcacatttctttctttctttttttttttagacagagttttgctcttgttgcccaggctggagtgcaatggcacgatctctgctcactgcaaactccgccttccacgttcaagctattctcctgcctcagcctcctgagtagctgagattacatgcctggctaatttttgtgtttttagtaaagacggggtttcacaatgttggccaggctggtcttaaactcccgacctcaggtgatccacctgcctcagcctcccaaaatgctgggattacaagcatgagccacagtgcccggccctgctcacctttccacctgcatctctcggtgtctcagactcaggctcccagcttgttgctctgtcttggtctcacatcctcttttcccctagggtgtgactggaattgatggtgctcctggtgccaaaggcaatgtggtatgtgccctgtgccctttgacctctgacccttctgacactctgaccccgattgtccacatccctattcccttccatgactgaccccccccaagtcaatttcactaacgccccaacaccatgacccctcttagcttcactgaaaccccactttctccccagggtcctccaggagaaccaggccctccgggacagcagggaaaccatgggtcccaggtttgaactgtctttcccaataatggggcatgggagtggtcagttaagaccttagaccgtgaccaggcttcccaacctccacactcaccgcttctttcttatgccttctctcatcttctttttctgtctccagggactccccggtccccagggactcattggcactcctggggagaaggtgagtgacagctccacctaccgcgacctcctcaagtcttcttccttcaactctgttgccaggaaaatcttcccaccaagacccctctgttagctctggatagtgatagactgcaacattccctaagccagcccggagatacaaagtgtccttgttggggaaggattggttgcaagaaacagaaacccaccaaggctagctcacataagggatattgtcaggatacagagagcccacagaagcctgtcacagaagatattaccaagaggcacaggccctgtgggtctcatctttgttccctggcacatctgcttccgccttccctggcagacacacttctttctgcacatatctttttttggggggtgtggacagggtctcactctgtcgcccaggctggagtgcagtggctcaataatgcctcactgcagccttgacttccccaggcgaggtggttctcccacctcatccacccgagtagctgggactatcagcgcatgccactgtgcctggctaatttttcttttcttttcttattttctttttttgtagagatggggtctgcctgtgttgcccaggctggtcttgaactcctgggctcatgcagttcatctgccttggccccccaaaatgctgggattacaggcgagagccatcatgcccggctgggcatttttaaagaaaggggtgtggctgtgaagcttctatttcaacatgtctcttgcactgttttaatttaattttattggtcaggtgcggtggttcacacctgtaatcctagcactttgggaggctgagatggggggatcacgaggtcaggagatcgagaccatcctggctaacatggtgaaaccctgtctctactaaaaataccaaaaaattagccgggcgtggtggcgcgcgcctgtagtcccagctactcgggaggctgagtcaggagaatggcatgaacctgggaggcggagcttgcagtgagccgagatcttgccactgcactccagcctgggcgacagagcgagactccacctcaaaaaaaaaattaattttatttattatctttgtgggtacatagtaggtatatacttatggagtacatgagatgttttgatacaggcatgcgcataagaatcatgtcatgtagtatccatcccctcaagtatttattctttgtgttacaaacaatccagttatactattttagttttttttttttttttgacagaatttcactcttgttgtccaggctggagtgcaatggcatgatctcagctcactgcaacctccacctcccgggttcaagtgattctgccacctcagcctcccaggtagctgggattacaggtgcccaccactacgcccagctaatttttgtattttcagtagaaacggggtttcactatgttggccaggctggtcttgaactcctgacctcaggtgatccaccctcctcggccttctaaagtgctgggattacaggtatgagccaccacgcccggcctcttttagttatttttaaatgtacaagtaaattatcacacagaagtgtgtctgccagggaaggcgggcacagtggctcacgcctgtaatctcagcactttgggaggccgaggtgggtggatcacttgaggtcaggagtttgagaccagcctggccagcatagtgaaactccatctctaataaaattacaaaaattagccgggtgctgtagtcccagctactggagaagctgaggcaggagaatcacttgaacctgggaagaggttgcagtgagctgagatcatgctactgcactccaacctgggcgacatataattgactatagttaccctgttgtgctatcaatcttgtactgtttttatgttcttccttgcaaccttcccagaggcagtggatttctgaggatcagagagggaaatgggcttgcctggggtcacacagcaagtttgggcagagctgggatagatttcctggccagtgaggtctgcttatttcttaaccttgaggcggctgcatgtctgcgtagatcctagtggtgctccagggctctgagcacctctgtctctcccctgctgttcatcttctttcagggtccccctggaaacccaggaattccaggcctcccaggatccgatggccctctggtgagaaccatgagctgggaaaaggaggaaggagaaaggggagccttgggaattggaatggcaagttttggtctctgacaactgagaatgtttcttccccagggtcacccaggacatgagggccccacgggagagaaaggggctcaggtgagtgaccaggaggttaggctgggttggggacgagggtcgggaggcagggcctgcagtcaggggccacagaggagagagatgagggctcttagaatgtggaagggactgtctagaatggcactgaccttattttcctcccagggtccaccagggtcggcaggccctccgggctatcctggacctcggggagtgaaggtaggtgatacgcttgcaggtatgagtgatttaccagctttgggttcaggcatgcgatgcagctccatcagaaacttctggatgtgtggagaggggaatcagttggccaggccaaatgtagtgggactggggtttggagctgcacagccaaggacagccttacagtgtggttgtcaccttgttgttagaacagctaagcccattagaggccaaacacatttctttcttttctcttttcctttttccttttcttttctttactttctttttttttttttttttttttttttgagacagagtctcgctttgtcgcccaggctggagtgcagtggagcgatctccactcactgcaacctctgcctcctcccggattcaagcgattctactgcctcagcttcctgagtagctgggactgcaggcatgcaccaccactcctgggtaatttttgtatttttattagagacagggtttcaccatgttggccaggctggtctcgaactcctgacctcaggtgatccaccctccttggcttcccaaagtgctgggattacaggcatgagccactgtgcctggcccgagggttgtgttctaacccaagctcagaatcacataagcacagtatgctgggttaagccaagagctgcaacctggctaaatagaggtgcaggggcattagagttcatatccatatggaagctgagtccagtgacattgtagccaaatacagatgtaatttacctgaacatgtgtgcattagacaagcttagacacactataatcaaggaattggctatactgtagcaggcacagagtctggcaagcatcaccctcagagttacattgtagccaagcataattacatttttaatctttttttgtttttgtttttgagacctggttctgctcttgttgcccaggctagagtgcaatgatgccacctgggctcaccgcaacctctgcctcccaggttcaagcgattctcccgcctcagcctctcgagtagtggtattacaggcatgtgccaccacgtctggctaatttttgtatttttaatagagacaggatttctccatgttggtcaggctggtcttgaacgcctgacctcaggtgatccggccgcctcggcctctcaaagtgctgggattacaggcatgagccaccacacccggccctaaatgttttattttttagagacagggtcttctctgttgcccaggctggaatatagcagcataatgatggctcactgcagccttgaactcccgtgctcaagtaatcccctcactttagcctcctgaatagctaggactataggcgtatcccaccaggcttggcagttttttcatttgattattattattattattcttgagacagggtctcactctgttacccacgctggagtgcagtaccaccatcacagttcactcactgcagcctagagctcccaggctcaatcaatcctcccacctcaccctcccaggtagctgggactataggtgcacgtcaccacatccggctaccttttttcttttttttttgtactttttgtatagatgaggttttcctgtgttgcccaggctggtctggaactcctgggctcaagcaatcctccagcctctgcctcccaaaatgttgggattacaggtgtaagccaccatgcccagcctttagaaacattaactgacccctatgttgtagttgagtctagttacattgtagccaacccctatgttgtagttgagtctagttacattgtagccaaagctagagaacaacttgtagccaagctcagttacattgtgatcaagtgaatttgtctgtagctggagactaaccacatgggctgtattgtatccaagcgcaatttcattgtagcccgctgagctcagagatgttgtagccaagtgcagttttcagagtttggtgtgagcagcatccagacttgaactaagcgctctctccatagccaagcacagaggtcatcttgttgccaagcacagagtcgccttgtagctggcacaatggggaacattcctttgcctttaaaatgaggtccgggcctggaatgttcatcctctttctcctgccagaaggaactgtggacaaagcgtctccaggagatgggaatcgcttacttggaaatttggccttccctgcacacccccgcacagatgaccttgagaggcctccagtggggagggaggggcctctggggaaagatcatttcttctgaagctgcccctcccagcttctgcctagcctcctcttgggactatcctggctgctttagagcaggggactgagtctgggtcacttcttaagcagggaagaggcttgagagctttttttttttattttccagggcacttcaggcaaccggggcctccagggggagaaaggcgagaaggtgaggagagaaggaactcatcagaggagagggagtcccaatcatggggtcctggttgtgtcccttccccgaggccctcacttctggcctctgtctctcccacccagggagaggacggcttcccaggcttcaagggcgatgtggggctcaaaggtgatcaggtaagaccagctccagatgaggggtggtgtgggtctgggggctcggggaagatagggaggggatgagctggggctagacagagcaggaaggacaaaagatggatattaaatactctcctttttcttccaggggaaacccggagctccaggtccccggggagaggatggtcctgaggggccgaaggggcaggcggggcaggctggcgaggaggggcccccaggctcagctggggagaaggtaaatgactctccaccctctagcctcccacagtcaaggtgtccccaatcttttccctctgccctttgcccttttattataccttcgacctcaggaggttgctaccaaccttgtcatctttaattcctcagctcagcattacagagcaatttaatgcatgcaacttatgtgttcatatccataaccaccacatgcaataggcattttcatcccattttacagacaaggaaaactgagacttggaatggctgaatgacctgcccaaggacatgcccctagcaggcaggagcaaggacttgaacctcgtttccccaactcccatcccattagcccattcaccatgccccagccagcctgacctttccgcctctgacctccaggttgcaatttctgacctttgtcccataacctttctgcagggcaagcttggggtgccaggcctcccaggttatccaggacgccctggacctaaggtaggaagctgggggtggggggtggagatggatatgggcaggattcagagactaacatctgggggtccaggctgtggtcttgggggatgagctgcccaccccaagggtcactgagagaatgtaaaatgtgggctttggccaggcatagtggctcttggctataatcccagcaccctgagaggctgaggtgagaggattgcttgagcccaggagttcgagaccagactgggcaacgtggcaaaacgtggtccctatgaaaacatacaaaaattagccagatgtggctgggcgcagtggctcatggctgtaatcccaacactttgggcggcagacgcaggcggatcacttgaggtcaggagttagagaccagcctggccaacatggagaaaccccatctctactaaaaatacaaaattagctgggtgtggtggtgcatacctgtgatcctagccactcgggaggctgaggcaggagaatcgcttgaacccaggaggcagaggttgtggtgagctgagattgcaccattgcactccagcctgggcaacaagaacgaaactccatctaaaaaaaaaaaaaaaattagccagatgtggccgggggcagtggctcacacctgtaatcccaacgctttgggaggcagaggcaggcggatcacttgaggtcaggagtttgagaccagcctggccaacatggtaaaaccctgtcactaccaaaaatacaaaaaaattagctgggcatagtagcatgcacctgtaatcccagctacccaagaggctgagacaggagaattgtttgaccccaggaggcagaggttgcagtgagccaagatctcaccactgaactccagcctggtgacaaagcaagattccatctcaaaaaaaaaaaaaaaaaaaaaaaaattagccagatgtggtcccagctacttgggaggctgagatgggaggatcacctgagcccaaggagattgagcctgcagtgagctatgatcgagccactgcaccccagcgtgggtgacagagggggactctgtctcaaaaatttttttaaaaagtgagctttgacatcagacagacttggggtcaaatgccctcttacccgctatgtgatcttgggaaagtttcttgagcctgttttctctgcggtgaaacagacatcccagtaatttccacctcatcaatttgattataataatgttgataatgctgatgatgacaatgattataaaactgtaggatccttttatttggtgtgattaagtttcattcaccaacaaagtcagttaaaggggagaatcatagaatcataaaatacacatcttacatatcttgaattaattataacttatagtcaaatgtacttatgcaaaaacgtacttatatgaaaacataacatttgtttgccaatgttttgatgggtgaggacactgatgagattcatttttctgcctaaactattcccatattatatcactgatgagttctgtttctctagagtagagcaggaacctaaagacatttggggctgggcgcagtggctcatggctgtaatcccagcactttgggaggccgaggcgagtggatcacctgaggtcgagagttcaccaccagcctggccaacatggcagaaccccatctctactaaaaatacaagaattagctgggtgcagtggcgggtgcctgtaatcccaggtacatggaggctgaggcaggagaattgcttgagcccgggaagcagaggatgcagtgagctgagatcgtgccacttactccaccctgggcaacagagtgagactctgtctcaaaagaaaaaaaaaatagacatttgggaagataattgagtgcagaatcctcctagagtttcacatttttgtgctgttgagctgatagttatcttgcctacgttggatttgacagtggttttttttttttattttttcagtgatttccctttacattgactccttttcctttaacttagatttttttttctttttaacgattgagaaaaaaactttgaagcttagttttgatggacaactttattctccttccttccttcctcctttcttccttccttcctttcttccctccctccctcactgcgtccccctcttttttcttttcttttccttcttttttctctttctttccttctttctttcttcttttttctttctttctttctgtctgtctttctttctctctctctcttctttctttctttctctctctctctctttctctttctttctttctttctttctttctttctttctttctttctttctttctttctttctttctttctttcttctttctttttgcttgcttgcttgctttcctttcagacagggtgtcactctgtcattcaggctggagtgcaatagtgcgatcatagcttattacagcccccaattcttggactcaagcagtcctcctgcctcagcctcctgagtagctgggaacaacaggtgcgcaccacctgatgaatttttaaattttttacagagacagggtctcgctatgctgcccaggctgatctcaaactcccagcttcaagtgattctcctaccttggcctcccaaagtgctgggattacaagcataagccactgtacctgacatagactaagattttagaaagtccttgtgtgcatgtgttcaggatccttgaagagtgttggggccaggttggtggctcacacctgtaatctcagcactttcagaggctgaggtaggagaatcactagaggccgggagttcaagaccagcctgggcaacatagtgagaccccatatctactaaaaatttatttcaaaaattagctggacatggtggcgtgaacctgtagtcccagctattcaggaggttgaggtaggaggatcacttgagcccaaaaggttgaagctgcagtgagctatgattgcaccactgcactccagcctgggtgacaaagtgagactctgtctcttaaaaataaaacaaacaaaaaaagagtatagagaccatggaacccccagatgggaagggagagtagagggagcctgaaatgggctttgaggcgggatgccaccacagactgtgtaacttgggcaactgtcttttctgatctgaactcagtctgcacagtgaggtgtgggagaggatatcagagcctgtgatgtcttcccccaggtggaggaagggttcctccagcatggactggagtcagttaacaaatattaaaaagcactcaccgtgtgccaggcagtggggaataagaccaatgagctatgtcacagtgggggaaaacaggcattgaataaataagtcaataagggtcatttcaacgcaagtgttcttgggaaaacaaaatagcataatgtgacagacagagggtgacttgggcaatgtggaagccaggatggtggtagaaaggcattctaaggaggtgacatctgaatgagatctaaatggtcaggagtggctgactttgtggaggcctaggagacaagcatttcagccaaagacagcagccagtgcaaagggctgcagtgaaatgagaagggaggagaggaggggagaggagagaagagggctgccttgtaggaggctggggctgtagagaccaaggaagcttctggaatcagtgacctggaaatgcctcaaaggatggtatgaggggccaattccacccaccactcactcctcaccctcatgtcttctttctaattctctccactcagggatctattggatttcccggtcccctgggacccataggagagaaagggaagtcggtgagtcatgaccgggggtaagggagaggggagaacttgtctgaggggaacagcatgtgtggttgtgtctgatgatgggtggaccctgggtgtttgtgtctatgcctggaacatttgtgtgcacacatgctattatatgcaatgcatgacacatgtaggtgattacacatggtattatcatgaatatgactgtaagcacatgtatatgtgtttcatgtatctttcaatatcgatgagacagggtttgaatgccgcagcctgcaggcctgtgcctgggtgaacaagggcatgaatctgcgtgcactttgcatgatggtgggcataaatgtgtgcaagaagcttgtacatatgcgtgaaaggacatgtgtatacacatgtgtgtgtttctgtgcacactgagtgatgggtatacatgcatgtattgtatttgtgttgctatgtgtgtattgtaacagtgttaatgaacattgtatgtacgtacatgagtgtatgtatactgctgtgcttaccaagacaaagtcctcagctgaatccaggccttcatgtgtttacagtgggtatacatgtgtgcaagagatgtattgcatgatgagttctgtgtcatcttcaggctgtggattgccaaatgcatgccatgattacatgcaatcatgtatgcatactgcacagctgtgatcaatatatgtcttgtgggcaaacatgcttgcacgtttgtactctgtagatgcaatcatagttgtaattgtgtgtttgagatctttgtgtggttttgagtataagttgtatttgtgtgtatgtgtatgactgaaaagcttgtgaataaatatgtggcagacagctttctgggtctgtgactgggtgtctttttgtgtttgcgtcatacctttgcaccctaactctcttctgctttctctcttacaattcattttcagggaaagacagggcagccaggcctggaaggagagcggggaccaccagtaagaaaatagacagtgccccctaccctgctgggacttggggacagggctgggaaggaaaggtagtggagaggtcatctgtgggcagggaaagggtttgggttatatcaatgtccctggtcgggcaggagagggagtcacaaggggaggggacctggaagacttggtctcatctcccaggctcccccaccccctcatatctgatctttgccttttttttttgttcagggttcccgtggagagagggggcaaccgggtgccacagggcaaccaggccccaaggtatgggatgggtgggcaatcaaggccccccatgccccaggctcagccagtccctccaaattcttcccagttgagtttgttctggggcctgagtctcattcactctgtcctagggcgatgtgggccaggatggagcccctgggatccctggagaaaaggtgagtgtgtgtgtgtgtgtgtgtgtgtgaatgtgtgtgtgtgtgagagagagagattctgagtggaggacaaacccaagagatgaagagacattataatgcagtggtaagagcacagcttaattgggtgtggtggtgcacgcctgtagtcccacctatgctggaagctgagatgagagaattgcttgagcccaggagttggaagctgaagtgagctaatcacaccactgcactccagcttgggtgacagagcaagactccatctttaagaaaagaaaaaaagaaggagcacagcctgtgaagtcagagagccatgagttcaagtcctggctctgccactcacctactgtgtgaccttgggcaagtcacttaaccactctgtgccttagttttctcctctgtaaaatgggagtaacctcagtctccaacccaaagggctacagtggtgaataaaatgactgacttgtggagaatgccctgcccatgcctggcatgcagtaagcactcaatatgtgctcgatcctgttgtcattatgtggggctcagggagtgggcagggaggcaggggggatgagatcatgatttctgtttccatttcagggcctccctggtctgcaaggccctccaggattccctgggccaaagggcccccctgtgagtgaggtcaccctcattgggggttgggtgggtggaggatgtgggaagggaggaagccctgtatctgtgccccaactttttcccacctcatcccccagggtcaccaaggtaaagatgggcgaccagggcaccctggacagagaggagaactggtgagtaacccctcaacctttgattcctgatccttttttttttttttctttttgagacagagtctcactctgtcacctgggctagagtgcagtggggcaatctcggctcactgcaacctttgcctcccaggttcaagcaattctcctgcctcagcctcccgagtggcactacaggcgcgtgccaccacgcccggctaatttttgtatttttagtagagacggggcttcatcatgttgaccaggctgctctcaaactcctggcttcaagtgacccacctgcctctgcctcccaaagtgctgggattacaggcgtgagccaccggaccggccagattcctgatcctatcaggccttccctgtctcctgctcctccatcccttccccatgtaacaccgcccccacatttaatttttctctctagggcttccaaggtcagacaggcccgcctggaccagctggtgtcttaggccctcaggtcagagtggactccataaacctcccttgttttgtaccagttgggggatatttaggggaaagctggactcctgagcgactcccctaggccacccccactcaacaggagccttcttcctcaccagggaaagacaggagaagtgggacctctaggtgaaagggggcctccaggcccccctggacctcctggtgaacaaggtcttcctggcctggaaggcagagagggggccaaggtgagacactgtccactggagatcttggttgaacatccaagatcaaccaaggactcagaatcagtctcatgggggagggggccctgagtcacagattggagggagacatcccctccctggagcttgacttccctcctttgcactcctgtagggggaactgggaccaccaggaccccttgggaaagaagggccagctggactcaggggctttcccggccccaaagggggccctggggacccggtgagtatctttggagaccctcctgcatgtcccttagagaaggaaaggatgggggggtcaggggagggatggggaatagcatttggggtgcgggaaatgatgaaagcaaaaaaaatggtggagggaactggggaaggcagacccctcaaagctcagtgtccagtcccaggagagaggtggggactgtgagctccccacagaggaagacaggacctggggacacctttgggagtctcttaactgtgaattatctcctccttcagggacctactggcttaaagggtgataagggccccccagggcccgtgggggccaatgtaagtataaccccatgtgctgggtgggggcagggtggaggggactcaaggtgtcttggaagcttgacattgtcatgataaaacccatgatggaggctgaggcaggcagatcacttgaggtcaggagttcaagatcagcctggccaacatggtggaaccccgtctctactaaaaatacaaaaattagccaggcatggaggcagatgcctgtaatcccagctactctagaggctgaggcaggagaatcgcttgaacctgggaggtggaggttgcaatgagccaaggtcagttctgttgctcactggctgggccgttgtattccttggcaagcctcagtttccttgtctgtaaaatagccatgatgggaagccttatctcatgtatgatcacaaacctcattgagatcatttatccagtaaatacttacctgtgcattggccatcaacatataaaaaccccttttcttgggccaggtgtagttgctcatgcctataatcccagctctttgggaggctgaggctggagaatcgcttgagcccaggagtttgagaccagcctgggcaacatagccaggtcctgtctctacaaatatatatatatatatatatatatatatatatatatatgtataggctgccaggaggactatggcttttgttctaagtgagatgggagccatggagtgttcttgagcaggagaagaatatgccctgcccctcaggtgctcacaggcaccctctggctgctgcaggaggggaacaggttagatacaatcctggtaacctcagaactcagtgcctggtggcttaaaaaccctccataaaggacagctactactggtattatacctgattcatcacccctgttctcagggctcccctggtgagcgcggtcctttgggcccagcaggaggcattggacttcctggccaaagtggcagcgaaggccccgttggccctgcaggcaagaaggggtcccgggtaagtgacttgcccatcccattcctagggcctcctcagggtctggccctgccacatcccaggacatggctcctgcaggacattcctgccctgacatccccctttccattccccacaacagggagaacgtggcccccctggccccactggcaaagatgggatcccagggcccctggggcctctgggaccccctggagctgctgggccttctggcgaggaaggggacaaggtgaggggttcacagagaggaagggtccaggggaggatgggggtgaatggaagctgggtccttcatcccatttcctctgcagggggatgtgggtgcccccggacacaaggggagtaaaggcgataaaggagacgcggtgagtgaaggtccccagtggggcagggtggggtgggtagcggaagaaagaggaggccagggatgtagagatcattctccatggggtaggagaggccatggagttttctgccttctcgggtaccatcttgacaattacatgcaacagaaggtacttgagctgcctggagcgatgggtccacagaacccaactgcagacaggatagggacagctggggctcccaaagaactggaaaggcactggggtgcgggtaaccttctccattgttagtgacacatccttccctctgcctgtgactctgcgtggcaggcactgaagcatctgatacccaacttccccccaccccgaatgtcagctccagtggcttgcatcattgagccagcttcgtccctgggtcttggtggaacttgtggccagggctgggcttaggacagacgtctgtctgatcccatctgttggtggctgagaagacaggatttggggggatgtagctgttgctgcctggtaggggaagttgttctcataaagggggtgtgggaggcagtgattgatagctccagtgccctctctaatcttaaacctgagggaatttttgattctgtttcctgttctcccagggcccacctggacaaccagggatacggggtcctgcaggacacccaggtcccccggtgagtgcccccatcttttcagtccttctctgggtccttgaagggagggatagtgggagcaaacgacagtggaagcacactgacttaatccaaacctcaaacccaaccctgatcttccctcagtactgacacccaatgtgaactcaatccaagaatcggagtcaatcccaacccaaccatgttgtcccctcaataccgacactcaatatgaactcaccctcagaatctgattcaatcccaacccaaccatgtcttcccctcagtacaaacacccagtatgaacccaatcccaaattcggagtcaaccccaacccaatcatgtcttcttctcaataccaacatccaatgtgaactcaaccccagaatttggcccaatctcaacccaactatgtcttcccctcaatgccaacacccaatgtgaactcaaccccagaatttggctcaatcccagtcgaaccatgtcttcccctcaatgctgacacccaatgtgaactcaaccccagaatctgattcaatcccaacccaaccatgtcttcccctcaataccgacacccaatatgaactcacccccagaatctgattcaatcccgacccaaccgtgtcttcccctcaatgccaacacccaatgggaactcaaccccagaatctggcccaatcccaacccaaccatgtatttccctcaataccgacacccaatatgaactcaaccctagaatttgtctcaatcccaatccaaccatgtcttcccctcaatgctgacacccaatgtgaactcaaccccagaatctgattcaatcccaacccaaccatgtgttccccctcaataccagcacccaatgtgaactcaactccagaatcctgcccagtcccaacccaaccatgtctttccctcaataccaaaatccaatatgaactcacccccagaatttggctcaatctcaactccaaccatgtcttcccctcaatgccaacatccaatatggactcaaccccagaatctggttcaatctcaacctcatgctcaactttgatctgcccctctatatcgatgtccaatatacactcaaccttaaaatcagactaaattccaacctaaacccagctctgaacccccacttcagccccagtctcaactctactcatgaccttaacctcagttctactcaaaccttatctccagccaggtgcggtggctcatgcctgtaatcctagtactttgggaggccaaggcgggtggatcacctgaggtcaggagttcaatatcagcctggccaaaatggtgaaaccccatctctactaaaaatacaaaaaaaaaatttgctgggcatggtggcgggcccctgtaatcccagctacttgggaggctgtgccaggagaattgcttgaacccaggaggcagaggttgcagtgagccaagatagcaccactgcactccagcctgtgcgatagagggagactccgtctcaaaagagggaaaagaaaaaaaaaaaaaaaaagccaggcacagtggcacacacttgtaatcccagctattcaggagactgaagcaggagaattgcttgaaccagggaggcagaggttgcagtgagcagagattgcgccactgcactccagcctgggtgacagagtgagactccttctcaaaacaaaacaaaaaacaaaaacaaacaaacaaaaacaaacaaacaaacaaaagccttatcttcaaatctcttaaccaagccctgacccagacctgtccttttttgtttattaccatacaataggaacatacggccctatccttaaccccaactctgacccaactcttccaatgctgaccccagacctgaactcaaactttgaatatgaccctgggcccaacctcaaacccaaccctaaattccatctcaaccccagttgaaccctgcccaagaactgaacctcaactgcaaatccgactcactgtttaacactttgactcaacccttgacttcattcccaagccctgttccttaacctagaccccaactccaactcaacactgaccctctctaaacttaatctgaaccctgactccaacccttaacctcagtcttgacccttgagcctcactctgccctaatcactgacccagaccttaaatgtgcccctgtttgtgttcttccagggagcagacggggctcaggggcgccggggacccccaggcctctttgggcagaaaggagatgacggagtcagaggctttgtgggggtgattggccctcctggactgcaggtgggtgtctgggtttgggggtggcacttctgattctccctacctggtgccccaatcttgcttctttgttccacaggggctgccaggccctccgggagagaaaggggaggtcggagacgtcgggtccatggtatgcactcccagaggaaggtgggagggggaggatggtggggttataggttggcggcaggcattagattcatttgagggacattgtcattttaagggccctgagggtcaccagcattgacagtggtatctgtggtcaatgtggccttttggggagaggggcctggggtcactgggtactaattctgaccttccacagggtccccatggagctccaggtcctcggggtccccaaggccccactggatcagaggtgagaactcttggggggccaggaaggctcagagatggggacaaccatttcctaagaagaggatgttgggattccacagtcccactcttaccccttgctgtctctccagggcactccagggctgcctggaggagttggtcagccaggcgccgtgggtgagaaggtgagtgagggaaggcaggggctgcacggggggaagagataaatctagtcctattgggcagggacattctggggagcccctccctgtctgctaggatgggacctctccccactctcactttgcctcctgcagggtgagcgaggggacgctggagacccagggcctccaggagccccaggcatcccggtgagtgactgtgtgatgtggtccctgcacccaactcagggaacccctgacccctgggcatcttgggccactttgacctctggacagtgcaagatcatccactcacccctgtcctgtggccgtccctgattaccttgaggaaggacacctggaagttctcagatagggctgctatgtacagttctgcaggttgcacactacacaagactacatgacccaggggataggtgagggctcaaatctgagtcatgagtcctgacctgaggatgagttgcccagatggggcccctcttctaattcactcaagggcagcacatgggctaggccaaccttgcacatgaccaatgggcacctagaccatccagacctttcactgtcttaagtcctagctccttctgacctttgacccttggacaacctaggctactctgaaccctgaccccagaaaagtcccagaccaccccaatgcctgaatccaagtatgctaatccttgatccctggagagtccaggccactctgacctctgacctctttctgtaaaggggcccaagggagacattggtgaaaagggggactcaggcccatctggagctgctggacccccaggcaagaaaggtccccctggagaggatggagccaaagggagcgtggtgagtcctggggggaagtgggggcagacatgggagggggcacttgaatgtacttgaagctctcccaaacttttttttttttttgagatggagtcttgctctgtcaccaggctggagtgcagtggcacgatctcagctcactgcaacctccgtcttccgggttcaagcgattcttctgcctcagcctcccaagtagccaggactacaggcacgcgccaccacacccagctaatttttgtatttttagtagagatgggtgttcactatgttggccaggatggtctcgatctcctgacctcgtgatcagcatgcctcagcctcccaaagtgctgggattacaggcatgagccaccgcgctcggccaaaactctcccagacttctagccagggattgcatcctctaatttactgatctcatgagtaacccccagaacacggatgaatgaatgaatgggtggatggatggattaatgaatgagtggatgaatgtatgaatgagtgaattaatgaatggacaagtgaataactcagtggatggatgaatacgtgaatgaataaatggatgaataaatgagtgaatggatgaacgagtgagtgaatggatgaacgagtgaatgaatggatgaacgagggaatgaatgggtgaatgagtgaattaatggaaaaatgaataaatcagtggatatatgaatatgtgaatgaataaatgtgcacgaataaatgagtgaatgaatggatgaatgagtaaattaatggatgaataagtaaattaatggatgcatgaatatgaatgaatggatgaatgaatgagtggccgaatggacaaatgagtgagtgaatgagtgaatggatgcatgaatgaatggacagaggcgcaagtgaacaaaatgactgaagagatgagtgaataaacgaatggatggatggatgagtgaattagtgagtaaatgtgtgaatgaaacataaacgtgcagtggttatacatcattgaatggcaagaaagttgatttcatggcagatcattctaacacttgaattagtgagtaaatgtgtgaatgaaacataaacgtgcagtggttatacatcattgaatggcaagaaagttgatttcacggcagatcattctaacactgttgcaaagattaaggttgaattgggtcagatttggggtggatgtgggatttggctttgaggtgaaggttgaggcccttctgtcaccacagtagaggttggggcgggtggaggtcaggaaggggctttagcatctgtgggacctcgacttgaatggcattgtttggcgtgtcccttctctgagtgtatgaatgaatggatggatggatgaatgaatgaatgaatgagtgaatgaatgaatagacgaatcaatgaatgaatagacaaatgaatggccagttttctctgtgagtcccgagctgagaggctgtgaggacgctgcagtgagaccatgcgtgcggcattcttagctcagcgtctgcacccatgaaacacgagaatgttcgctctaccaagccagggattttatgttttgttcactaatgtgtccccagaaaccaaactgttcctggatacagttgatctgttccataaatgcatgattgctccacaattcagagatgtgattattaatcattctgtgttccagggccccacggggctgcccggagatctagggcccccaggagaccctggagtttcagtgagtgtgaccccctccccaatcctggcatatttcctaattctgtccccatctccctacccccacagacctgggcactgacagtggaaccaaaaacgttcttttgcctcccagccccatcccaaattctcacgtaccctcatcacccctcccaactctgtcttccccccatgcagggcatagatggttccccaggggagaagggagaccctggtgatgttgggggaccggtgagtgggaaaacagagggtgtggtgctgaggcgggggttggggagctaatgagtgagtgaattgggggggcaggggagtgggctagtggggtacccaaggcccctgcagatgctcccgcttcacctctctggggacccccaggaatgtgagcagcttgagggagtaggtgggaggtgggagtacccggtgctggggtgaggcttggggaagggtgtcctctggtccaaggcgtcctaaaacagtcaggctcaaacaatgttagctgagaccacagctggtgtccttgtctcctccagggtccgcctggagcttctggggagcccggcgcccccgggccccccggcaagagggtaagtgataagccacctcctgggtcctcagcttatctacagcccccactcaccttacagacctcactcatcccacagccctcaactcaccccacagaccccacacacccacagaccccactcactccacagcccccactcaccccacagaccccacacacccacagaccccactcacccacagaccccactcaccttacagcccccactcaccccacagaccccactcaccccacagcccccgcttaccccacagaccccactcagccacagaacacactcacccacagaccccactcacccacagattccactcaccccacagacctcagtcaaccacagaccccactcatccacacaccccacctcaccccaaagaccccactcaccccacagcccccactcacccacagcccccactcacccacagaccccactcacccacagaccccactcaccccacagaccccactcacccacagcctccactcacccacagcctccactcacccacagcctccactcagccacagcccccactcacccacagcccccactcacccagacctcattcaccccacagaccccactcaccttacagaccccactcatccataaccccccagtcacccagaccccactcacccctctgaccctcagtcagcccctagacccccctcactgtctttcccttccaagggtccttcaggccacatgggtcgagaaggcagagaaggggagaaaggtgccaaggtgagtccccctggcaaggggaagggtccctgcactactctaggccaacagtggggccatcaggagagggtggacctatgaccactctgtgcacctactccctcccgatcccagatgcttcttggcaggggtcaggaggcaggaaccctctgactctggcccctcccttgcctgtgtccatttcagggggagccaggtcctgatgggcccccagggaggacgggtccaatgggggctagagggccccctggacgtgtggggcctgagggtcttcgagggatccctggccctgtggtgagtggagcggggcaggggtgggacagggtggatccagctcctctctgtctgctcccagcttgtgatcccatcaccgtttggaggggctgcccctggtgcatggtcgggggggggtccacactgtgttctgacagggtgcagcccaccccatgttctgttccattctcagggtgaaccaggcctcctgggagcccctggacagatgggccctcctggccccctggtaagagacttgttcatccttgaggttctggctctgaggaccactctgggcacctagtgaccacctagtgagcattggtgcaggctagccctcactgaccatccatctgagtgtccatactgcctgtctctactaaccatctgctctgaccttccaccctgatggtctacactgcccatctctataaccctctgctctaacactccaccttgatgatctacactgcccatctctataaccccctgctctgaccttccaccttgatggtctacactgcccatctctataaccctctgctctaatactccaccttgatggtctacactgaccacactgacccttcatcttgatgcctgcactgactctccatcttaatggtctacactgatcacccacgctgaccttggccactgaccactcacgttgtccatcctccagtcaacccctcattagctctcatcatcccaccttggtggcctactctgaccatcccttgacctcatccctggtaattcccatttgaaatctgcataatttcccatttgaccatcccctaaccacccacacagacctcgagttcacatttgagaatccctaactgacccttgctcttctcccaggggccctctggcctcccagggctgaagggagacactggccccaagggggaaaaggtaaggacatcattccattattctcttccccatctcctcccctctttccctccctccctggctggggggctgggagattggtgcatcctctgctcccaaactcatcaccctaaggctctaggagaaaaacctccctgaatcctcccacgtcctcccctgtctgtgcctcttttgtccttcagggccacattggattgatcggtctcattggccccccgggagaagctggtgagaaaggagatcaggggttgccaggcgtgcagggaccccctggtcccaagggagaccctgtgagtgtcctgacctgagcgggaagaatgcatttgaaggagggggtcggttgagagactgtgggtgtggggtctgggaaacgtgggtctggattaatgagggtgtgtgtggggaaaatagggggatgtatctgggaactggcaagttggaggctgcgtctggggtttggggtctctctgtgggggaactggaggcttgtctagggttcggggtcttcctttggtaggattgaaggcttgtctgggggatgtgtcagggcaatagggtgtaccccaccaatactgacccgatgtccttttcctagggtccccctggtcccattggctctctgggccaccctgggcccccaggtgtggcggtgagtatgcagggaatcttttgtgggatgaggtcactgtggtggtccaggccaggacctcagctctccctgtctgtaccctacagggccctctaggacagaaaggctcaaaagggtctccggtgagtacaccctgcttccgtgggcttacacatcccagctccccacccccttcactgcaccagaaccctccacgtctctgccttcatttatttatttattcatgcaatcgtgcgttcgacaaatatttattcaacacctacggttgtatttcatcagatccaaaatgccatcaattataagatgtaccattattttacaaactgctaggaaagaaaacagttctgccaagtaaactatgacttgccaaagatgttaagaagctgatttcagagacattaaaacatgaaaagaaaatttgtgtctgatgcctaatgctgaaaactgcatgtctcttccccaaggctgtatgtgtgtgtgtgagtgtgtgagtgagtgtgtatgtgagtgtgtgagactgtgtgtgtgtgagtgtgtgtgtgagtgtgtgtgtgtgtttgtgtgtatgttggtgggaagggtctccatagacagggttcattctccaagtgacttctccctacaggggtccatgggcccccgtggagacactggacctgcaggcccaccaggccccccggtgagttccccggggggcgggggaatggacaccaaaacctggggggagagcaaggactatgtctgggtgtccccagagggtccttccgtgcgcagcactgggccaggcacacactaggtgttcagaggatgtaggtgaagagggtagttccctgtaaaaccccaaggaaggtctggcctgggaggggggacttggggggacacccatgggggctctgacctgggtcttgtctcttggaccccatctctccctccctgtctctgtccatctcccttatctgtctctgtctatactggcgccactatttcatcttctgtctctctccctgctctctctccctgtctctgctattcttgcgctttctcttttgtcctcttacaacttggcttctccccatctctgaatctgtctctctctttcctgtgtgtctctccctgtctgcttatctctcctttctctatctctgccccttgtttatctctctccctcctctttctcatttgtgtctgtctgcctcttcatctctgcctgtctctctttctccctctctctccctcccccatctcccctctcttctccgtccccatcccctacgcccagggtgcccctgccgagctgcatgggctgcgcaggcgccggcgcttcgtcccagtcccgcttccagtcgtggagggcggcctggaggaggtgctggcctcgctcacatcgctgagcttggagctggagcagctgcggcgtcctcccggcactgcggagcgcccgggcctcgtgtgccacgagctgcaccgcaaccacccgcacctgcctgatggtgaggtccggtccccccgccacttggatgggcggagtgggggtgtggggggggttggggtccgtcgggtcccatccggactcacccaccctgcctggctctgcggcaggggaatactggattgaccccaaccagggctgcgcgcgggactcgttcagggttttttgcaacttcacggcgggaggagagacctgcctctatcccgacaagaagtttgagatcgtgagtaacccaaacctctcatcgcctcccccaggaagtgctgtcccctgctccccacacccacaaccaccttgtctgggacgttatccttccttcaaccggcatttattgagcacttactgtatgccaagtcctgcctcaagagctgggactacagcagaggatcaaaaagaaaaaaaatcaggccagcctggtggcacatgcctataatctcagcattttgggaggctgaggcgggaggatcgcttgaggtcaggagttcgagaccagcctgagcaacatagcaaaaccccatttctacaagaattaaaaaactggcgggcatggtggtgcgagcctgtagtcccagctactctggagactgaggcgggaggatcctttgagccctagaggcagaggttagtgtgagccgagattgtgccactgcactccagcctgggagacagagcaagtctccttctcagaaaaaagaaaggaaagaaaacaaactatctctgcttttatggaactcataccttccatgggaagacagacaaggaaaactccaaaagaaatcaataggctggatgtggtagctcacgcctgtaatcccagcactttgggaggccaagcgggggcagatcacctgaggtcaggagttcgagacaaggctgaccaacatggtgaaaccccgtctctactaaaaataaaaaaatcagctgagcgtgatggcgggcgcctgtaatcccagctactcgggggctgaagcagcagaatcacttgaacttgggagacggaggttgcaatgagccaagattgcaccatggcactccagcctgggtgacagagtgagactccgcctagaaaaaaaaaaaagaaggccgggcgcggtggctcactcctgtaatcccagcactttgggaggccgaggcgggtggatcacaaggtcaggagatcgagaccatcctagctaacatggtgaaaccctgtctctactaaaaaaatgcaaaaaattagccaggcatggtggcaggcgcctgtagtcccagctactcgggaggctgaggcaggaggatggcgtgaacccagaaggcggagcttgcagtgagccgagatcgtgtcactgaacttcagcctgggcgacagagcgagactccatctcaaaaaaaaaaaaaaaagaaaaagaaaagaaaaaaagaaagtatctacttcatagagtggctgtgcaattcagatactgatgcaaaaacaaatatcagtgaactgttttgtttttgtgtgtgtgtgagacagagtctgtctctgtctcccagcctggaatgcagtggcgtgatctcagctcactgcaacctctgcctcccaggttcaagtgtttctcctgcctcagcctccccaggagctgtaattacaggcatgcgccaccatgcccagctgatttttttttttttttttttttttttttttttttttttttttttttagtagagatggggtttcactacgttggttaggctggtcttgacctcaggtgatctgcccaccttggcctcccaaagtgctgggattacaggcatgagccaccgcacctggcctgcagggaacatttactaaaccctgactacatgtagtgctgggctaatacctctatctgcaggtaaagcacttagcaagaacctggccggtataagtgtgaaataatatttattgttattgttatttttgtctgtttttcagacagggtctcactctgtcacccaggctagagcacagtggtgggatcacagctcactgcagccttaacctcctgggttcaatgatcctcctgtctcagcctcttgagtagctgtgcatcacacaggtgtgcatcaccatgcctggctaattttttaaatttcttatagagatgagggtctcactatgttgcccaggctggtcttgaactcctggcctcaagagatcctcctgcattggcctcccaaggtattgtgattataggcataaaccaccacacccggtctattctaatttttatagacagggtctttctctatcacccaggctggagtgcagtggcatcatcatagctcactgtaacctaaagcactgggattaagcagtgggagaaagccactgtgcccagccccatattgttttgttcttttgagacatagtctcactctgttgcccaggctggagtgcagtggcgtgatcttggttcactgcaacttccacctccccagttcaagcaattctcctgccttagcctcccgagtagctgagattacaggtgcctgtcaccacacctggctcattttgtattgtatttttagcagagacggggtttcaccatgttggccaggctggtctcaaactcatggcctcgagtgatccacccatctcggcctcccaaagtgctgagattacaggtttgagccaccgcgcctggccccatgttgttatttttaactggtttattttctcctggtttagtgggagctcagatgcccagtggatgggaatttagacaagcttggacttcccactgggcccggagtgcaagacttgatccctaaacaattactaacatctgaggacctcctcttcactcacctgcttagcctaaagggagaggctgaggctgggcacagtggctcatacctgtaatcccagcactttgggaggctgaggctgaggtgggaggatcgcttgagcccaggagttcaagaccagcctgggcaacatagaaagaccccctccacccgcccccccccccaaaaaaaacaggcatggtggcacactcctattatcccagctacttaggaggctgaggtcagaggattgcttgaactttggaagtcgaggctgcagtgagccagtgatcacaccactgcactccaagaccctgtgacagaacaagactctgtctcaaaaaataaaaatttaaaaaagctgggcatgggggtacatgcctgtagttctagctacttgggaggctgcagtgggaggattgcttgagcccaggagtttgaggctgcagtgaactatgattatgtcactgcacttcagcctgggtgacagagtgagatcctgtctcaaaaattaattaattaattaattaaaataaaatggtgccattggagacccagagctcaatcccactggggagccctgggagactgtgtagcacaggcacctgagagttatcccccttggaggtgagggagctggggtatttatccaccaactcccattagtcattgggtgagggctgcctcaggggcatgaacctccttcccccattgtgcactggcagagctcgtccatcccagaagccagagaacatcctgacatagtcacaacagcctactgtgtgaggagggaaatgcagatgagatctagatggcaccaagggcgtcagctacagtgaccctcccttttctcttccaggtgaaattggcctcctggtccaaggaaaagcctggaggctggtatagcacattccgtcgagggaagaaggtgagtcaccgaggccgagatggggagtgacatgaaaattgatgggaaccagcaggggggtttgaggggtgggttctgagaggtgagatgaagaggataggctttcctctaccttcctagggatcgcaagctggaggtggggtggcagcagcatcagatgtgtaacaggcagtcaattgccatacagaatgatggtgccaggataggggaagcacagggcatggtggaaatttagaggcagtgttggaaagaccagaaggcttcctagtagagatcacagctcatctgaagcctaaagaatgcactgtgttagcaagctaggaaggacaaggacaagtgttccagggagagggaaaggcatatgcaaaggctcagtcaagacagggtctggtgaatttgaagaagaaaaagccacatggctgggtacagtggcctgtaattccagcactttgggaggccaaggtaggcggatcacctgaggtcaggagttcaagaccagcctggccaacattgtaaaaccccatctctgctaaaaatacaaaaaattagccagacatggtgatgtgtgcctgtaatcccagctactcaggaggctgaggcaggaaaatcacttgagccctggaggaagaggttgcagtgagccaaaaccgtgccactgcactccagcctgggcaacagagcgagattccgtctcaaaaaaaaaaaaagcattattaagatattttgtatttttttcagattagctcttcaaaatctgatggagattttacatttatagtacatcacaatttgaatgctaaattttattgggaatatttgctctatatttagatttcataaaaccattgaacaacagttcaaaaagtagattcagactcaagttgttccaagcataagctttctgataactggattgaagctcagtcattagttgtgaatttttttaagtaaaagaattcagggccaggcacagtggctcacgcctgtaatcccagcactttgggaggccaaggtgggcggatcacgaggtcaggagatcgagaccatcctggctaacatggtgaaaccccgtctctactaaaaatacaaaaaattagccgggcgtggtggcaggcgcccgtagtcccagttacttgggaggctgaggcaggagaaaggcgtgaacccgggaggcggagcttgcagtgagctgagaccatgccactgcactccagcctgggcgacagagcaagactccgtctcaaaaaaaaaaaaaaaaattaaatgaagttaaaaaaaaaaaaagtcccagccaggcatggtggtgtgcacctatagtcccagctacttgggaggctgagatgggaggatgacttgagctcaggagatggaggctggaatgagccaggattgtgccagtgcaccccaacttgcgcgaaagagcaagatcccaacccttaccccccaaaaaaggaaaaaaaattaaataaagtaaaaaaaaatccctccttcaaatcagccacatttcaagtgctcaaaagccacgtggctattagacatgtggctgccatattggacagggcagaaatctggtatcagggacagtgagctctgtagatccagcgactcacaagagtggaggcagagttgtgtcttctgggtggggatgagtgtgttaaaaccctggattggtggatgaagcaatcagaatttgggaggtcagatggagtgggcatggaggcctactggatggagaggtggacagagtggatgttcaggtgactcttgggattctgccagggatctctaggtggctggtgggacctcctcagagatggtgacatggggggggtggcttgtctgccagtggatggagattccagggggtggcttctgcagaaagaggctcatggagcccctcatcctctgccttgccctcctctcaccagttctcctacgtggacgccgacgggtccccagtgaatgtcgtgcagctgaacttcctgaaactgctgagtgccacagctcgccagaacttcacctactcctgccagaatgcagctgcctggctggacgaagccacgggtgactacagccactccgcccgcttccttggcaccaatggagaggagctgtctttcaaccagacgacagcagccactgtcagcgtcccccaggatggctgccgggtaagagggtggggcagtggccagctagagaggggaggcaagatgtcggccaccttcccggtaactcaccgtctctgtcttctctggggacagctccggaaaggacagacgaagacccttttcgaattcagctcttctcgagcgggatttctgcccctgtgggatgtggcggccactgactttggccagacgaaccaaaagtttgggtttgaactgggccccgtctgcttcagcagctgagagtgtccggggtgggagggaccatgagggagccccagaatggggtgcatttggtgctgaggctttgaagccaccgtatttttcgttacctgtgactatggagccaatgggatgtgacttcgctcatcacggacagtcattccttctcctttccagggtgctgggggctggggttccctggcccaagggtccagcctcctctcaccccattccaggtggcatactgcagtctggctctttctcccctccctccccacccaagcctcacctccccaccccttgaacccccatgcaatgagcttctaactcagagctgatgaacaaaagcccccccacccccaatgcctgcctcctcactcctccgtcgctgcccttcacaccttttggtgctacccctccccagagttaagcactggatgtctcctgatcccaggctgggacccctacccccaccccctttgatcctttctacttccacggtgaaaggactgaggtcggactacagagggaagagggacttcccttgactgggttgtgtttcttttcctgcctcagcccagctctgcaaatcccctccccctgccccccacctccccaggctcaccttgccatgccaggtggtttggggaccaagatgttgggggggtgaatcaggatcctaatggtgctgccctatttatacctgggtctgtattaaaagggaaagtcccccctgttgtagatttcatctgcttcctccttagggaaggctgggatatgatgagagattccagcccaagcctggccccccaccgccaggccatagggcataatttgcatctcaaatctgagaataaactgatgaactgtg

SEQ ID NO: 1159 - DNA, 16107 bp, Homo sapiens
gagttcgctgctgtcccggttcctctcgagtcggctccaactgccaggtgggcggccgggcgggcggccgaggcggcagcgcgaggccggggaggggcgcggtgcggggccgggctcctgcgtgggcgaccccgctcacccttcctctcccggccttgcgcagcccgggttggcgccatgtacgccgtgtacaaacaggcgcatccgcccaccggtctggagttctccatgtactgcaacttcttcaacaacagcgagcgcaacctggtagtggccgggacctcgcagctctacgtgtaccgcctcaaccgcgacgccgaggtaggtcgggccctgggagccctcccggctgtccgcgacgtgggtgctctcaccgcccccggttgcagatggaagagccaagccccagacaagttgagtgatttgcttaacgttcctcagcctgaggagccaggacatgaccctgaatctcttgtgctcagatcctttctcacagctgctaccctgttctgcctcccttcctaccccaccgggaagggcgcgctgccctagccgtcttgtttgctcttccgttttttcagcaagttgttcggaaggagcgaacgcccactgtgcgctgggtagcagagataccatgtgaaccacacctgcagacacttggggaaggggaacatctaaataaacacacctgcccctgcagcaagtgctgctgcgggaataaaggagtgaaggaaggagactgtgtatttccagtcgcatgatcagaagagcctgtctgaggcagagcgggagtttgtcgggggaaggacattggtagcacaaggaacaaggccaggtctaggatggggacagactgttgacaggagtcttggtacagtggggcacacgcctcaagggtttgggaaatacagtggtgttttggttgccggagggttgaaagctggtccaggaaagcaacttgcaagaggcagtttctccattgctcttgaagggaggagtacctcttacccaggcccagggatggtgagaggagggtgttccaggcagaagaaacagcctgtgcacaggcccaaagcagttgagggtggagagacatgcacagtgtggccgtggtatagactggatgtggtggtggggatggagggaggtaggccgtggtcaggactattctccacaaagcagggaggagccacaagagggttgtgaataggggctgacccagcaggcagatgggtcagaagctcaggccaaaggaggccaaccctcctgggcacctaccccggcatacatatgtatttgctggccagggctcctgtcctctgaaggcttgacgagggctggagtttctgctcctaacacactattggcaggaggccgcagttcctcaccacatgggcccctccctggggcagctcacaacatggcagcctccctcacaatgagacacccaccaagactgaagccacggcgagtcctgtaaccgaatctcaggctgggtgcactggctcacacctatagtcccacactttgggaggctgaagtgggatgactgcttgaggccaggagttcaggactggcctgagcaacatagcaagaccccatctctacaaataatttttttttttgtttttcctggtgagacggagtcttgctgtgtcactcaggctggaatgaagtggtgtgatctcagctaactttaacctccgcctcgtgggttcaggcaattcttgtgcctcagctccctaaaccctccaccaagtagctgggattacaggtgtgtgacaccacgcccggctaattttttttttgtatttttaatagagacagggtttcgccacattggccaggctggtctcaaactcctgagctcaggcagtccactcaccttggccttccaaagtgctgggattacaggagtgcaccactgtgcttggcccaaatataaaatataaaagttagctgggcatagtggcctgtgtgtagtcctagctacatgggaggccagggtgggaggatcgctcaagcccaggaggtcaaggctgcagtgagctataattgcaccattacactccagcctggacaacagagtgagaccctatctcaaaaaaaaaaaaaaaaggccaggcacgttggctcacacctatcatcttagcgctttgggaggccgaggcaggtagtagatcacctgaggtcatgggttcgagaccagtctggccaacgtggcaaaaccctgtgtctactaaaaatacaaaaattagctgggtgtggtggcaggcatctgtaatcccagctactcaggaggctgaggcaggagaattgcttgaacccgtaggcggaggttgcagtgagccgagattgcactccactccagcctgggtgacagagcaaaactccatctaaaaaaaaaaagtagtagtaatacactgttaaccttctgtcatattctgctggtcatatctaccaaccctggtgggggttgcggagggtgcaacacctcccagcattcactgcagaggacattgtgctgccttggatgctggccaccgtagattggctgaggtgctcattccacatcaggtagcagtgcagagcaggaagcgttgtgctgccttggacgctggccaccgtaggttggccgaggtgctcattccacatcaggcagcagtgcagagcaggagggtgtgtgcaagagtctagaattgaggattgaggtctggtatggaggtcaagtcagagtcttcagcctggggttggtgtctgcccttggaaactggttgagatcacccagaatatagacaaagacagggtcttggggcaccccaacattgagagattggggagatgagaggccatgaaagagctggaggtggcatggcctggaaggcagggggaaagctggacagggccctggaggcccagggaaggcagctgggagggactcgacactgggtcccacgctgttgagcctcaggtgatgcctggtgactgacagggcagtctggtgggcacgaggggttgtggtctgaatggagcaggggtaagagcccagcaggggaggagagtcagtaacagtgaacacagacaactctggaggagatgtgcgtaaactgaagcaagaaatggagccataaatagcaggaaaagaggttttcttcttctgttttgttttttgtttttaagaaacggggtcttgctatgttgtccaggctggcctcgaactcctgtgctcaagccatcctcctggggtcagtctagtcgtggctctgtaactaactgccctggaatatgcaaacgaggtcttttatcataatcgcagacctggaagccaggttttcagggattcatcagagtgtggggagcccttggctctcctccaccagggcaagccttgacagggatgacttgaagagctggggacaggctagatgtgtcttcccctacccccacaccgtccctccactctcccctgtccccagcatggctagcttggttttcctggcagcatggtggtgttggtgtagttgagcttcttgcaggaactcagagccctaggaggctaaggcagaagctgccagtcactttaagggctagaccaggagggcaccgtccctgccaccacagtctgccctaaaggcagcctccagcccagattcacctggagagggagggagacagccacctttcatacagctgtcttttttttttcttttttgagagagagtctccctctgtcacccaggatagagtgcaacagtgcgatctcagctcactgcaacctctgcctcccgggttcaagcagttctcctgcctcaacctcccgagtagctgggattacaggcgcctgccaccacacccagctaattttttgtatttttggtagagatggggtttcaccatgttggccaggctggtctcgaactcctgacctcaagtgatccacccgccttggccttccaaagtgctgggattacaggtgtgagccacggagcccggccaagacattcccaggtgtttagatgagacatttgtatttttgacaggaacaccacagaagaggcaaacagcagccccatcagctttcaggaggcggcggaggcctttgcctcatgactggatgctgatgctttgatgcttggttgggtagtgttggcctggattcccccactgtaaggttatttcttccttttgtaactaaaagtatcttgtagggacttattttgaaaccctgtaaacgtcctcttattcagattttcaaggtttttttttctttctttctttctctttttttttttagacggagtctcgctctatcacccaggctggagtgcagtggcacaatctcggctcactgcaagctccacctcctgggttcaagcgattcccctgcctcagcctcctgagtagctgggactacaggcgcccgactaatgtttttgtatttttagtagagacggggtttcaccgtgttagccaggatggtctcgatcgcctgaccccgtgatccgcttgcctcagcctcccaaagtgctgggattacaggcgtgagccaccacgcccagcctttggtcgctatttctttagctattgattctgtcccctttcccccaacatgccagttagaccatttgactatgtacacatttttcttaaaatccttctgagtggtggccgggcgcagtggctcacgcctgtaatcccagcactttggcaggccgaggtgggtggattgcctgagctcaggagttcaagaccagcctgtccaagatggtgaaaccccgagtctactaaaatacaaaaaaaaaaaaaattaggcgtggtggtgggcgcttgtagtcccagctactcggtaagctgaggcaggagaatggcttgaacctgggaggcagagcttgcagtaagccaagattgtgccactgcactctagcctggcgacagagcaagactccgtctcaaaaaaaaaaaaaattcttctgagtggttacccctgtttcttgcatgtacacagaagtgcagttgatctctgtatattgaccttatacttggcagagtggatcaggcgtccttggctggtcctgaccaagagggaaaacttctttttttgtttgtttttttgagaccaagtctctctcttgtcccccaggctggagtgcaatggcatgatcttggctcactgcaacctccgcctcccggattcaagcgattctcctgccttagcctcctgagtagctgggactacaggcacctgccaccacacccagctaatttttgtatttttagtagagacgggatttcactatgtcaccatgttggctagactggtctcgaactccttacctcaggtgatccacccacctcggcctcccaaagtgctgggattacaggcgtgagccactgtgcccggcctcaaaagggaaaacttgtaatgtttcactcccagcaccacattgctgtagactttttgtagataccctttatttgattaaggaagttgggcgcggtggctcatgtctataatccttgcactttgggaggccaaggtgggtggatcacctgaggtcaggggttcgagaccatcctggccaacatggcaaaaccctatctattaaaaatacaaaaatagccgggcatggtagcacatgcctgtaatcccagctacttgggaggctgaggcaggagaattgcttgaacccaggaggcagaggttgcagggagctgagatcacactactgccctccagcctgggtgacagagtgagactctgtctcaaaatttaaaaaaataaataaattagtcaggtgtggtgactcacatgtggtcccagctactcaggaggctgaggtgggaggatcacctaagcccaggaggtcgaggctgcagtgaaacatgattgctcctctgcactccaacctgggagacagtgaggccctatgtcaaaaaacaaaggcctggcgtggtggctcatgcctgtaatcccagcgctttgagaggccgaggtgagtgtatcgcttgaggtcaggggttgaagaccagcctggccatggcaaaaccctgtctgtactaaaaatacaaaaattagctggacgtggtggtgggcgcctataatcccagctactgaggaggctgagacaggagaatcgcttgaacctggaaggcagaggttgcagtgagccaaaatcacaccattgcactccagcctgggcaacaaagtgagactccatctcaaaaaaaaaaaaaaaattttcctcctatttttgctttactaggagtttttatcacgaatgcctttatcagatgctttttttgtatccactaaaatgacatgatttttctccttaattttgacagcatggtaagtttagcgatggctgttcttgcggaaatctagttttgcgttcctggaataactcaacccagttgtgttacaatacccctgcttgtcactgggctcatctgcaggcgttttgaggaggttggtgtcacttcctgtcccacctgtctgtgggctgttggggtggcctgagccacctgcggtgccgtcagccccacatgagtgggtgtgtgttttttttttaagtgtgtcattacttctgaaacctttggtagaatttgcgggtgaagccctggagttgcccttgtcgctgtgagatgggtattggtttgtggatgcttcttctgtatctcttaaccagcttccaagatgccctccccatagcacaagtccatcgtgaaaaatgaccttgaggtggctcacgcctgtaatcccagcactttgggaggctaaggtgggcggatcacctgaggtcaggagttcgagaccagcctggccaacatggtgaaaccctgtctctactaaaaatacaaaaattagccggacatggtggcacgcacctgtaatcccagctacttgggaggctgaggcagaatcacttgaacccgggaggcagaggttgcagtgagccaagatcacgccactgcacttcagcctgggtgacagagtgagactccgtctcaaaaacaaaaaacaaaaaacaaaaaaaaacaaaacaaaaaccacttttcccttgccttgaggcaatggcatataaatctgctagctagttaaactagctacctagtagcaaagaacacacagcctcttatcattctgggagggcagtgaaaagggaggagatagagaggcagcctgggggagcccgaggcgtcaggatagcgcagggcttcctcttctctaacaggcacgcagatcagtagctacagataccccttggctctggcttcctgccctgtgacatttggacccaggggccggggctgggctgctgtaggtgtgcaaccaggcaggtttgggggtgtgcagacacagagtgcactctaaccctgagtgcttgccgcacagggcctggctgctagggagccgtgaggtaggggcttcctggggaggggcctgtgccagggctgggccgtgggcatgagagcgtgaatgggggtcgctgtggggggctgtgcacagctgtctccagaagcccttctccctgctgcagagagggtttgggcagagctcccaggaggcaggggccaggcttggtggtcttttctcgttccccggatgaggtgagctgccagatgtggcccctcactgccctgtctttctctcccctccaggctctgaccaagaatgacaggagcacaggtgagtgtggtggggcggcctggggctgtgcgggtgccaggcatggctgggccctgaccctgagccctggtgtctcccctagaggggaaggcccaccgggagaagctcgagcttgctgcctccttctccttctttggcaacgtcatgtccatggccagcgtgcagctggcaggagccaagcgggatgccctgctcctaagcttcaaggatgccaaggtgagtggtaggcttggtggggtaggcctggccaaggcgtgggagtgggtgccagggcctgggtacagccgttggttgccgggggcgacactgtcaggaccggcagtcggcagccacggctgtgccctctgaccgcagctgtctgtggtggagtacgacccgggcacccatgacctgaagaccctgtcactgcactactttgaggagcctgagcttcgggtagggccgcgctcccgcccccgcccaggccccgcccagccaccctccctccccctgcagctgggttctgtggccccaagtgtttccctcggggtctcctatgctgggcctggctgatgccccctctgcccccaggacgggtttgtgcagaatgtacacacgccgcgagtgcgggtggaccccgacgggcgctgtgcagccatgcttgtctacggcacgcggctggtggtcctgcccttccgcagggagagcctggctgaggagcacgaggggctcgtgggtgaggggtgagtgccagctgaggcaggctgtggtgctggggtgggaggcgccagagcccgagctcccctccccgcctcccctcctctcctgctgaagcccctggccccccaggcagaggtccagcttcctgcccagctacatcatcgacgtgcgggccctagacgagaagctgctcaacatcatcgacctgcagttcctgcatggctactacgagcctaccctcctcatcctgtttgagcccaaccagacctggcctgggtgagccccctaaggaggcccctctgcactgtgggccccctagctgcctctgcctggggtggggcccatggggtttagggcggggcctatggggtgtggtggggcttgctcgggaggagctgggcctgggtctctgcggggaggcaaggcccttggctgacccactggcgtccccaggcgcgtggccgtgcggcaggacacgtgctccattgtggccatctcactgaacatcacgcagaaggtgcaccccgtcatctggtccctcaccagcctgccctttgactgcacccaggctctggctgtgcccaagcccataggtgtgtgtcctgggagtggataggggagtgtgtggagagagcactgagcctgcccaccagcctgtgtccacctccaggtggggtggtggtgtttgccgtcaactcgctgttgtacctgaaccagagcgtccccccgtatggcgtggctctcaacagcctcaccacaggaaccacggctttcccgcttcgtgagtgtggggtggctggggcggggggggcccggggacggcttgggcctgcctagtcggcctgaccacccaccccacaggcacccaggagggtgtgcggatcaccctggactgcgcccaggccaccttcatctcctacgacaagatggtcatctccctcaagggcggcgagatgtgagcccctcccccgcccatgaactctgcccacaccgccccccacaagtcctgtagggtcccctggcccccttcactcccccagggtccccatccccgactcagaattctccctgcccccagctacgtgctgaccctcatcaccgacggcatgcgcagtgtccgagcgttccactttgacaaggcggccgccagcgtcctcaccaccagcgtgagttgggactaggggttgggtctgggtccagacccggcccagccatcacacacctgccctccctcagatggtcaccatggagcccgggtacctgttcctgggttctcgcctgggcaattccctcctcctcaagtacacggagaagctgcaggagcccccggccagtgctgtccgtgaggctgccgacaaggtgggtttcctgggcccattgggccaccacccttcatgtgggcactgctgtggcatgccactcagtgcccctcctgcctcacaggaagagcctccctcaaagaagaagcgagtggatgcgacggccggctggtcaggtgagggccggtccagggctggtcaggagcggggccaggtgacccagggctgcgctcaagtgggctctctgtgtgcagctgcgggtaagtcggtgccgcaggatgaggtggacgagattgaagtgtacggcagcgaggcccagtcgggaacacagctggccacctactcctttgaggtgagattgaggcagcagggcccccgtcccagccagcgcccccagcgggcccctgactcttgctgtgccgcaggtgtgtgacagcatcctgaacattggaccctgtgccaatgccgccgtgggcgagcctgccttcctctctgaagaggtgcccagggttggggtcggggctgggggcaggggctggagtgtgagggggggtggggggcatagtcctcacccccgagtcctgtgcagtttcagaacagccccgagccggacctggagattgtggtttgctccggccacgggaagaacggggctttgtcggtgctgcaggtgtgtgggcaggtagggggcgggcgcctcctggtgggacctgggtgggctcacacccccatcacacccccaccccatcatcattctagaagagcatccggccccaggtggtgacaacctttgagcttcccggctgctatgacatgtggacagtcatcgccccggtgcgtaaggaggaggtaggtgcgagcctgctgcagggaggccctgggatgggaccggcgctgccttctcataggccgggggtgcccaggtcgcacctgcgtgcctgccttcactggactgtggcttccagcctgcccccctttggccctgacaggaggacaatcccaagggggagggcacagagcaggaacccagcaccacccctgaagcagacgacgacggccgcagacacggattcctgattctgagccgggaagactccaccatggtgaggggcagggcctgggacctgggacctggggctggggtcccctgcggggggcgcctccctcacagctgtcgcccgcagatcctgcagacggggcaggagatcatggagctggacaccagtggcttcgccactcagggccccacggtctttgctgggaacatcggggacaaccgctacattgtccaagtgtcaccactgggcatccgcctgctggaaggaggtaggtggggggggtggttgggccctgggcatctgcctgctggaaggaggtaggtgggtggggacggtgggggggaggtggttgggccctgggcatccgcctgctggaaggaggtaggtgggtggggacggtggtggggaggcgcatgctgactgccccatgcctacagtgaatcagctgcacttcatccccgtggacctgggcgcccccatcgtgcagtgcgccgtggccgacccctatgtggtcatcatgagtgccgagggccacgtcaccatgttcctgctgaagagtgactcctacggtggccgccaccaccgcctggcgctgcacaagcccccgctgcaccatgtaggccccctcattcccggcgccctcctgtccctgccccttgcccgccgctgagcccacccctctccccgcagcagtccaaggtgattacgctgtgcctgtaccgagacctcagcggcatgttcaccactgagagccgcctgggtggggcccgtgacgagctcgggggccgcagtggcccggaggccgagggcctgggctcagagactaggtgcgtgggggctgggggcgcaggtaggggcttgggtccctggggctggcaggccgcccatgaccttctgctggcccccagccccacagtggatgacgaggaggagatgctgtatggggattcgggctccctcttcagccccagcaaggaggaggcccgaagaagcagccagccccctgctgaccgggaccctgcacccttccgggcagagcctacccactggtgcctgctggtgcgggagaatggcaccatggaggtaggtggtgccctgcactgtggcccagcgggttccacccacctgcctccactgactgctgcccaccctgcagatctaccagcttcccgactggcggctggtgttcctggtgaagaacttccctgtggggcagcgggtccttgtggacagctcctttggacagcccactacacagggcgaggcccgcagggaggaggccacgcgccagggggagctgcccctcgtcaaggaggtgctgctggtggcgctgggcagccgccagagcaggccctacctgctggtgagtgcgcctggcctggcctccccttcccatcttccccctggccctgcccgttcccccacagccccgccccttcccgtggctccaccccatctcccccacggccccgccccttcccgtggctccaccccatctccctcacagccccgccccttcccatacatggctccaccccatctcagccccgccccttacccacagcccacctcttcccatggcccatcccatgttctccatggccctgcccgttcccccatggctcccctcatcctgccaggtgcatgtggaccaagagctgcttatctacgaggccttcccccacgactctcagctcggccagggcaatctcaaagtccgctttaagaaggtgccagtggctggactgctggggcgtggggtgggtgtggtacaaggtgtgggtttcagaccggcagcccctggaggacctgcatggttcccccccaggtccctcacaacatcaacttccgtgagaagaagccaaagccatccaagaagaaagcagaaggtggcggcgcagaggagggggctggggcccggggccgcgtggcgcgtttccgctacttcgaggatatttatggctactcaggggtaggccagcgcctttgcaggggtctgtggtagaagggagacgcggcctcatccgcagcatcctcatccacagcatcctcacggtgcctgcccccaggtcttcatctgcggcccctcccctcactggctcttggtgaccggccgaggggctctgcggctacaccccatggccatcgacggcccggtcgactctttcgctccattccacaatgtcaactgtccccgcggcttcctgtacttcaacagacaggtggggcccggccggttcccagcagcactggctgatgctgccccagctgggggctgagggggaggggacaggagaagggaccattggctccaccctgaggaccaggaaggagtgtccagagggcgatggggttgaggtcgaggaggtggaacctgtgacttggttgctccaaaggtctggaaaggggtggttgggagctggggctgcagcccctggggtccccaccactgctctgccggctcgccgggcaagccctcgcagggcctggcctccacacttctcaggagagctgacgtgagtgctagctctgccccttggctgctctgtgactttgggagggcacacaggctttctcatcctggttccctatttaagccaccacaccaccaggtcacttgagaccctgcctgggatgcggtgagtgcttcctgggtgcctgaggactcaggactgtccatgaaagagggcagccctggctccctctgcctggttttcagtccccagcatggcagtctgtgggctgccctttgcagcctccagtgccctcctggcctagctttcccatcccctgtggccagcacccctagccccagctgagcgtgggaaaatggacaggaggagccccagaggctgagtggcagccccttccaggacctcgccaggacacagctgcccctcacccacccctgctcccacagagctgagggcaacatcccagggctcttggcggcctgggcctgcctgcccctgcccttggctagccctggatcccctgacccctgtgcccccaccccagggcgagctgaggatcagtgtcctgcctgcctacctgtcctatgatgccccatggcctgtcaggaagatcccgctgcgctgcacggcccactatgtggcttaccacgtggagtctaaggtctgcccccacccccaccccaccagggaccttctgggcctggccgggccactggtgtgtgaccctcactaacccacaggtgtatgctgtggccaccagcaccaacacgccgtgtgcccgcatcccacgcatgactggcgaggagaaggagtttgagaccatcgagagaggtggtgacgcccacaccatactcccatcctcagccgcatcttggggaagccctactctgactgtcacccttggtccccacagatgagcggtacatccacccccagcaggaggccttctccatccagctcatctccccggtcagctgggaggctattcccaatgccaggtgaggctgggccggcgggggtggggtctgcccaaggcctccaggcagcatcctgaggcccctggcccccacaggatcgagctgcaggagtgggagcatgtgacctgcatgaagacagtgtctctgcgcagtgaggagaccgtgtcgggcctcaaaggctacgtggccgccgggacctgcctcatgcagggggaggaggtcacgtgccgagggcgggtaaggggccagtgagcgggggcgggaactggcagcccctctgccatccccacagccatcccacagccatacccatgccctccagatcttgatcatggatgtgattgaggtggtgcccgagcctggccagcccttgaccaagaacaagttcaaagtcctttacgagaaggagcagaaggggcccgtgaccgccctgtgccactgcaatggccacctggtgtcggccatcggccagaaggtgtgccagtcccacccggcgtgtgtcccccggctcaccctcacccggctccccgtccgcgcccgctcaccctcgccctcgcccccagattttcctgtggagcctgcgggccagcgagctgacgggcatggccttcatcgacacgcagctctacatacaccagatgatcagcgtcaagaacttcatcctggcagccgacgtcatgaagagcatttcgctgctgcgctaccaggaggaaagcaagacgctgagcctggtgtcgcgggtacacctgtggcggcggtgctcgtgtctgggtgggtacccgcccaaggcacctctgacgcccccttcccgcccccaggatgccaagcccctggaggtgtacagcgtggacttcatggtggacaatgcccagctgggttttctgggtatgtgggcagggccctggggagctgaggctctgggggtggccggggctgaccctgggcctctgctccccagtgtctgaccgcgaccgcaacctcatggtgtacatgtacctgcccgaaggtgagtgcttcctccaccccctctgcctgggccggggctgggctagcagtgacccctaggcctttctggtctagccaaggagagtttcgggggcatgcgcctgctgcgtcgggcagacttccacgtgggtgcccacgtgaacacgttctggaggaccccgtgccggggggccactgaagggctcagcaaaaagtcggtcgtgtgggagaataagcacatcacgtggtttggtgagtgtgggggagcaggtgtgtctgggtggggggccctagggttggcctggctcacaccaaaaccctcaccctacccctgccagccaccctggacggcggcatcgggctgctgctgcccatgcaggagaagacctaccggcggctgctgatgctgcagaacgcgctgaccaccatgctgccacaccacgccggcctcaacccccgcgccttccggtgagccccggccccgcccccgtgcagcaccccctccaccccagcctgccctgacacctgtgcctgtacgccccaggatgctgcacgtggaccgccgcaccctccagaatgccgtgcgcaacgtgctggatggggagctgctcaaccgctacctgtacctgagcaccatggagcgcagcgagctagccaagaagatcggcaccacaccagacatagtgagtgcgcgccccgccccccgcgcgccccgcccctccgtgtgcatccccacccacccacccacccacccttccatcccctgcagatcctggacgacttgctggagacggaccgcgtcaccgcccacttctagccccgtggatgccgtcaccaccagcacacggaactacctcccaccccctttttgtacaaaacacaaggaaaaacattttttgcttgaga

SEQ ID NO: 1160 - DNA, 133838 bp, Homo sapiens
agctggagccttaagagcgggatgtggagggcggaaagtgtttttgtgtgggtataggtaccttaaatgagataagtttgttgaaagactaaaaggtaaggctgtctgttgtacaactgagctaaaagtcgttctggaagctggttgagaggaagataaacatggcattcccgtttacttcaagatgactcactgtacatgcgtaaaagctaacgggctcgtggtggcttggcacttcacttgcagatgggctttttctatcgatgcgaggaggcagtgggtactccttgattgcttttttgcgctttggtaaaagttaacatctacgtatatataatgtgccattactgatctgaaaatgtccagtactcagttctcgtaacaggttacagttaaatctttggcactcctgtgaaccgcatttgttcccaaagcgtaattaatctgggtaactggtttgttttcttcctacagttaatacaatgtttaatttttttattagttcacgtgttttaggttttcttttttctccatctcattcttccatccgtgcaagattttaagtttcaagacacagggagcaggtctgcgttccttgttttatctcctagcacctagcataggtgttcaagatttttttttcttttatttcctgaaaagatagcatgacaggccaggcgcggtggctcacgcctgtaatcccagcactttgggcagccgaggcgggctgatcacttgaggtcgggagttcaagaccagcctggccaacatggtgaaaccccgtctctactaaaaaaatacaaaaaaaaattagccgggcgtgatgatgtgcgcctgtagtcccggctactcatgaggctgaggcaggagaatcgtttgaacccaggaggcggaagttgcagtgatccgagattgcgccactccagcctgttagacagagccagtctcaaaaaaaaaaaaaaaaaaaaaaagaaagaaagaaagaaaaaagaagaaaaaagaaaagatagcaccacagctgttaacaacctggcccctatgcacctcttccagcttcatctctttttagtccccccttgaaacttttcattctagcaatgcagatatctttactttggctttgcatatgtggtcagcattgcttgaaacgctctttcgtaaattttctgcctgggaactcctattaatctttaaaaatgcagtccagtgagatcgaccacgaactctttcttgacgctccaattaccattccttccattatgtctgtaagtctccgtaggtgcttctataactgttacaatgcgttgtaataatcagttaagacaaaaacattagaattattgaatccacaccacagcttgctgttttggcactgactttccgttgaagaaaatttcctttaaaaccatcttacaaagaaatttagggtaaaatagtacattaatacctacccttagttccactctcctgggaaactagaggtctcttttctagtggtagcatatggccatatgcgattgtattggggtgaactgaataatatgttgaaaatggtaatgaaagcccaggacccaacgttgaccacactcctgggctaggagtaatgccctgagaggtatgccaacacttttcctctcactaccacccctccccatttttctttccaggctcttacactgttcctaagctggctggtgcatgggaggctggagaggctgcaatagatttagcctgagaagtggcccccacagtttaatagcccctgggcacagcaggagaacgagttgaccaagtccccggccagcgtactggcgaaccgagagcagcgggcagctatgcggcctccaggacagcagggggcgatgtcttgccgcgcggccgcctgcagtgggggcggggccgtacccggcggttggcgaagggcgagcggagggctgggcctgaggggcggagccccggcccggaggtctgtcatgctgttcccgctccaggtggccgctgtaacctcttcggtccgcgacgatcctctagagcactgtgtgtctccccggacgcgagcccgctcccctgagtaagagtcagccagccgcggatggggagcgtgagtggcgaggtgtggcctggggtggtgtaggttgagggtggagggtcctggggctgcattcgctgccccggagcgggggcaggggcagtggctccctcggggcgtaggtctcgaggcaactaggccggcgacgtgccagagttacaggctctggaatctgggggtgggggtggggtttcttgtcggcagggggtctcgtggcggctgggtgcggtgggggaggtgcccgagttaagggtgtggagagttgggatttcgccgccgtgaggccggcatcggtgactacgagttatgagggttgggggcgggagttctgtgagcaggggtcttgcagctgccggggtcggggaggttccctggttacacggtccggattcctgggccactgcggtcgctgctgcccgcggtgttgttgatagctggttgcctgacgacgcttcctagtcagccacctccagggcccgggggcgagcggttccttggttcccatgcgccttctctccccaacggccaggccccccctgctccgtcaagcctccccgagcgcctttcttgcccctcggtgcttgttattgttaacgtgggagcgcttgtgcgcactgctttgctagtaaaacttatttaatcttcaccgtagctcgtagctcgtactgttgtgaccgtatttccccccgtgattgcccgactgcttgagcttgaacctcttgtttctaactgccttgattttaggaatcttatgtgggactcaaatccagttgtcagtacatgttattaatgggactcatcttttgagagaggctagctctcaagattgtaggattaagacgcttaactaggattgcggggaagactaaattctgaagtaaaccatcacctactttccaaacaccttggaaaatgcaggggcttaaaagcaaccgataggaatttataaaaagcctaaattaggctttattctgtgtgaaggaatgacttgtaatgttgacaagctccatggaagctattgaggtattttcttttctccatatcattcttctccctaggaggtcgctagctttctggtgattaaatgtctgctgaaatgctccacaaggatcaagtttttttgtttgtttgttttgttttgtttttggagacagggtctcgctctgttgtacaggctggagtgcagtggcattagtagagaagggggtttcaccttgttggccaggctggtctcgaactcctgacctcaagtgatccgtttgcctcggcttcccaaagtgctggaattacggccctgagccattgtgcccgttcaagtttgggtcttctgccagatggccgcctgggagggagtgggtgagtttagacagagtaaattgaaacaggctactttcggtacagtttttctcagatgaagctttcagacaaatatgaattaactgttacacatttgagcagatttcagattatccttttaacatcattctgacttaggttctgatgtactttcctgagtggcaggcaagggtgtttgagcaagtgtttcagcaatttggcataacccaaaggctaatttatgctactgccgttaatcaccattaagggtgtattattaatagctactgaaagacttcaacatggttttatatatttattcactctctctttgtatcctgtctcccagcctccctctctttcccccagcaacagtatttacatcttagcaatatttagggaaatttgtcaaaattttggtgtacccatgggaggaagttgctcatgtggatgccatctgccaggaggaagatggagaacctttcattcggtagatggatctctggatggatgagaagtgagaaacattgtcctggtcactttgtccctccctttcttctaaagctctttcactggcccctccccccaccgcacatgttatcacactttgacacctgttctaggtcctgttcccctactctagggtctctttttccagacaaaactcttctcccacagccttaatgattattttaaacactgctagatctttatttccagcctgggttctattctgagttgtagacattttcagattgatttcttcgtatctccggtgtatccattatggatatctcacattcagctcctaaacccctgtcagcctctgtagcagggggcattatcttgtccaaatttgaggacaagaatcatgtttatatatatacatatatatacacacacacatatatacacacatatatatttgttttttgtttgtttgtttgtttgttttttgagacagagtctcactctgttacccatgctggagtgcagtggtgtgatctcggctcactgcaacctctgcttcccattttcaagcaatggttctgcctcctgctacacccagctaatttttttattcgtagtaaagatggggttttgtcatgttggccagcctggtctcaaactcctgacctcaagcgatccgcccgtcttggcctcccaaagtgctgggattacaggcgtgagccacggtgcccagccacattttatatttttgactacgccagcctctagcacaatgtcatgctttaggagggaagtcattttccatttctcatgctcccatagtggggaggaaatttgtactccactccttgagagggaaaaggataggagcaacattttcccatctttttgtgactgatggatttgggagaaggaattgggcaaactcagttttaactgggttctgtttgtttattggatttgactagacttagcagaatgggtatgctctggtctgcttatatctatatgataagcataaagagccaaaggttaaggtttagagatgttggtgtggattatgataaccaagtatcaattattgattatttaaatctcagcatactttacgtttgcaggctctgttttttttgtttgtttgtttgtttgttttggtttttgagacaagagtctcgctctgtcacctaggctggagtgcagtggcacgatctcagctcactgcaagctctgcctcccaggttcactccattctcctgcctcagccttctgagtagctggaactacaggcgcctgccaccaagcctggctaattttttgtacttttagtagagacggggtttcaccgtgttagccaggatggtcttgatctcctgacctcgtgatccgcccgcctcggcctcccaaagtgttgggattacaggtgtgagccacaacgcgcggctgcaggctctgtttttaagaggtaaatcttcatatatgcaaagactgtaaagatacaaccataaacaataaaagaattgatctgttgatttcttttttttttttttttgacagagtattgctctgtcatcgaggctgtagtacagtggcgtgatctgggctcactacagcctctgcttcctgggttcaagcaattctcctgcctcagcctcctgagtagctgggactacagaggtgtgccaccatgcctggctaatttttgtatttttagtggagatgggttttgctgtgttagccagactggtctcaaactcctaacctcaggtgatccactctccttggcttcccacagtgctgggattacaggcatgggccactgcgcctggcctgatctgttgatttctaagtgttaggttctctgtcataatttttatatgcattattttcttttttcttcataatatactagaataaatgatatttctgttttatagattaggcatagagcagttaaggaacatgcttgaggtcattcatgttgagatcaataagtgatagaagtatatttcaaactcagttctttcaattaaactattttcctgaaaactgtttatcatctacatactatgtacacagctactggagaaataatacttggccatgatgtcttgaaaaaagttgtgagtgactttatattgtagagtgtcatatataaataatctcatttaggtttctttcagctgatttatttttggcaacttaatccttaaattataaactttcttactctatattgtacctatgccatatttattaacccagtctctgtgattcaccaagtaattcttgaataattgtgtagttgaaatatgttttctgtaagttaccacatgcttttaggagtgagaaaaagaaaagtggccgtgatatctagaaactggtattgctagaaactagcctggcattcacagtaactttgtgtttttctgttgaagataaactattgtacagaatgtcaacatcagataaggccgctctgtgtctatgatggatcaagacaaaaacattccatcagtgtctccaaacacagacaaaacgtaaatattgtccaagaaccgagataccaaacattccctttcccagctgatgtgaatgactactgcttgtttaccagttacagcattagcctccccctatattttagatttattgagtggtaccatcatagaattaaccccacttctaacagtgttcaatcctgagcaaagctccacttcctcaaattaagccttcccccaaatcacccaacacatataagtcttttccaataccctcttaccacgataccacagggttccccatggtgtgtgttctccgtgcattccttaatgcaatgagtagtacatccaacttaactgtggtagttttcctggtgttctttggctggagatcattaccaggagaaagctcattagtgtctttgactctttaatattaaagtcattataatctaatcagattagatacaggaaaaatttagaaatgattagaaatgtacttatatctcggataaatcttatgttttagttatggcatatgctatatttactatggttgtttaaaagtatgttttatttgtactttttgtacttttgattactgtaagttaaaatcagttctataatttataatgttaaataattacagtaaagagaaagataagcatctataaattcaagagggagatctttcaaagcctggttagaacaacatgtaaatgaacatgttaaattaataattgttattaggtggtatggaaaccttagttccatgtgaaggtggcatgttactgttttttttttctttttagataaatgacatttcttttttttcttttctttcttttttttttttttgagatggagtctcactctgttgcccagactggagtgcagtggcatgatctcggctcactgcaacttccacctgcctggttcaagcgattctcctgcctcagtgtcccccggtagttgggattacaggtatataccaccatgcctggctaatttttgtatttttagtagagacggggtttcgccatattggccaggctggtctcgaactcctgacctcaggtgatccacctgcctcacactcccaaagtgctgggattacaggcgtgagccaccgcccccaacctagataaatgacatttctgtttaaattctgtgcaaaattctatagcaaaatatatgcgttatctcatcattttattcctatcagacatagaatatttagggaagattagaggattttgaggattgattgttttaaacatgaaaacttgtttgctgttgagttcagaatttttactaggaaaaatctttcgtgactattagcaaattaaaaatggctgaaataagtcgggacggtggctcacacctgtaatcccagcactttgggaggccgaggcaggcggatcacgaggtcaggagattgagaccatcctggctaacacagtgaaaccctgtctctactaataatacaaaaaaattagctgggcatggtggtgggcacctgtaatctcagctactcgggaggctgaggcaggagaatggcatgaccccgggaggtggagcttgcagtgagccgagatcgcgccactgcactccagcctaggtgacagagcgagactccatctcaaaaaaaaaaaaaaaaagctgaaataagctgagtgtggttgctggcagttataatcccagtgattctggtggccaacatggaggatcacttgagcttagcagttcaaagttacaatgaactatgatcgtgccactgcacactagcctgggcagcagagcgagacctcatctctaaaaaacaaaaaacaacaaaagaaattggccagaatttatcaacttttgttgatttgaagtatattttgctaaaactatatatgtaaatatatatatatatatatatttctatttttagtgtttttttttgagatggggtcttgctctgttgcccaggctggagtacagtggcatgctcataagctcactgtagccttgatctcctgggctcaagtgatccaatcctcctgcctcagcttccccaatagctgggactacaggatgcaccactatgcctggctaattttatttttatttttagtagagacaagatcttactatgttgcccaggctggtcttgacctcctgcgctcaagtgatcccacctcagcctctcagagtgctgggattacaagtgtgagccaccaagcccagcctacggctatgttttaaaatcagtgtttcttttggcattacataatggcgtgaagtttacattaggtactgtttacctgttataagtttcaacatattcttttaggtaaagcctgcttttctacaatgatatatatatatattttacaaattattattgtcccaaacattaagttcaggggatactttttttctttaacttgcttgcatttgatattgtttaccagttctattttgtacctctttcctcttttcctcaactaattatgctgattgggtttgtttcatatccctgttttaattattatttaattattccctctgttttttttttttcccccagcttcaattcttctgtcactccctcaagtgaacattggctgttgtttagttctgggtcatctctctttttccctccctgtgctcatttactgtggcttcaactgttacctttaaaatacatagttaatgtagttcattttcttgaatttgaatcttgaatttctaaccgtctactgtaaatttccagtagcacatcttactagctccaacttaacatatgtaaaccaaacctttctaaatcttccaacttgctctgacttacttctgtccaagattctatccacatttagcttccaggccttaaaactttgatcattagtggcttcttttttgtctacgtacccaattagatgctaactttaatgggactttggaagatgtgtttggaaaaaaattctaggttaaatgaagaaaggttagtcttttcaaaaaatggtgctggaatactctattcatatgcaaaaaagttgagccttgacacttacagatttgcaaaaattaactttgaatggatcacagacttaaatgtaagagaaaaaactaaaaacttctaaaaggaaacataaaagaaaatatttgtgatcttgggttaggcaaagattttttttagctgggcgtggtggctcacacctgtgatctcagcactttgggaggccaaggcaggtggatcacaaggtcaggagattgagaccatcttgagaccatcctggctaacacggtgaaatcccgtctctacaaaaaatacaaaaaattagccaggtgtggtggcgggcgcctgtagtcccagctgctcaggaggctgaggcaggagaattgtttgaacccaagaggcggaggctgcagtgagattgcgctactgcactccagcctgggcgacagagcaagactctgtctcaaaaaaaaaaaagattttttttagataggacacaaaaagtacaaacaaatttaaaaattgataaattggacttgataaaaattataaactttcactgttaaaaatatatcaagaaaacttacaaaccacagattggcagaaaatatttttacaaagcaagttttgtaaaatattgctttgtaaaaataaagcaagtttaataaatgacttttatcaagtgtatataaagaaatcttacaattcaatggtaataaaacaacctgctgggcttggtggctcatgcctgtagttggaacactttgggaggccgaggcaggaggatcacttgagtccaggaattgaaggggtaacattgagctatgatcataccactccagcctgggcaacgtagtgagatcctgtgtctgcaataaacaaacaaatgaaaaaactagctggggatggtggtgcttgcctatagtcctagctgttcaggaggctgaggtgggaggattgcttgagcccaggagttcaaggctgaaggtgtactatgatggcaacactgtactctctagcctgtgaaacaacgagagagcctgtctcaaaaaaaaaaaaaaaaaaaaagaaagaaagaaaagctaattttaacaaaagggcagatttgagtagatactttcccaatgattatatgtatggtaaaaaaatagatgaaaagatgctcaacatcatagttatcagagaaatgcagattaaaacactcagagagataaccactaaataaatacacaatagaatgactaagataaaaatgactgaaaatatcacgccctggcaaggatgtgtagaaattgcaattgtcattacaacccacatacattcttatacattggaatgtaaatatggtactttgtactttgaggaacagtttagcagttcaggaattagacaacatcttgaccatataataaaaaataacatcactaacaaggggcaggtaaatatcacgtgccttctctttgtgacaccttaaaatttcacctaatatttctggtgagaatgcataatctaaatttagtcattaagaaacatcaggcacaccctagatgagggatgttctattgaaaaggatgttctgttacacaggattcttttacctgtgtaaattggtaaaagacaaagaaagatggtagagatagatattccaaattaaagaaggcaaaagagatatagcagtgaaatgcaatcagtacctaacttagatgggatcccgaattagaaagagaaaaataggctgtaaaggctgctattgagtcagttgacaaaagtggaatatggacaatagattaaaaaatcagtgttacaaaagttgataattatgttgaggttatataagaaaataacccaattcttaagacacacacactgaagagcttaggggcaaagggctatgatatatatactttattctctgaataattttagaaaaaattgtgtttgtgtgtatggagagaatgaccttgtgtgcacaagcaaaggatgaagcaagtggagccaaatcttaatagggaattaataaagactctttgtgtgttcttggtattattactgtaacttctctgtaggtcagaaattatctcccaatatttaaaaaaaactttttttttgaagtgctttggcttaaggatttaaagagctttttgtttgcttgccttcgttttttgccggagagggagtgtatatggagggtggtggtagtttttcattttctttttatttcagatattttaaagtatattgtaggctttttggggaagctgggagaggcagtaggcaggcatatttatgatcaatcttaagtttgaatttctcaatttgataagtgagattgaaaactaaatgtggactaagcctacatgttgataattaggctaaaaatactgtgatatagatacgctcactgaaatttttttttaaagaatctgcaaaatggctgataatttggatgaatttattgaagagcaaaaagccagattggccgaagacaaagcagagttggaaagtgatccaccttacatggaaatgaaggtaaatttaataattttctttgaacatgttttattataattgtctatggagattactcctgtgtaaatacaaaacatcctcttctatgagtgagaatcttctgttttgtagtatgctgtcattctaggagcctgactccagacaagattgcagtaattttgaatgcagtttttcttttgtggtggtttatatctcacagtgtttctcttatctcttgttgaagaattatttggttataaaatgattatgagaccagttctattacaaagaacttccacaacataaacagaatagttgtaaaagcaagtttatagtctatgtgaaaaaattcaatttaattagtttaaaaagtttttttgaaatctgaaaaagtgaatttattaatttattttgtactatttgtgtttcttaatataaatttcttaaaataattgcttttttttttttgagatagaatctcgctctgttggccaggcaggactgcaatggtgtgatctcagctcgccacaacctccgcctcccaggctcaagtgattcttctgcctcagcctcatgagtagctgggactacaggtgcccgccactatgcctggctaatttttgtatttttagtagagttgagatttcactatgttggccaggctggtcttgaactcctgaccttgagatccacccacctcggcctcccaaaatgctgagattacaggcatgagccagtgtgcccggcctaaaataattgtttcttaaagcaatgtcttaaaggctttcttaaagctttccttgtttaggtgaaactgatttatccatttagcaaatacttactgagattgtgttaggtattatgctaagctctgagaatgcagcactgattagagtgttgtggcaccttctcagggctcagtgtatgtaataagatacagcatgtagtttaatctgtgccatatggttcatcataatgacagtaaccatatatattggtttgttcaagatgatcctggtttacctgttgtccagtgtttttttctggtttagcatttgtcctggacaaaggtaccttggctgagatgataaataatatagataccctgattacaattttactcacatggctaacatttattgagtactagctatggacaaggcatattcttaagaggttatatttcacagtaatctatgaggtaagtgctgttattgtaattttccagatgagtaaactgaggcaagttaagtaatgagactaaggcagtagagttggtggaactaggctttgacccctggcagcctggcttcagtgcttgtcctcggaaccaacataataggttgcctttcttccagataacctgtcatgtaccaggaatgccaaggactttatatgtatcattttatttaatcataatatccctgttaagcaggtgaattttttttgttttatggattaagaaagtgaagctcacaggagttaagtaatttgtccaggtccacacagtggtggattcaggagtggaacctttatgcagctccagagtctatctcttaaccactctccagtagttaggaccagcttacggctttggagttacatgatttggagtacatagctttaaagacagttttgttataatttctaacattaatttgtacataaataattttaagtcttagttcaagtatcacctgctcagtgaggccttatagtcccccagcatttctgggcctccttactttaatctgcttttttttttttccataaccacttcctgccactatctacatatcacataatctaatcatgtgttgagttcattatgtgtccccccaatagtttataagcttcatgatggcagaaattcttctattttttaaaactcttatactttcaatgcttgacaaaatgtttggcacttaatgggaactcagtaaatatttgttggtaagtgaatgagttaaatattagaatatctattataaaattaaaatacctttggctaattcctcaaaccttacacttaatttcttctatgatgtactgtgtaatttcatcaagctgtttaattaaaatttgagatgagttgtatatttcatggttttttttttcctcttgcttttgtaaacattatgtctctttcagggaaagttgtcagcgaagctttctgaaaacagtaagatactgatctctatggctaaggaaaacataccaccaaatagtcaacagaccaggggttccttaggtatgtcattagatgtgctaaacttattttaagatatccttagtgggctcttctgaaagaggtttgtcttgtcagaaaaaaagatttatttggaatcctagtagtttttctttctggaatcttacgtaagtcaatatggtctacatatgaaatagaactcatactgaaaactttgtacttgttttatgtgatactgcattggttatgatttatggaacttatagaagaaggtgtgtataacataacttaaaaattgaaaactttgaaaggaatttgtgtgtgtgagagagagagagaagagaaacttttatttgttgattgaaaatggtgaacttgcttatttaaaaattaaagaaatatgcttaaagggtacaaaatgctgtttggtgaaagactattttaattattgatgatcatgttggaattgtaaagaagttaatactgtagccatactaatgctttgattatggtatggtatgaaaatatttggaaactttttaccacattttggcttgttggtaggtatacattttaaaaaaagaaaatgtatgaatatgtaaaaatttttgtttatttattaaagacagggtctctctctctctctctctgtcactcaggctggagtgcagtggcatgatcatagttcagtgttatcttgaactcctgggttcaagcaatcctcctgccttggcctcccaaagtactacaattacaggcctgagccaccatgcccagtctgtatgaatatatataattttttttttttttcttcaaggctgagtctgaccctgtcgcccaggctggagtgcagtggcacgatctcggctcactgccgcctccacctcccaggttcaggcgattctcctgtctcagtctctcaagtagctgggattacaggcgcatgccaccacactcagctaattgtttatatttttggtagagacagggtttcgcagtgttggccaggctggtctcgaactcctgacctcaggtgatctgcctgcccgcctcggcctcccaaagctggggttacaggcgtgagccactgtgcccgacctgtatgaatattttcaatgtgcattttgtgatttattgatgatgacaaactttttcacaaaaagaaaatcaactatgataagttcatttgattaaagcattgttctcaaatggacagcttttcatggatgtaggtatactcctaaattgtttttgtgtgccagtggatacaaggggatgccggccaagaaactggatagtcagtaagctttgtctctgcattagacaaatagctcaaagtgagtgccctacttttaatatcagatagataactctttccattttgaatctcttataaattattaatatacagcattagtgaactaaagtattatatattggtaaaattttttaatctctaaggctctcaattttttttctgtgaaataagtttgattatcttccagccctacgtttttatgaatctaaattttaattattccaagagataatttttaaaaagtttaatagtaggttatctcaagcactaaggtcgctaaggttagacagaatcccttttaaattctagggttacagcttgctttggattgggctgtgatgcctttatgacctgtcaggagctacactttgtttccttatcttatgacatctatctcaaaaagtcgttatgggcgaaagttaaatacgtgaaaagatggctggcacgtaattggtacacaataaatattaatttctttttctccttaacatcttttttttttgagacaggatcttactttgtcgcccaggctggagtgcagtggcataatcttggctcactgcaacctccactgtccaggcttaagtgattcatcctccctcctcagcctccaagtagctgagaccacaggtgagcaccaccatgctggctaacttttttttatatacatatattttctgtagaggtggtgtttcgctatgttgcccaggctggtctggtctcgaactcgctagctcaagccatccgcctgcctcggcctcccaaagttctgggattacaggtgtgagccacttgtgcctggccttccatctttttaaaagtagtttttcgggctgggcgtggtggctcacacctgtaatcccaacactttgggaggctgaggccagcagatcacttgagatcaggagttcaagaccagcctggccaacatggtaaaaccccatctctactaaaaatacaaaaaaattagcccagcatggtggcgcaggcctataatcctagctacttgggaggctgaggtgggaggatcacttgaacctaggaggcggaggttgcagtgaccgagatcatgcccctgcactccagcctgggtgacagagagagactccatctcaataaaaaaaaagagtagttgtttgaattgtcttaggaattattctttgatcattacattcacatattatggagagttaacagtataactgaaagatggtgacctctgccttttcattaattggtgttacttcggcctctgacctaggctgacttctcatcttatacattccccgagtgtccatatctgctcacagggctttatttactgttagtgtgttcatgacttctgaatctgtatccccagtcccaggttctattgcgaacttgacccatatgtctgattttccattggacatctgtacttgtatggtcatgtatggcatgggctcaaaatcaaaatttgcaaaattaacttatactcttgtcaaactttctagtgctccccatctcactgagctggctgcctagtcatccttgattcctgtcttctcctgtctcctatatcaagcagttacacaagtctagttgattctaatgcataaatctcaagtaaggtcactctgctgtaatcccactgactttcttttatgaggcctctgttgtctgtcagatttttgtaaaagcttcctagtgtttttggtggttgttttgttttacagtctagccccgtgtatcaaatctctatgttttctatatatttgcataaaacaaatctgatcatattagtctctgcttcaaaccctttgatggcttctttttttcttatatgataaatttgccatcttaatacttctgctagattgggttggtcaatcctgtcatgtgcttctagaggatttgttctcctcttgaagagtagttttgaacttattcagcttctcttttgtaccacaatgacatgccaacttgcatcccgttgtatttccactgcctagcacagtgcgcagcacttactgcttggaaaagttgttttaaaccaacgggttaatgtccccattgcaaaaataaaaccaattctcttgggtgtgttgactttaattttcatggaatgcttcttccattgccatctgaaaccatttgatgcacatggaattttattaaagaacaatatataattgactaattttatactgcataagcatttagttactgacctcctgcctgattaattgtggctttaaaattcagtcaaatacatagtttctcacactgggaaaaatgtaaaattatttggcaactaagggttttccttaagtggtctcatttaggaattataaaaaacaggtctaatataggtcagatttggaaatgaggtattgacttaaagcactgtaacatcgtagtttgaataagtaattaagcatagtgtagtaatcagtgatatataaactggacatactcattttatccaatgaaaacaatctattgatagctcatagtacaactatcatacaacactatgattttataaattcttttctgttagatactgatgatattcatggttaattccatgtggctctttctaccaccatttatacctttcataaaaggatttgaggtagcgttacagtgacttctgacaccagctacctggagttggaccaaacttcacaggttaagggcataggcctccacaagactgccttcacttcagactccagctgcaagttcaagggtcaccaggacaccttcaggtctgaccatctggctataaatttgggggtttcccctatcccctcaagttcaataattcataagaatgactcacagaactcaagaaagtgctgtacttatggtcacagttttatagcataagtatacaaattagaaatagccaaaggttgagacacatagggtaaggtctgggacggtccaaacattaattatctgttagtctcagggagacattaccctcctagcacatcagtatgtgacaggatacagaatattgccaatcagcctcacctaagcctgagtgtccagagtttttactggattttccttatgtaggaatgattggttgaattgttgctccttggcttgatctccagccctgctgtattcattccccttaggcctggctgatgtcacatggcgcaaaggcccaaccctcaaatcacatggttggtttttctggcatgaccagctcccgtttttgtcttctctgtagcataaactctctaggggttcacaatgattcacttcgttagtataaactgttaggtatggtccaaggtacccactgtgaataataaagacattcccatcatctggtaaattttaaggtcaaacccactaggggctcacaatgatttacgttgttcgtgtaaactattaggtgtggtccaaggtgtccactgtgaataataaagacattcccattgtctggaaaattttaaggatttagaggttacctcccagaaactggagacaaaggattcaattttttttttcttttttcttttccaagccaattttttaattacacataggatgtacatgatttagttcatataagctaatgaaaaaatgtctttaataaggagtttgtcagaatactagtaatattaaattaagagaaagtcacctgaaagtgatctataaaagatcttttatctccctaaactgtttctaggcataatgtttgtgtttatttcattaaaagaaattcttactaacttattattgtttaacaaccattactggtattattaacaataatcaatattgttgaaatacttatattaatcatttaaatgctcccattaatcttttaaaaatgttttgatacaaatgtgtcaaggtcttaaaacatgtagtttctccccaccacccagtttttttaagggagaggatcttgctctgtcatccaggctcgtgtgcagtggcaccataatagcttactgcagcttaaaactcctgggctctggggatcttcctgcctcaacctctcgactagctaggactacaggctcaggccaccatgcctaatttttaaattttttgtagagatagagtcttggtatgttgccccggctggttttgaactcttgggttcaaacgatcctcccttctctggctcctaagtagttgagactataggtttgtgccactgcatctgtctagttgtagttttaattatttgttttgagatagagtctcgctctgttgcccaggctggagtgcagtggcgcgatctcggctcactgcaacctctgcctcctgggttcaagctattctcctgcctcagcctcctgagtagctgagattacaggtgcctgccaccacacccagctactttttttgtgcttttcatagagacagggtttcaccatcttggtcaggctggtctcgagctccttacctcaagtaatccacccaccttggcctcccaaagtgctgggattacaggcgtgacccacagcacccagccttgtagttttaattatcattcctctttgtcttaggtttatcctattgtaaactaaatcacagatactcttctacagtttttattcattttgtatgagtgaaatgggtccttgtagtgatacctttatagctgaaatttaagagtacagtgtctcctcaattagtcacatctccttgtaagtcacccattgtgtaaaggcctattattatttcctataatttgtcttttgattatttttacataatgctttttcatggtagtataataatgaaaagaaagtaaatgttctatggtaatttgtttcatagagtaattatgatgaatgctctgttagaaggtaaattaattatgaagaagttatatactttagtcttaagtattttatgtaagccacaactgttatagaaaccaaatacttctaattactatagttctgaagcataatgttaactatcttagggtcattgatgttatacttgatgaagtgacatcacttcaaatgaccctaaaatgacacaaatgctttacttgctgctagatccatcagaagacaacaggcacaataagtaagcctcaccgtgttccttagctcattaagtcaattgagatgctattgttaatgcatggtttaaaagaataggatatttacattgttctatacagttcctaattttatgtctgtgacttacctctaatgccataaaatgttggtacaagatgacaaaataagaattaaaaagttagtgttttctgttgactaaacattaaattaataaagttataaataactcagaaggcattatatattgttacttgtcaagacaattttacaatactatttgaattaatagtgaaaaacaaatactcttagtaaataaaaatttaacttaatatgaataataggccgggcgcagtggctgaggcctgtaatcccagcactttgggaggccaaggtgggcggatcatgaggtcaggagtttgagaccagcctggccaatatggtgaaaccccgcctccactaaaaatacaaaaattagccaggtgtggtggcaggtgcctgtaatcccagctacttgagaggctgaggcaggagaatcacttgaacctgggaggtggaggttgcagtgagccaagattgcgccactgcactccagcctgggcaacagagtgagactttgtctcaaaaaaaaaaaaaaaaaatatatatatatatatatatatatatgtatatatgaataataatgtaaatgaaaatgaattatgtttttctttccattcttccacataaacccccaagtagaattgaaaaacagcagtaaaagccaccttaaacttacactttttgtaaatttgtaaattgcttgttcctggatgggcaggtagtgtgttggcatcatcctggcagcattgttgtcttttactccttggcacaatagaacatccattgtgaccctgtgtgactagtgatatgtaactttggtaactacctctctctatgcagtcagaccgctaacaggagaaatggaatattaagtatagtatattgttccccctcaccttttctcatttcttcctctgtctcaggcactcattcatatattcatttgcagatttattcaatgaacattttcttgggttaaagttatgtgccagcattataaaattgaatagcgcatgggccttgccttcatagattttatagtttagttttatatatgatgttccattctgaacatgagaatcaaaactttctctccttaggcttaaattctgtatctttaaaaaaaggtttagattccttcaaaaggaaacagttcctttctaggatgatttaaaattccaagcatatggaatgctttagtttcttttggaagagagttagaagcatgtgtaagaggtgtccctaaggaatcctctgttataccctctatcatcaaggagttaaataggccagaaatgtttatcaagagaattccagtgttgatagcggtaagtggattttagtattctgtaagaatccataaacatccacttatgtttatattacactggccttttccctgcctgaaatgtttcagtgatgtagtaagcagtgatatgacacattcttgaaaagttcccatcattcagctacattgtgagaaataaggcacaaaatggtgatttttatatcagtttataaactacagtcaaattttatttcatctatagtgctcatagctgaatctttaaggaaagttttggccaggcgtggtggtgcatgcctgtagtcctagctactcgggaggctgagatgggaggattgcttgaggccaggaggttgaggctgcaatgtgccatgatcacgccactgcactcaagcctaggtaacagagcgagaccctgtctaaagagagagaaaaaaaaaaaagccaagttttattttgtttagaaatgataattttttaatactatagtattatgtgtatagtaggactaaaaaagggatgaagcttcagatctgaatactcatctaatgtctatgcttcttgacatagtattttattattgaaggtttgaaaagtatataatttgatttttgatagctttgttgagatataatttacacaccataacatttacctatttaaagtgtacaattcaatggtttttagtatatttacaagttgtacagtcatcattgtcatcatccctaaatgtaatttgatttttaaattttgtgtaaggaaatactactcaaattcgaagtttttcttcaaaaattaacatccatttacagagtttctgtttgggatgatgaaaaaattctggaaatggatagtgatgatggttgtacaacattgtaaatgtacttaatgccactgaattgaatgcttaaaatgattaaaatggtaggttttatattatatacattttaccacaataaaaattaatatccatttttatgaaatcagaagtggtttaactttagaagtttttaggaatttcatcctatctgaatgctctttgatacaaaaagaaaattaaaaaaaaaaaaagaaatgtgattctaagcaacacatggccctaataattttttctcagaaacatgttatattaaagatattcttgtatgctaaaaaaaatcatgttattagttttcctagactgaaaatgatgcattaaaattgttgttggtatttatttttatagaaattagtgtataattaagtgaagatgtaaagataattagtttttctttaattttgctgttcttgagaaagcaagatgccaaacaatgctggactacttgtcttaactggaggaaaaagtgaatataatgcacacatgcatataaatatgtatatgataatataaaagtatctgtttataggtgcattaaaaaattatctgcatggagacaagaaataacaatgtttgttgttctggacaggagaacagggtggctagggctcatggatgagaatgatatttttgataatatttttgattatctgaatgtattatctattgagacattttaagtaaaaaacttaccctaatcctactcttggaataagcataattctgttccttcttactgtgctttgttacaggaagtagaactttgagattggtttgaaaatgaattatactaagaagttgttttttttctaggaattgattatggattaagtttaccacttggagaagactatgaacggaagaaacataaattaaaagaagaattgcggcaagattacagacgttatcttactcaggtaatgagttctattaatgagttgggtttaatgtttcagaattcagctcctaaatttgttttcataaggtattagtcatatgtgttaatttttaggttttcagtggtactagcaaagtagtagtatagtcaaagttaagtggcatatatgacattggtagagaaaaaaatattgctgagaaccggtgccatagaatgatacagacttttgaccttttgactaaggcagtggattctaattttaagtgagatcgttaattatggtttttcatgttttctgtaaagttgtcatggtttgaagtagtccaatcatggtttcccactcttctacaccccccaactatgtattaaaatgacatatggagttctagttgctaattattttcctatgagccaagcttataaaattacatttaattatttagccactaaagcttttgttttatgatctcatgttttacttagcagaactcttgagtatttttgttaaattatataatggccaaagtaaggtttattgtaagttttaaatttaggttataaaattattttaaacaattatgatatttgttgtcatctcaaaatattctttagttttttactgctttatgtttgttccaagtgtacaaatgtctcttattctgatttacacatggagagaatgaactttgacttaatacactttgtcaatggtttgtttcccttgactttagggcattacacaagggaaaagaaaggtagggttgtctgcaatacgtcctccttcagttttttctttctttttttttttttttacgatctagaaggttgcaatcatttgcatttatgagattcaaaccaattaggaaaacgggttcatttgtgattttgagatgtttgaatggcaccattttgtattcttgcttttagcagatgacagcatacacattataattttccgttaatatagtcattacttttgattcctgctttgcatttgtgtttattgctttcttatgcattctttttgaatattctgcagttaagtctgttttcagcatgcaattttttatttctcaaattacactaatcacagtaagattaatagagtagtagaatatccaagatatttgaactacatgttgtgagaatttggattactctgtttttccaccaaaatctatagattgcattgtccatttatattggaaaacaaagagaaacagtttatggttttacaaaactggttttaaaaggaatctcacagattcaccattcaactaacatattttaaacacttattatgaagatatatcaggtatgcatcctgtcttcaagaggcttagaatttagttgtagagatagcattcatacgattcagaaagtggtaactacaagaaggatataatgatcaagatagtcctcatagtgggaatttctattttgtgaggcaatctagatttgggtgatctggagagagaatcgaagcgagaaagcttttcagatggaaagcatagagtaaaggaggacctagagggtagactttagctttgtatgaatgaggcatattaggtttaccagcctgactgggtcagagtatcattctttttgagagtagtaagaaataatgatgtatataggataggatcaaattagaaggcagtggatttttaacttgttatatgtaatagtcagtgatgagcatcatactttcttaaatagcttgtgaagagcatggtaactgtgttttaggacagttagttctgcatgtagagactctcattgtgttaaattgctgcccaacttcttaactgatttcctcgcgctaattttcacttcaccctccaagctattttccagaatgattcagtccctaacttatttaaatatgtcagtatcctctaactgcctccaggataaaaattcaaattccttagcatggcacatgtctttcgtgttccagcctgactccctgggcttatacctcattatcttccccttccctactttttcttattgggtggagttttcctctggtatcagatatctaccattttctcttgtaggttttgcattactccctaggtaagatttttaaaaaggatagtggtgggggacatgagaagaaattgccgtcatgaaagtacaaatctttaaattcaaagggatgtgaaggagttttttaagatttttttgtttgttttttggtttttttttgagacagagtcttgctctgtcgcccaggctggagtgcagtggtacgatcttggctgactgtaatctcagcctcctgggttcaagcgattcttttgcctcagctcccggagtagctggaactacaggcgtccaccaccatgcctggctaatttttttgtacttttagtagagacggggtttcaccatattggccaggctggtctcaaactcctgaccttgtgatctgcccacttcggcctcctaaagtgctgggattacaggcatgagccaccgcacccggccagtttttgagattattaagaatatagtcggccgggggcacggctgacgcctgtaatcccagtactttgggaggcagaggcgggcagatcacaaggtcaggaaatcgagaccatcctggctaacacgttgaaaccccgtctctactaaaaatacaaaaaaattagcctggcgtggtggcaggcgcctgtagtcccagctactcgggaggctgaggcaggagaatggcgtgaaccctggaggcggagcttgcagtgagccgagatcgcgccactgcactccagcctgggcgacagagtgagaatccgtctcaaaaaaaaaaaaaaagaatatagtcttgtagaggagcactatttccttaaaattagagagacagtcttttgttcacatttgagaaggtgggactggaagggaaagcaagagaaaaagaaaactacacagactatagggagctggctgcagcttcctggaccccctgaaatatgtatggtttccaagtcccactcatatctcttgtggcttccagacttggattgcatggatatttgagtttttaaaaaaaatcaaatcttttaattttgtcaagaagagttattaaaacaaacaactaccatcttttttcgtgttttaattaatttttttttcctgtgcccttcctgcccagagatggtttcctgtttttagaataaaagatgcttgaccatctaaacacagaaaagacatgttctcaggggaacagtttttaaattgagtcagttaattaatatccccagcccagacctccatcctgaacttcagagttttctagctggctgcataattcacattttcactttgaaatctacctgatatcttatgtagaccatgtccaaaagagaattcttgatttctgttcttcccaccctcatggctgataaacctgcactatccgtagcctgtccttttaatttcctttttgtcacagtaattattaccttctagcatgctgtataattactcctcattatgtttattatttctttttcattttccccagcttgaatgtatgcttttggaggacaggaatctttatctgtttttttcagtcccaaatgtatcagaaagtttgggcacatggtaggcactcagtatttattgaatgaatgaatgaatgaatgattaaaatttagctttttgaaaaaactcactatgttgttctttttttaagaattaaagtttttttggtagagacagggtaataaaaaaaagttttttttttgtttttttttttaaatactcaagctggtcttgaactcttgggctcaagtgtccctcctgccttggcctcccaaagtgctgggattacagacatgagccaccactccctgcctatgttgttgttattgtttattcttttcattttattgaaaatttcaaacatcattcttgacccatgtttggaatgggaaattgcccagtgaaggagtgaggatgttaaatctatcttcctggttggaactatgaatgggtttttcatgcatttataactctacaaaataattaggtttatagtgtacttcagtatataggaggtaaaatcactcagggatctggtcatgtgtcttattttttccttgtcaggtaagtttagagttccatacagccaactttcaaattagcttttgtagcacaactcatttgtaaattcagatttaatgacactttatttatttatttttgagacagattctcactctgtcacccaggctagagtgcggtggtgctgatcttggcttgctgcaacctccgctttttgggttcaggtgattctcctgcctcagcctcccaagtagctgggactacaggtgcgcggccccaagcccggctaattttttgtgtttttagtagagggggtttcgccttgttgcccaggctggtccgaactcctgagctcaagtgatctgcctgcctcaacctcccaacctgctaggattacaggtatgagccaccctgcctggccagatttaatgaaactttattaatcacttagttttgctaattactatctttccataatgttttgaatacaacgctattgtagttaatacgttgttttgcggttatttgcttacatgtctgtttctgctactgaattgtaaatcccttgaatatagggaaaatatatttgtatccctaccatctgaaaatagtacctgcatagtattagatggttgctaattgcttgtttaatgaataaataaaaggcatggaattaggcaggttgacaattattgattgattttatccttataacctagtgatgtgtagatggcattatttctgttttatagacaaggaaactgaaatgaagtgaagtaaattattccaaagtatttgactgctaagtaacagtaccagaaagttggagatcatatgtatttttttaccaattggggatcatgtgtattttttttttccagttctttgtatttgctttacagctttcaaagcgattttatattttttgtcctccttcatccttataccagctttggtaggtaggcagagcaggtactattctcattttgcagaagaagaaagtgtctgtcagaaaagttaagtgacttccccattgttacacaactgataagtgcttgggctagttgtagatcctaggtcttttgactgctagtctaatgctgcctctactacactgcattacttaaatgcttaatgaacaagattggaggaacacataaacaacattcatagtttatatctattggcatttcagtagatattcactcacataattataggaaaaatagaaaaaaaacttgtggcatgcattaagatatttgtgaggaagtttaaatttgccttgagaacaaaaagacagtagagcactgataatgaagagtacatgcttagaagacgaaattgggaaattttttttcatgcttctaatcatcttgaatcaatagacgtatatattgcacatgaaaattaaggcctgattttccctttcagggagttgttgattggaagaaaattctcttttttccaaatgcttttggtatggtctatatagatttgtagtttctgtcttcattccatttcattcatttgctctgcataatataatactagtttagaatatagaatgcaaagacacatttatgcaacatattttataaaggcaattaggtaatatatttttttaatgtgtatatatacagaaaaattttctatctacgagtgaaacagatccatctactttgggagtttctcttcctattggtgagaggttatctgctaaggtaggtggataggagtagttattgtgggtaccagttttccgaggcatcaaaatcattaaagaacatactgctgatttaaatgcaaatggaagatcacatcatttccccacacttgaatatatttctatttcaaaaatccgtggagtcatatttatgctgtttaaaaaaattttcttgaacacaacatttgtaaccatataattttatatttctttaatatgttgattcttttgctgtattcagttatacttaactgaatattcagaattcatttttttcagcattgatttctgactataaagtttatgctatgtaacacagttattggaataagtggatgtgaaattatagtgagcttttatatagggtgagggtaagggttctttgaatgtgtgattctgacactccattaatacacgtccatattccttagagatgaaagtaataaagcactgtacacctcttgtagtgactcaggtctcaccagagtatatcagagatcatgaaatagtatataagacaaaatggacagttaataaatttcaaaagacagacctagtttctttttttttgagacgaagtatcaccccgttgcccaggctggagggcagtggcggggtcttggctcactgcaacctccacctccccagttcaagcgattctcctgcatcagcctcctgagtagctggaggcaggattacaggcccctgccaccaagccccgctaattttttgtgtttttagtagagatggtgtttcacaatgtaggccaggctggtctcgagctcctgacctcgtgatccacccgcctcagcctcccaaagtactggcattacaggcgtgagccaccgctcccagctgacctagtttctttagtacttttttagattgtgttgttttagcgacacgggagtattaaaatttaagaacattttttaatcatatatttatgttttaacagaacatttcattataatattttataatctgtgataatttttctttttaagtttaaaatataaaggatcattttttaaccttggaaagcaaatggttagcagcaggtgcttcaggggagtgggttgggcattaggagagggaggtgtccctgagaaggaaagaaggaaggtaaccccatcatatctctttggaaacatgctaatgacagatctcctggcaaacacaatcatcatatttactagtgggagagatttatctctgaatgcttttggcagaatacacctggtttgtctaggattgctgttgggaatcaaacctggaatctatggatttatgtggcatggctctttggaaaatgtcatctaagctctgttaactattggagtgtaaaatggagatgtttcatgaacgaagcaactcccttctgttagagacctcatgtattaatggaccaaagcatgtagtcatgcatattctcatgtgacaagaaagacctggggagctgtatgtgtgtcctcaaacctcttccgacttctcccatgcctttcagtgacatctgtccttgaaattattagtaaagcttgattctgggtaagagttctgatatgtatgattcagatttgacattctgataggacattgagggatttttttttcctgaagttgaattttaacattgccttttgatttttattttaaggaaaggttgaaacttgaacgtaacaaagaatacaatcagtttctcaggggtaaggaagaatccagtgaaaagttcaggcaggtggaaaagagtactgaggtaggttttgcttttgaattaaatctgtactactactaccacaggttgaatattttgtacttgaaaagctttttctattttagacattttacttttttttgtaaatacttgcaaaattaagccaaattaaaccaaacacaggacatttaaatatttagttttggaagttattttatctcatattgaagaacttttaacatttaattggggagatttaattttagagatcagttttgttaagtgattttcatttatttttaaaaatttaaatgagtttttatgatgacaattcctagctatgtttgtttttttcaaaatttaaggatcaattagccggacatggtggcaggtgcctgtaatcccaactacttgggaggctgaggcaggagaatcgcttgaacctgggaggcagaggttgcagtgagccaagattgcctcactgcactccagcctgggtgacagagcgagacctggtctgaaaaaaaaaaaaaaaaaaaaaaaaaaggatgattgatgtatctggggccaaaacatttaccactttctatatcctttgtgttgagaatttaatttgaaatattttgaagtaatatctcctgggataggaatttgcatttagtttatcctctcttttttttttttttttttttgagacggagtcttgctctgtcacccaggctggaatgcagtggcacaatgtcagctcactgcaacctccacttcctggcttcaggcgattctcctgcctcagcctctggagtagctgggattacaggtgcctgccaccacgcctggctaatttttgtatttttagtagagttggggtttcagcatgttggtcaggctggtcttgaactcctgaccttgtgatccgcctgcctcggcctcccaaagtgctgggattacaggcgtgagccaccaggccctgccacagaaaggtaaaattttcttgaaatttttttttctaaaaaaatatatgggtgattaatgttgcctaggctggtcttgaactcccaggctcaagcaatccactggcctccacctagaatttttatgtaataagcttttcataaactgcacaatttgatgggttttagaatatgtaaaccacaatcaagataacgagcgtatcctgtatcccccaaagtggttctgggaccctttggaatctgtgtgtcctcactgtcctccactcattcccatactgtctccagatcttcctgacctgacttctatcaccctagactagtttacatttgatcatttactataaatggatcatacaggatatactagttttggagatatggcttctttcactcggtatgattattttgaggttcatttgtgttgttgaatgtatggatgattcattccgttttgttgcatagtaatgttccattgcatggctgtatcagcttgtttatccattcccctgttgatggacatttgagttatttctggtttttgctattacaagtaaagctcatgtgaacattaatgtaaaaacgtatatatatataaatatatgggtgattaaataaacatcagagttgaaatgatagactaagtataaattgagggtttaattaccttataagagatagtttcttgtcaagttttgtttcttttttcttttttaattgaacagcccaagagtcagagaaataaaaaacctattggtcaagttaagcctgatctaacttcacaaatacagacatcttgtgaaaattcagagggtcctagaaaagatgtcttaactccttcagaggcatatgaagaacttctgaaccaaagacgactagaggaggacagataccgacaactagatgatgaaatcgaattaaggaatagaagaattattaaaaaagcaaatgaagaagtgggcatttccaacctaaaacatcaaaggtttgcaagcaaggctggcattccagatagaagatttcacagatttaatgaggatcgtgtttttgatagacggtatcatagaccagaccaagatcctgaagtaagtgaagaaatggatgagaggtttagatatgaaagtgattttgatagaagactttcgagagtgtatacaaatgacaggtatttacaacttcatttttattttatttgcttaatatagcaaattaattgttaatatttgctgttgttactttttatcattatactagggagaagcagttttgatttatcataattaattctaagatgctgtcagttttaagatgcatcattattttatgtcccactgaggggaaaaagaaaacactcaaggtgggggccctgttgtaaagttggaaaactgaaaggctacaccctttatgtaaaagtatgtgaattggaagtagtcattcccacagaaagggacagagaggaaatgtccacatcccaaccttggcagtgagtagagagtaaagatacaaacaaccttccttgagaatttgaagtgtaaattagtaatgattcaagttcacagtccgaattcatactgccagtagcgtccaaagaaaccttgaggcaagaattcagagttttctcaattcatagtgctcttggatgaggggaaaaataactctgcaataacttgacataaaaccaggtcattggctgttctgacttccaatattaaaatgtggccaggcatggtggctcatgcctgtaatcccagcactttgggaggccgaggcgggcggatcgcgaggtaaggaggttgagaccagcctgaccaacagggtgaaaccctgtctctactaaaaatacaaaaattagccaggcatggaggtgcgcatctgtaatcccagctactcagaaggctggggcaggagaatcacttgaacccgggaggcagaggttgcagtgagcagagatcacgccactgcgctccagcctgggcggtaaggtgagactctgtctccaaaaaaaaaaaaagtgtggctgggggttgtgcctcacgcttgtaatccctgcagtttgggaggccaaggcaggcagatcacttgaggtcaggagtttgagaccaaactgaccaacatggtgaaaccccatctctactaaaaatacaaaaattagccaggcgtggtgggacgtgcctgtaatcccagctactcgggaggctgaggcaggagaatcgcttgaacctgggaggcagaggttgcagtgagccgagattgtgccactgaactccagcctgggcgacagagcgagactctgtctcaacaacaacaataaaaataaatgaataaaataaaacgtgtgaaaaaaggataccttaaaatagatgaaatacaatttattcctgtagtcataagttttttcagtcagattttcagatggttttcagttcctttgaatgtttttgtgacactatttataatttcttaactgctacaatgaggttttattgttgtatttatcatacattgatacttgccatagtttaacctaacttgttttggagataggaatacctcagggtctcatatttgtcattgacttgtttacttgacaagtgttaatacattttgagtagcttttgggacctgctttatttgctagtccaaatagattagtttttaagtattttagaaaatgttttcggggtagtgctgtacattcaatattctaactattaattacaatacaaagcttttacagttctttgtcttctacattctgtagctgttatgtcctcacacaatatttttaatatttaccttgatttaggtaatttgaatgaaggattagaatttggaaatggcaattatagtttctctgatctgaatctaattgtttatacttcagaaaattctccaaatcctataatgttatatttgaaaatgcttatatgtaaggtaattaaaggctgactaaactaaaataattcagttggggaactgcaagtaatctttgactcttggtgataatgtctcctttgtacatgagaacttcttttccctttatggtgtttgtttacgtttagggtgaatgtaatgcatacccttttaagtttggaattttaagaaacataatggttgcttctttgtttttttttaatctattacttttataattatatcctgtgataattttatacatgaactaacaaatgaatatcattctatttgagaactctcatatcttcttatgtatcccaaaataaaatgaactccttcaatataaacttttccaaatactatttaagaatagattaaacatgaggttgagtgagaataattcttgttaaatactttaaagtgtttcttcaatatataaatcatatttttatttcgtttttatataaactctgacatctccaagtgttttttcttatgtgtctctttaacaatttaatttaaaatgggatttctttatttcagatttatagattccttatttccagcaaaaaaaaaaaaaagaccagtcattcagtagtttataaatagactggtttaggagaaatgactgtatttgtgaaaattttgagactaaagaaatgtggaactgagtttcatctcttgctccaagcatttattcttaacatactatgcaatcttgatcagaagttcttgacaaaaaataattataatgtattatgagaagtgcacagttaattttccttcattcttctaagttttctttggtcttttttttttttttcctttcctaaaagtcagcatctggtaaattctagttttggtttataataattttttatttttggtttcaatttttctctaccctataaacgtttacttttttttcatataccataattattaatgaaatatttccccatacttaaatatgggaaagctaaaacttttctcagaaaatgatgttgccttcctaaactcatatcatgaaatcactgacagcattcttaattaacaaggtggttaacactgtaattgatagttgcattctgtgtgtgtatgtgtgttgtttatttatgcatatttaccaattcaagtaaaatttatcatgttttaggagctttctaaagtagaatgtaatagcatgtcttaagatactttgaaatttataagctctatttaaatatagtaatcctagtcttatttattaacttgaactgtagaagttaatattttactttattatcttttactttaaccaatgttaatgaataaaagaagttttacttcttaatacccaaagaaaccaggtacagagtagatggggttgataatagaaaacactgctaccaaagtaaatataaaaattgggaaagaatggaaaacaaagagaaaaatgattgtccacagttaacatctcagagtgtttcattagcttctttttttttttttaaagattaacatgtgttcatttttaggataaacttggcctgtaccctatacctggtttctttgggtattacgatttttacctgatcaactagagttgttgactcttgtcttcaaggaaatagggagaaaaatatttttttcatttaaaataccttttttttttagttagtaggatggtgaaaccattttgcagttattttattccctcaatcatatctgatttgcatttcaaagttatgagttctgtccctttgtgacaaaacccaacatgttaaggtgtggtaagtgaacttatatattaaaagccatagaatatttagatagattttctatggctataccaccctggaatgtgcctgatcttgtttgatgttggaaactaagtaggcttggacctggttagtaatttggtgggagagtatttagatagattacttttgggtcacaaggatagtcttaatctggtactctcacagtgaaacataaaggggttccagggacaaactgaacctaaacagaactcctgaactttgattagaatcaaatggttcttagacatttagtgagtgcattacttttggatattatcatctgtctgttttcctttaatgttgagatgattgaatagagatgtagccgtggtaaaaccactgctgattcttactagttgctttcttcagagaggactttttttgttcagaaaaggttacaacaataaattgtaagaccataaaagctgttttaagtgaactaacagagctagttctgggtgattaaatgctaaatttattagaaatataaaggccaatttagtaaatgaaggaaatgccataaaaattgtagggatattttaatagagaataaggtggctaacttaccaaactatagtttgtcttttcagcttaatttcccttcaaggtttcttttttttaggtcttacattggtaatttaaaaaaaattataaaatctgtatttgtaaacagtaattcttccttgacttaaaaaagataaacaaatcatatgtcatttcataaaattgaatagtatccctaagattttattatctttttagtgaaatgcttatttctgctcttttttagcctcttaaacatttttcggtcttgatcttataattattggtgacagagtggacttttataatcttgttaatgatttttttcttcaatgaaaggtataccttagaacatctttcatatgtgctgctcactaggaaatcttttgattttgctgtagattttagcaaagagaccttaaccttatacataaataaaatcatttcttaaattaatttaggatgaactttgaaaatgacctcttgtgtttatggtgtttgctttactatctatatacactgaagagactgtaaaagattttttagtgtggataccttgggtgcagtggtggtataaagataagctagaattattaatctaaatattatcttcagaaaacttaactaataattaaggaagccacaagccctatgttaattttagaaaaagcttttgtatatttaactggcctttaattctgggaccccaagttatgcttttaagaatttgtaactttaaatttctatttaatttttttcttttttttttgagacagggtcttactctgttgctcaggctggagtgcagtggtacagtcttggctcactgcaacctctgccttccaggctcaaacagtcctcccactttagcctcccaagtagctgggactataggcatgagccgccgtgcccggcctctgttaaaaaaatttgtaataaagatttctttattattaaagaatatatatatatatataaataaagattatttttatatgtaatttttttttggcctagatacctctttactacaccagtgaatttactttttgtgttgtgtcatgggttctcaagaaaacctctaggttgggtgatttgctaggaggatccataaggactttgggtatagttgtagtcacagttataatttattacagcaaaatgatacaatgcaaaatcagcaaaggtaaaaggcacatggaacaaagtttgaaggaaaccaggcacaagcttccaaggggtctctcccagtggtgtcacacaggagatgcttaattcctccagcattgaattgtaacaatataaggaaatgtctgccaggaaagcgattagacacttggtgcccaaggtttttattgtgggatggttacgtaggcaccctgtacctggcatgtaccaaaattccagacttcctgaagaaaagcaaatgtttagcataaactatagtttgtgtaaacagtttaagcacagtgagctgctcttatcagttctgccagtggttgtaactctcccaaaatctatattcccaggtgccagccaagggtcaactgtacagtcaggattttctgaggataggcagtctcaggcctgctctgttaacgcttttctgcattatatataaatatccagtataattaaatctggttgcctggcagtgttaattacaaatttgaatttgagtttgtatttacctgtttgttaagtggtagaagtagggaatgacactaaactgatgtgtcattcacacatcagaatgtgtgtatgtgatctgtgatcgattaaaaaatggaagccattcatgcgttatgccatgtcatagttactaagattaaaattccaaatagtgttttctccacagatgatattgacagtggcttgtatgatggaaacaagggaagaaagaattttatatgctggttctgtggagagtgagaagtttctttttttttccggaaaattgccatttttcttaatccaataatgaaattcacctaaaatactgaatactgctttaacaaccatatttctttgtaatagtcctcttgagaaagacaatatagttgggtaactcaacagccatgtaaagaaactttgaaatgcttatgaaatgctgattttcacggatgccaataagtgttggtgtaaaaagtcatgttggttttatggtatgagaaattaagctaaaaataaaatcagtgtttgccaaatggaaaaaagattgattgaaaaacattttttcattattattttccaaaaaggtttttaaagaagaaaacagaaaacatgctaatctttctttttgttgtttatgacctcgtaagtaaagttagctaatcattttctctgtttatattttccattcacctatcagtaacatttattctttcctgtgatttacagtgttagcaaatgtcatggtttgttatattttatttaatttattgataagactgctgctgtatttttaagttaaaaaggttatgacaggtcgcggtggctcatgcttgtaatcccagcactttgggaggccaaggcgggagatcacaaggttaggagatcgagactatcctggccaacatggtgaaaccctgtctctactaaaatacaaaaaattagccaggtatggtggtgcgcgcctatagtcccagctacttgggaggctgaggcaggggaatcacttgaacccaggaggtggaggttgcagtgagccgagattgtgccactgcactccagcctggcgacacagcaagactccgtctcaaaaaaaaagaaggttatacgtacaatgaaataattcacagactctatgaattttgatttaaaaaatgttctcattttgaattttgactataatctttgtgagtgcagggactgtgtccgaatacccagtaggtgttcagttattcacttttaaattgaatgataaaaaagtgttagtatatttgtagttttaaaaataaaaatttatagcaagtacattaaaataacataatctttttagaaaagattattacgtttaaactcttagtgtctcattaaccagcagatcatacaaattctatttaattttataatgcatttatagtaaaacttcattataacactttgttccttttaatgttgccaacatcaaatgtaaaaacaccaaactgttataagaaggtccactgtatgtggcacatgctttataagctaatgtgtttttaaggatgcacaggaacaaacgagggaatatgcctcctatggaacatgatggggatgttatagaacagtcaaacataagaatttcatctgctgaaaataaaaggtacagtatgtaatataaattctctgctttagtcattacattgtgaaacagaatgtgcctaaaactggctaactgaaaaagtagaaagatacagtaaattaacagccttccttcttagtgagaagtgaattaaaggaaaagaaaggtggggaggtagtactaaatgaaaatcgatagtactttacagcattcttttaaagaacaagttttggttataaagtgtgccaaggtgttctgaagaagtccctatcattacaaagtatgtaaatttgtttgaaataataaaagaaataagtataatttaatggactaaaaatcaacttaaaatatcttagagtcatggtgatgcaacttgactggaaataaattgaaaatgtggccgggcctggtggctcatgcctgtaatcccagcattttgggaagccgatgcaggcggatcacttgaggtcaggagttcaagaccagcctggtctggccaacatggtgaaacccagtctctactgaaaatacaaaaaaaaaaaagaaaaagaaaagaaaaaattagccaggcgtggcaatccctgtaatccctggtaatccctgtaatcccagctactcgggaggctgaggcaggagaatggcgtgaacccaggaggcggagcttgcagtgagccgagatcgcaccactgcactccagtctgggcaacagagcaagactccctctcaaaaaaaaaaaaaaaaaaaaaaaattggaaatgttcctgtggtgtgaatttttctttcaaaagtttatttttgattttcagtttatcaagtagatagcttttatgcctactttgtaaaattagtgctcatatatttctgtcatgttgaaaggaaattgtatgtattttatatttatgttctctttctacttacagttttttatcattttggtggcattcctgtgtcgtacataaggataaatgattttgaatctatagtatacagtgaagataatgtcatatgtcaagaaagatgtctatttttttctaagaaaagtaatatataaacactgcttgcaataagataatttgctgttttgttctaattgattaagtttcctttgaggatttttttccccttgtttctgtcttccaagaaaggtttttttttttttttcttttttgagacagagtctcgctttgttgtccatgctggagtgcagtgacatattatagctcactgaaaccttgactttacaggctcaagtgaccctcccaccacagcctctggagtagttgggactacaggcatgtgccactatgcctggctagttttttaaaaaatttttttgtagagtcaggatctctgttgtccaggctggtcttgaactcccaaactcatggtgggattacaggcatgagccattgcgcatggccaggaaggagtgtttttagggatgatcttttctaagtatgtgcatagatcactctttcttttcctttttttttattttttatttacgtgcactttttttctttttctttttcttcttttttgagacagagtctcactctgtcacccagactggagtgcagcggcacgatctcagctcactgcaatctctgcctcctgggttcaagtgattctcctgcctcggcctcccgagtagctgggattagaggcgtgtgtcaccacgcctggctaatttttttgtatttttagtagtgatgggatttcaccatgttagccaggctggtctcgaactcctgacctcaggtaattcgcccgccttggcctcccaaaatgctgggattacaggcatgagccactgctcccggtcttacatgcacatatatatatatatatattttttttttttttttttttttttttactggggtagctgtttttttatgaaaaaggatttttttttttttttttttcgagacagagtcttgttctgtcacccgggctggagtacagtggcaggatcttggctcactgtaccctctgccttccaggttcaagtgattctcctacctctgcctcccaagtagctgggattataggcgtgtgccaccatgtccagctaatttctgtatttttagtagagatgaggttttactgtgatagccaggctggtctcaagctccagacctcaagcgatctgcctgccttggcctcccagggtgctgtaatacaggtgttagccaccacgcccagcctgaaaaagattttatttgagaacctatacagccagtgaagcaagctgaatgtttttgtttttgtttttgtttttgatatgtgtctcactcttgttgcccaggctggagcacaatgatgctatcttggctcattgcaacctctgcttcctggtttcaagtgattctcctgtgtcagcctcctgagtagctgggattacaggcctccaccactgcactcagctaatttttttgtattttttattagagacggggtttcaccatattggccaggctggtttccaactcctgacctcaggcaatccacccacgtaggcctcccaaagtgctggaattacaggtgtgagccaccatgcctggccaaattattattaattttttaagcctgaatacattggagttgcactgtataaagagatagaatgccatgattttaccttaaccttaaaaatttgtaaatattttaatgtccatagtactttgaaaggctaataattcatagctacattttactctgaaattttgcttcctgaaaattatctggattttaatttactctttttctctgtctttttttctttagtgctccagacaatgaaacatccaaatctgctaatcaagatacctgtagtccttttgcagggatgctctttggtaggcacaaaacttccaactagttgcgcttgtatagagtgtcttataatccttttttaagtgagaactcagtgttgtaattaatactatttttactaatagtagaaaatatttgtaagtgcttactttacactaggtactattctaatcatttaacatatatagctctgtataattttattttgtatttttaaaattttatgtatcttcttatttttactcatgatgttcatgaacacatctatgtataattttaaagctaaattatttagtgatgtgctttccgtaggtgataatgaaattattagtttcagtaatcttttttttttgcaaaatggattgatcattaccaatcagtaatgagcttttaattccatattttattagcactctgttgcagtgtggctgtttcttttctgcttttaaaaagtattttgttttatttatgatagttttttccttaattcttctttctagtttctttagctagtacaaaactgctgtgtattttagtttcttttctccaaattaaacctttctttcctttgttcttttcatgtagtttctgagaaggtgttttgttcaaatcgtgatgatggtctaaattttctatttattggaagtcaaggtcattgctgaatataagcttgttttgctatattacacttggcaaaatttaataccagaaactgtgaggagagacttgtttctggtttatacctttaaatatgtaatagaaaagaggtctttttgtgaaaactgttagaaaaaaatgaactgaaatttggttttagtaaagtatatgaagaaattaacactctagattcattcaacgtaaaaacagtcagtaaattaaatactggtttagagacatattattgcattatattgtcaggtttttgttcccttgtgaatggctattgtgagaaaaatggcatgccacctagaattctagtgtaatatctgtaggtgaaaattgaccagtttaatcagtaccatgtaaaggctatattctttttgttttgtttttatttatttattttattttaaatggctatattcttatgttttgttttttttttttaattttgaaattgagtttcgctctatcactgaggctggagtgcaggggcacgatcttggctcactgcaacctccacctcctgggttcaagcgattcttgtgcctcagtctcctgagtagttggaattacaggcatgtgccaccatgcctggctaatttttgtatttttagttgagacggggtttcaccatgttggccaggctggtctcaaactcctgacctcaagtgatgtgcctgccttggcctcccaaagtgctgggattataggcgtgagccactgttcccggccgatgtagtttataaaacatggtaaaataagagaaatgtctttctgagctgagagcctactgataaataattttatcaataaaaggattattgtaccctgaccttttaaagatgaatggcatgagtttatcactaatgcaatccaggatttatagatgaatatttggtaagacaatggactctaacatttgaaactgttaaagtcatttaattcaatgacttacctcctggttgatcttttccccccaaaactatgtttgtacatacctataggaaacttacgatttccagagacaggacattccatcttcagatggctgtgattgttatgatactcttatttcaattgaactgaaatttatcttcctataattttgccccaaggatgtcacttgggaccttttgctttatttaaaaagtgagatcattgatttagtttagagctaaataggaaatgtattgtggggtttataagagaaccataggtaatttagaagtatgttttaaaatttccaagcatttggggattttccttctatcttttttgttattgactgctcgtttaagcctcttatgatccaagaatataattagattaatttcagttatttcaagtttgttaatttctttgacaaagttttttttttttttttttgtttgggtggctcagaatatagtctgtcttggtgagtgtttagtatgtacttgaaagaatgtgcatggtgcagttgttgagtatagtagttgataaatgtcatttaaggttgggtgtggtggctcacacctgtaatcccagcatcttaggaggctgaagcaggaggatcacttgattgagcccaagagtttgagagcaacctgggcaacatagggagaccatgtctctacaaaaagtaaaaaataaaaaaattaactgggtgtggtggcatgcacctgtagtcctagccacttaggaggcagaagtaggaggattgcttaagcctgggaggttgaggctgcagtgagccgtgattgtgccactgtactccaacttgggtgacagagtaagaccctgtgtcaaaaaaaaaaaaaaagagttaagtcaagttggttcatcgtatgttcatgtcttgtatatccttaatgaattttatctgcttctattgattgcttagagagaagtgttgaattctctatcttgtccttcgtgtgaggcctggagtgccagagagatttttcttagtgttcctgcactttccccagttttcagcaagaccttcatgtccttgacagtgagggcatctctccctccacactttccccttctccgcagtatattgctgttgattgttacttgatgctggactggtcctgtgcatctgggcctcagggatgggtctttctcaacattactgtccttgcccaggatgatagctaaactcttctttgtgtctgaggagggttttgcatcagatttttcaccagatttttttgcccttcccctaacagtaacaagcctttgctatataagagtgtgggatactgggtccaagctgattttctgtcccttcaccaatagcttgcagcttttgctttgtatagtctgctttgaaagtctggaatgtgggccatgttttgtgcctgaatgtcacaaaagtatctctttcaggtcttctgtattgtttgatcccagtttttctagtgaacatttgaaaattgcattcaggcagcaactccagtgggtcaagtctgggcatggtttactgaacagatcctttgttaatggtctcaaaaggctataatcaaggtatccgccaggctgccttttaaccggaggcttgagtggggcagaatcttcctctaagctaattcaggttgttggcagaattcatttctttgtggctgtatgactgagggccctggcttcttactggatacccactggaggctgcccacagttcctagtggccatctgctgttcttgtcatgtgggcttcctcaccatggttactcactttatgccagcaagaagaatctctaaattcagggagggcccagtccttcttctaagggctttcacctgattatatcaggtccacctaagataatctctcttttaattacttcaaaattagttgatttggtaccttagttacatctgcaaatatttttccatccttccatattctattgtatacaagtaagttacaggtcctacccattctcaaggggagggaattatacagggattcagctgggagcagggaacatagtagccatctttaaaaaattttgcctaccattgtcgcatttctctgttactaatgttgcaatctcacacatgctccttaatgtagcagtttctcattgtccgaactagtaccccaggttctttgtcccatatccgagaaaattaagaaacatagacacaaaggtggggttggagtgaaagtttaataagtgaaagaaaaaaagctctctgcaggaaagaggggagtccaagtggatggcggggttacagctgaattaaaaagcttttgtaagaaactcttcatctctgtaggagtttgagtaacttattttatcagtaaagctgtctgtgctactcccgttatcttatacagctgtgggtacgtctttaggcaagcagaaatcggcttgtcttgtttgtataactgtgggtttgttttagataagccacccccgccccatccccatgcaagttcccaccatgaatatgcctaaactggggtggaaactttttcctgggagttcactaattagacaaagaacaaagagctctgtgctagatcctgtttgcttatctgtccaggtgcagtctgaggttttttttttttccccaggttgttttatttttgcctgttgctgtgacttttcaagcaggctgcttctgcagtctgaattttttcccaaatgatttttcctttccttctccctcactaaagaccaacttgatctaagttcagttttaagcttagctaaggacctctagagtagctttcctttcagagaatagtttagtcttactactacagagtgacctttctgacatgttccctgagagaccaccaagaacatagctggctggagcttgaattttgctcctttgtttcaggtctgagaattgttcagtttatatccttcttagtttgttgccaggccaaatggaatttcactctgtgaatgcacaaactagcacactgcaaagtctgaagggacctcctgtggatttctggagctctttttatgcttcctattggatctttgctccataacttctagccattttagccttcctgaattttgctctttatctactcaatttagctcagtttcctggccctctttgggttctctttacctctttacctgtatctgtggtctggaaatttcatttgggcagaaattgggtgattatagggctcacctcaattacaattctgcactacctattgtccagtatctggaaaacaattattttgtgtattttgcgcagttttctaatgtttctgttgttgttgttgttgttgttgtttatttgttttttaaactgtgaggttaagtcttgtgcttggttattctatcatggtcagaagtgaaatgggaatatttacttttattataaaacacagttattaaccttaatgtaatttatgttacctctacgggagcttcacttttgctgacatctatgcttaatggacaaactgagatgctgtgtgcccactgatggttggagaccaataatgaaggcagtacagaaattgctgtttcaattgcattcttgataccctgtgatttttgtagtgttccagatcttgcatatttagattaagaggttattttgtggcattaacatatgcaataataataatcttctctgcattcaaaatttttgattaactggatttttgtataaggaataccaaggtgagaggtttgtattttttcctgtagaattgagttttttgagcagagtgccagtttgattagtgtattttatgacagttaatattacatagtgtactggatctattggagcagggagaagggagttgggaagactggtaattagttaggaagttattgctgcaatccaggttagatgtagagaggacttatccaaggttaatggctctgagaatagaaaggagggggcctcatatgaagtgaatagaagaggacaagcagtccaagttatagtgagattttgaggctccagtattgggccattagtagaaaatgaagaggggcagttggttttgagatgctcgtttgcgattgaaatgttaaatttgtaagacttatggaagatattaatggaaatattatttagattgttagaaaaatggggttgggataagaacattctgttatttaggaaaatttttgactaatggtagaggcatgggcatgattactgtatcttgtgtttgacgcatagtaggtacccattaattacaaaagaaattgaagaaggactgattcatgtgatttttttccttctgtatttcttgcatattagtaattatatgatacaattaagatggagtttttaaggacttaactttctaattgcatacgatgcttaagagttaagattgtatttttctcataccactatctaggaggtgaagatcgagaacttattcagagaaggaaagagaaatacagactagaactgttggaacaaatggctgagcaacagaggaacaagagacggtaatgaaaggtttgcatttaaaagagatattttgagtttaaagtgcatttgtgtaaaatgacatggttaaataaggggttgtcgttctaatatgatgtttgatttgtaaatcacttatattttcatctctacatgctaaatcaacaaggaaaataaatactaagagagttttttttttttttttttggtcataagtagcaagtgagagtatttatatattctgtaatagcccttttacttccctcattgatttcttcagtttttgatttaaggtagcatttaatgttatagatatgcccattggattatcccatatatagtaacaaatataaaagtattttttgccatatgaaatggtatgcacacacacatacatgcaaaaaaaattgtatcctataaatttaacatttccatcccaaatgagcatctcaaaaccaactgtccctcttcattttctattaatagcccaataatggagcctcaaaatctcactatgacttggattccttgtcctctcgtattcacttcatacgaggccccctccttctttctattctcagagccattaatgttggataagtcctctctacgtctgacctggattgcagcaatagctttctaactaataactagtcttcccaactcccttctccctgctccagtagatccagcacactgtgtaatattaactgtcaaaaaatacactaatcaaactggcaccctgctcaaaaatcttcagtggcttcctcaattctacaggaatggtaaatcacaagtatttatgttgtacataggtatcattgtttgtagtctttcttgttgaaatacctatgagatattatagtttaaaattaggaatagagtttaaaattagaaattttaaatatagcttaaaattagaaattacagtggatcacgcctgtaatcccagcactttcggaggccgaggtgggtggatcacaaggtcaggagatcgagaccatcctggctaacacggtgaaaccccgtctctactaaaaatacaaaaaattagccgggcgtggtggcacatgcttgtggtcccagctattcgggaggctgaggcaggagaattgcttgaacctgggaggcggagtttgcagtgagctgagataacgccagtgcattccagcctgggcgacagggtgagactcttgactaaacaacaacaaaaacaacaacaacaaaattaggaatagagatctcgttttgagagaatttgagacctgttatctcttagtttttgccttttttccctctatctcagaggaagccaatatctactgtttgatgttagctatctttaacatcatttttaaaaaaaccctattattaggaagtatggtagatatatttaaatttttacccttctttttgctaactgaaaatatatgtgtaccctaaaagaggtttttttgttttacaaggtaaatattttatttttgtgttttattttgtgtgaattagtctttgaaatactctaggcattggcttagagatacatagtccaagttagttacatgtgaattctagtttactttgtatcaagtaaaaaaatttggctttcagtattatttaaggctgtaatgtcagttaaaggaattatttgtttttgtagatgtagtgcatagactttgtgtataagcttctttcagtgatgatttataattttgatagtttactatatctttttaatatgtaaaactttaattttgtttagagaaaaagatttagaactcagggttgcagcgtctggagcacaagaccctgagaaatcggtaagggtttctggcatcttttaatgtttaatctttcatcaaatgatcctcaaatgtggtggcaggtggggatagagaatattgggagaaaaagagagtagaccaatttgaacagtaataaaattaactaaattcagttctcataaagtgtaaattctcttaactgttatttccttgaggtaatttttcctttttcatttgtgtgtcatttttttaaagtttaaattagttctctctgctttattcacatgtactattccatgggaaagttatctgggttaaatttacaattgatgttaatatttttcttgaatacatcttgatcacttacttttcttacattggagtgatttctgagaaaactgacgactttatttttaaagcgttttagtaattgttacttattgtaacattagagagataataatcttatttttactttaattttgcaattctcatcattaagtggaatgaattactcacatcattgcagttaagtaaggaggaggtaatttattgtttttaccacaatttattttttctgtagttggttatgtaatatttatttctaatacaagtcttgtttcatctttgaatgatgattaagacctttaatttcattaaaaagctcattcttaaaaaggatgcagcaacttaaaattatttacctgtaggcaacttttgatttgcttttacttatgctgagaatatatcctgtgggttatctatttggaaaagtttcatattgcaccagcatcactcgcagtatgcttctgggttaacctgataaatcattcctgataagataaccatggtaggaaaaaaagaagataaatttcaaagctaaatatattttcctttatgaatcaaaagtttccttttaagaggtgagctttttaatgtaatatgttggcatgttaaattttgtatttatggttacactagtgtgtgacagaccttatttatctttgaattgaagctcctatacagtgtcaagttgatttatgagaataaataagtaattggaggcaacagttacgcctttacttttgggtttacttttgatgtgcaaatcttagaaaagggcacataagtgatgttctaaagtagagattagcaaagtgtggcctgtgaccaaatttgtttgctacctgttttcataaaaaaaagttttattgcagcacagccttgttcattccttgacatactgtttgtggctgctttagcaccatagctgagtctgctcattatgaagagactatgtagtcttgcaaatcttaatctatttactgtctagccctttacagaaagcatttgctgaccctgttttacagaatactataacagaaatggcaattagagaagtagcacggtgtcctagtacataaaaagaatactacaggtatatttaaaattaatatctgactctagtctttgcttaattatttactaatagtgagaccttaggtgatatattacttctcagagagcctcaattacccatttataaaataagcattagatattcagagtctggctgggcacagaagctcacacctgtaattccagcactctgggaggccgaggtggtcggatcacttgaggccaggagttcaagaccagccttgccaacgtggcgaaacccccttctctacaaaaattagctgtgcgtggtggcaggtgcctgtaaccccagctactctgaggctgaggcaggagaattgcttgaattcgggaagtggaagttgttgtgacctgagatcatgccactgcattccagcctgggcgacacagtgagactctgcctcaaaaataaataaataaataaataagatagatagatagatattcagagtcttttatagctgtaaaattctgttattcagtaaataaataaataaaaatagatattcagagtcttttatagctgtaaaattctgttattctgtgactgtcttaagtgcctgctgggataggaggtcttttgaggtcccttccacctttaaacttatgattatatgtaacaaacagattttttttctttattttagcctgatagactaaagcagtttagtgtggcaccaagacactttgaagagatgataccacctgaaagacccagaatagctttccagacacctctccctcctttatctgccccatctgtcccacccatcccatcagttcatcctgttccttctcaaaatgaagatttgcgcagtggactcagcagcgcccttggtgaaatggtgtctcccaggtgcttgtttaaatgttttgtgtttgggaattaggtaaggtattgctatattttatgtttagaaggatatactgaagcggatgacgttattcttcagagattttgtacagttaacagttttgtgaaataaattctcttgaaatttgtttttttctctgctattataaaaaaagggaaattcttaaaacattttattgtttaaagatgattttgtatctttagaatgaattactaagtacattttagtatttatttagttttgggttgtattttgggatgtttttgatatcttttaacatataaaagttgtacatttttttcaattttgttctttccacttggcaaacattgaattcttcaatttgtgcagaaaaagtttctaatgtggctcttttacacatataattttattttagcttctgtttcttcagctcattctctgtgattacttatgggctgtgtaactcaaatacctgaaataaaaagtgttgagattataaaacctgtaatttaagtattggggtaaagatttgatttctgtaggtgaaaggcatcacactataatagaatatacataaagaaaatcctgttgttaacactgatattttctgggctatactttcttctttgtagggcctgggcttattttttgttcactgttagtgtattaattataaaatatatttaaatttagaggtgtttttcttaacttttttgaacattgatattttctggactgtattatttcagtagaagttggtcttttagttactaaccaactgtggaagtgtgtttactatacttatcaggggctttgtgttttttatctgatggcttcctgactcaggaataggaggcattggaattaacagagcattttatggtggtctcagcattgaattagggattgaaatggttggctttcctatctggattttgggcaaaccacacctttgttgaacttcaattttctcatttgtaaaagtggagtagtattatatttttttcatgtttacaattacagggttgtgaggattagcttgtataaatctctatgaaattcgatttaatgatgacagctccctttcataacagttatttgacatttttgttgatgtatttttgttgtgaggatggtataaggtttagacacattgagtggctagtaaatgtgaaagatattccctactgaagagaacttccgtaccttcttagttctttggaattattttgaagtatatgacaagggagaacctgttaagatacatacaacagtgagaacattctagaatgccgccatctctttctattcatttaaaggaatttgcctttgccatttttactactgaaaaatattgcattggtagcaatacagagatatttcctaatcagtaatgaagtgctaatgtagaggtttttagaagttttaaatttatgaaatacttaaagattgtgtcaatactttactgttggtatttaagttgcttttattttactattaagaaatacactcgtttcctcagtcagactgaaccatttgtactcacactgttttgtagctctttgccttctctttctggattgtccttcctctaacacacacaagctcactccagtagcatggcttaagcgttgcctcttctggaaagccttacatgtgctttctttctctccctcatgtgatttaaatgtcccttctcctgtacctatagcaatctgcattttttgggctatattgctatttagtttaatttgcttgtactattattaattatttaatttgcttgtacttgactgtagttgtttattttcatgttactcctgagggacagggaccatgtttgtctttatttgatactggcacatagtgcctattggatattaattgattgaatattaacccaggtttttatcttacataaatgtacctgaaattgtgaaatcctatgtaatagtatttgctttttaagtcataatttttggtgaatgattggagcaagatggtgacattttctaaagtagtgataggattttcagtactgtttttgcaaaagagtaacatcttgattttttaaaaaattgcaatgaaatatgagaggaatttttcatctttcttttcatacaggattgcacctctgcctccacctcccctactaccacctttggctactaactatcgaactccttatgatgatgcatactatttttatgggtccaggaatactttcgatcccagtcttgcttattgtaagttatctatagggtaagcattttctccccgcttggctcaataaggaaaattgtttttttgtgtaaacaaaaaatatctaaatgagaaaagcacaactttgcttaattcagatgttatatattgatttaataaatgccctattttaaagcccagttatattttatagttatttccttttcatcttggtttaagaaataacgattgtgttttcttatgttgttctttgctaacttctagcccagaaggaaatattgatggttttctctatgtaacattttgattatgcacctttttctggaggaataagtaaaatattattaaatgattattctaaataaactttttttgtttttttgttttttctttaagatggttcaggaatgatgggcgtacagcctgcagcttatgttagtgctcctgtcacccaccaactagcacaacctgttgtgtaagttattagttaaaagaataattttttccccacttttattttgttaagatacacataacctaaaagccaccatcctaacattttagagtatactatttagtggtatttaatattttcataatgtgcaaccatcaccacaatccatcttcagaactcttttcatcttgtaaactgaaactctatacccattaaataataatggtgtacctcctcattcccctacctccgttctctggcaaccaccattctatgtctctgattttgactactccatgtacctcatatgaatagaatcatacaatgtttatctttttgtgactggcttatttcactttgcataatgtcctcaaggttcatccgtcttttagcatatttcagagtttctttcctttttaaggctgaattataatccattgtaattgtatacaacattttacttatctaaaatctatccatttatccattagtggacactttggattgcttccacattttggctatttgtgaataatgctgctgtgaacatgagtttacaaatatctctttgaaatcttgttttcaatttttttgggtctgtacccagagctggaattgctgggtcatatggtaattctatgtttaattttttgaagaactgccatactgttgtccacaactgctatactttttaatattctcaccagtagggcacaagggttccaatttctccacgtctttgccaatacttattttctttttcttttttttatagtaaccattctaatgagtgtaagatggtatttcattgtaggtttaatttgcatttccctaattattagtgaggttgagcatcttttcctatgcttcttggccatttgtatatcatctttggagaattgtctttccaagtactttcccatttttgaattaggttgtttgttttttgttgttgagttttcagagtcctccatatatcctggttattaattctgtatcaggtatttgatttgaaaatatttgctcccattctgtcttgatattgccttttgatgcacaaaattcttaaattttcataaagtccaatttgtctttttattattgttgcctgtgcctttggtgtcatgtctgagaaatcattgccaaatccaacatcctgaagcttttgccctatattttcttgtgagagttttataattttaggtcttatgttgagctgtttgagtcattttgagttaatttttttatggtattgcataagggtttgtcttagttattttgtatgtggatattcagttttcttagcaccatttgttggaaagactatcctttctgcattgagagatattggcattcttgttgaaaatcatttgaccaaatatacgagggtttatttttgggctatttatccttttcccttggtgtgtatgtcttcctttatcccagtaccttagtgttttgattactgttgctttgaatgttttgaaatcagaaaatgtgagtgctacagctttgttctttttcaaaattgttttggctattttggatccctggagattccatatgaattatgggatgagtttttctatttctgcaaaaaagtcattgtgattttggtagtgagtagtgagtgtattgaatctttgggtagttttgacattttaacagtgtcatgtcttctgatccatgaacataagatatatgtccatttatttatgtcttttaaaatttctttcagcaatatttcatagttttcattgtataggtataggtctttcacttctttagttaattcttaagtattttattcttttggatgctttcataaatggaattcctttcataattttcttttcaaattgttcattgttagtgtatagaaatgcagctgatttttgggtgttgatttgtatcctgttactttactgaattcatttattttaataattttgttgtagaatctaggattttctgcaaataagatgataacatctgtgaacagagataattttactttttctttctgatatgaatactttttatttatttttctttctttctttttttttttgagacagagtctcaccctgtcacccaggctggagtacaatgttgtgaacttggctcactgcaacctccgcctcctgagttcaagtgattcttctggctcagcctcctgagaaactgggattaaaggcgtgcaccactatgcccggctaagtttttgtatctttagtagagacagggtttcaccatgttggccaggctggtctcgaactcctgaccttgtgatctgcctgcctcagcctcccaaagtcctgggattacaggtgtgagccactgcgcctggccccttatttttctttcttaattactttcttaattaccctgactagagcttccagtactatgtttaatagaaatggctaaagcgggcatccctgccttgttcctgatcttagaggaaaagctttcagtctttcactgttgtgtatgatgtttgctgtaggtttttcatatatatagcttttattatgttgaggtaatttcattctattcctagtttgttgagttttaacgatgcaagtgttaaattttgtcaaatgctttttctgtattgtgatgatcatgtttttttcccctttattcttttaatgtggtatattgattgatttttttatgtttaaccataaccatccttgttttccaggaataaattccacttagtcatggtgtataatcattttaatatgctgctggatttggtttgctagtattttgttaaggagttttgcatcagtgttcatatgtgatcttgttgtagtttccttatactgtctagctttggtataagcataatgttgggcttatagaaggaattaggaagtgttccctcctcttgaactttttgaaaaagtttgaggatttatattagttcttctttaaatgtttgatagaattcaccagtgaaaccataaggtacagggcttttctttgttgggtgattattgattagagattcagtctctttagtaactagttatataggtctattcagattttctttttcttcatgatttagtcttgataggtttttatttctaggaatttgtccatctcatctaggttatccgatttgttggcatataattgttgataatattcccttacagtcctttcttatttttaaaagattaatagtgatgcccctttgtgaatttctgattatattttattatttatttatttatttatttttctgacctcattcttcccatcacagaattcctgattttaatagaagattcagagccttcttgttggtcagtgtagctaagcatttgtcaatcttgttgatcttttcaaataacaaactattggtttggttgattttttttttttctgtcgttattctagtttccatttcattgatttctgctgtaatcttttaaatttcctcccttctgcttactttgggttccgtttgctctcatttttctggtttctagagatgaaaatctagattattgatttggtatctttccctttgtttggtatgtatacttacaactataagctttcctcttagtactgttttagctacatcccttaagttttggtatgttgtcttttcactttcattgctctcaaaatattttccaatttttaaaaatttcttcatcaacctgttggttattttgaaatgtgttgtttactttccacataattgtgaatttcccaaatatccttctgttactcatgtctaatataattacattgcagtaggagaacaaactttgtatgatttcagtcagtcctttttaatttattgaggcttattttaagacctaacatggtctgtcctagagaatgttccacatgcatttgagaagaatgtgtattgtcctgttggtgagtgtattattctataagtgtctcttagatctagttggcttatagtgttatttcttttatttccttgatcttctgtgtagttgttctattattagaagtgaagtatttaatctccaactgttactttgtgtgtgtgtgttctgatatacagtcttgctctgtgtgtgtgtgtgtgtgtgtttgtgtgtgtgtgtgttctgatatacagtcttgctctgtcacccaagctggaatacagttgtgagaccatagtttgctgtagcctcaacctcctgggctcaagcaatcctcctaccccagcctcctgagcagctaggactacagccgtgtgccactgcacctgactgatttgtttattttttgtggaaacagggtctccctgtgttgcccagtgtgatcttgaactcctggcctcaagcgatcctcttgcctcagcctcccaaagtacgaggaatatagccatgagccaccacacccggactccaactattattcttgacttgtgtattattctcttcaattctgtcagtttttgtttcgtttcttaggtctctctttatatgcatatgtttataattgtgtcttactgaagatttgacccttttattagtgtcagagattcttctgtgtctctgctaacaatttttgtcataaagtgcttttagttctaatataaatgttgctgttctggttctcttttagtactgtttgcatggtgtatgatttttcgtatttactctcaatttatttgtctttgaatctaaaagatgtctctatgtagacagaatgcagttacttcctggtttttatgtttgccattttgcaatttttttctatatgtcttatgtctttttattcctctaatcctcctttattaccttctttttcttcttcgtttttttttttttttaagagatagggtctcattctctttcccaagctggagtgcagtggtgtgatcacagagctcactgcagcctcaaactcctgggctcaagcaatccttccactccaatctctcaaggagctggaactacaggcacatgccaccacgcctggctaaatatttgtattttttgtagagatagggttttgccatgtttcccaggctggtctcaaacttctggctcaagtgatcccagccccacaaagtgctgggattacgggcatgagccaccgcggccaggctcttttttttttttttaagacgcagtctcgctgttgcccaggctggagtgcagtggtgcgatctcggctcattgcaagccccaccttctgggttcatgtcattctcctgcctcagcctcccgagtagctgggactacaggcgcccgccaccacgcctggctaattttttgtatttttagtagagacggggtttcaccgcgttagccaggatggtctcgatctcctgacctcatgatccacccgccttggcctcccaaagtgctgggattacaggcatgagccaccgcacccggcctattagtttcttttatgttaaatatttaatagcattcaattttgatttttttgttgccttttgcataattttgagtttttttgtggtttccctacagattaaaattgatatcttaatttaaaataaatgagtttagattaagggcaacttaatttcaatggtacacaaaccttttctctaatataaggtcattccttttcctctacttgatgctattattgtcatacaaatcacactattatacatttaagtctctcaacacagttttataattattgccttatgcaattgtcttttatttatttataaatttattttttgagatagggtcttactctgttgcacaggttggagtgcagtggcatgatcatggctcactgcaagcttgaactcctgggctcaaacagtcttcccgccttagcctcctgagtagctgggactacaggtgcataccaccaatgctcagctaattaaaaaaattttttgttttgttttgttttggagataggatctcactctgtcacccaggctggagtgcagtggtatgatcatagctcactgcagtgtcaaactcctggatttaagggatcctcccacctcaggctcccaagtagctactactcccactacgcctagctaattttttatttttttaattttttgtagagacaggcgtctctctgtgtatcccaggctgctcatgaactcctggcctcaaaccaccttggtctcccaaagtgctgggattatagatgtgagccattgtgcccatccatagttgtcttttaagtcaaatagagaagaataaagttacaaacgtctttacatttgtaatatcttttatatttgcccatgtaattatctttactggcgttctttatttgtttgtgcttacttcagttgctgtcaagtgttctttcatttcaagctgaaggactcccttcagtgtttcttacagaacaggtctcttagtgatgacttctctgaattgtatttaataatgtcttaatttagctttcatttttgaaggataattttgatggtatggaatagtattggttggcattctttatcttttaacacaatatggtatcccctagcctttatggtttctgataagctgttaatcttactgaggatcccttgtatgtgatgaatggttattctcttgctttcaggatttctctgtctttatctttcagctgtttggctgtataagtgtggatccctttgagtttttcttacttggagtttgatgcgcttattggatctgtagattaatatttttcatctaatttgggaaatttttgcccattattttttccaatattctttgtgtccctttctctgtgtcttctcttcctgagacccccattggtacacattatggtgtttcacaggatctctgaagcttcgttcatttttcttcagtctttttctttctgttctagactgggtaatctcaattgacctgtcttcaagttcattgattgtttcttctgcctgctcgaatgtgctcttggctcccttttcttttcagttatatttttcagctctatcatttttatttggttctttttaaagtaatttctatctctttgttgttaattttatttggtaaacattgttttcacaatttaattctttttttgagatggagtttcactcttgttgcccaggctggagtgcagtggcctgatctcagctcactacaacctctgcctcccaggttcaagcgattgtcctgcctcagcctcctgagtagctgggattacaggcatgcgccaccacgcttggttaattgtgtatttttgctagagacggggttttgctatgttgctcaggctggtctccaactcctgacctcaggtgatctgcccgcctcggcctctcaaagtgctgggattacaggcgtgagccactgtgcccagccactttatttctttagatacatattttttagttctttcaacatatttctgataactgaataaaaatctttgttgattaaatacaaggcatgggattcctctgaaattttctgttgacttcttttttccccgtatgtatggcttataattctctatttctttgcaagtgtcataatttcttttttgaaaactgaacatttaggaaacataatgtggctactgtggaaattagattctcctcctccttgtggtttgttgttgttgctgttttctaagtaccctttgtaaagtctgtattctttgtcatatgtggccactgaagtctctgttaggatagcttaatagttcatgattagactgagatttctttaaaagctttgacccaataaacctcccagcctatgccaactggttctgtgtgtgtgtgctggggcatgcgttcagtaccctggcaatttacatctttgttttagctttcacatcccacttgcacagggtctcaatgccagccagaaatgagaggtgttctcagagcttcctcgggcatccatataattgcacatacatgtggctttctaaattctcaggaatatgttggagcttttcaagaccccatgggcatgttatttcccagatttttcttttaattttattgtcagtcttttgcttgccctggctggtatcactgttttagatagctatgatgttaagtaattactgctgattgttttctacaaaaccccaggatagtgagttctgagtctggtaaaatataggctctgtgaatggggcttttcctgggagctgccagacaggtcaaaagtgagatttttctagagattggatttttggggaattccagacctattctacctgtccagtggatactagattactggttttcacagcaactgtctttgggcagcgtttggattttaagtttatgatagagctaaggagaaactgaaaggtcaagggcaagttcaaatgccacaaagtttacttctcttactgaaaatcaaccttaacaaaaaaacaaaaactctcctgggattgttccaagccttccatgaatttccaaattacttagctcaagctgctataacaaaatattatagactgggtggcttaaacaacagacattttttcttggttttggagacatagaagtccaggataaaggtgtcagcagatttggttcctagtgagggcccttttcctggctttgtcattgtatcctcacatggtagagagagcaaggtctctggtctttcccccactccatttcacgcctccccattttttcttaagtacatttaatctcatcacgaggactgtaccctcctgatctcatctaaacctaattacctctcatagtccccagctccaaataccatcagaatagtacgcagggctttgatgtaagaacacaattcagtacatggcaccagaattattaaaaagttggttttgacaattttgactcgtgttctcattgctttaacggagtagcaggttttcttaaagttcttattctgccattctagaagtgctttctataaatcagctttagaacattttcatccctccaataagatccttcatgcccatttatagttaatcctaattcccatcctcagtatagttgtttttaagttcttctctgttaaatttttctgaaggccacattaaaaagtgtaaacttgttataaaagttagataactgagtgaccagctgaattatcttacaaaccaatgactttcaaatatttgtttgtttccaagcattttagcatgagaggtggaaggaacctgtgactctgttaactattttgatgtacgcacaatctgtcttctttccattgactttattaatttagcatgctttaatctttgtatcatttgagaggatggtaaagattttgattagctttagtctttcataaggatgggtgtgttattatatttctagggtaaccactaaaagtatagtaacaaaaggtaccacttactacagtaatagaggaaaaaattcaaaaaagaacaaccaaaatagaattgggaaattgttttattaactgtctgatctttttcagctttggtgatggaataagttaagaatttgttggccgggtgcagtggctcactcttgtaatcccagcactttgggaggccgaggcgggtgaatcacctgaggtcaggagttcaagatcagcctggtcaacatggtgaaaccccatctctactaaaaatacaaaaattagctgggcgtggtggcacatgcctgtagttctagctactcgggaggctgagacaggagaatcacttgaacctgaaaggcagaggttgcagtgagccaagatcacgccactgaactccagcttgggcgactagagtgagactccatctcaaaaaaaaaaaaaaaagcttcttggccgggttcagtcttaaacaggctaatacagagtgtggaatgaaggaatactctccggttactattatgagactttcataatcttgatacttaaacctaataagaccagtatgaaatggaaaattacaagctagttacactcattagcacagacacaaggatcctaaaactgaacctcaaagtatagagaaaggattattgatctggaattagaattactctcgaatataggatgattaaatttagtagagtatatcagttaagagcatggactttgtagcctgattgccttggtttgaatcctgcttttaccattcattagcttgaggtgtatttcttacttctattccttgtccgttaattggggtaataatggtatcacctcacagggtttttctgatgattgaatggttaaaatatgtaaagtgtttaggatagtgtctgaatactggagcctattggtgttagatataatcaatatgattataaaataaactactgtaatctaccatgttaacagaataaagaagaaagctatatgatatcccaatagacaaaggaaaagcattaaaataattgcattagtgattaaaaatgtaataaaataggttagaagggagcctataaacatgaaaaacttacatcatgtattttatttaatgatgatagatttaaaatattccttttgagattctatcattgcttcctttcacagggcttaatttcagcaaggccaaaaataagagaaagaaaggaaggaaggtacaaggattagaaaggaagagagaaaactgatgttatttgcaaaataatatatggttaaaatattggaattaatatgaaagttttcacagaattactgattacaaaatcaatatacaaaaagcagttgcaggaaatggcagttccttaaaaagaatatgatactgcaattccattcctaagcatgtaatcaaaagaaataaaaataacatgtagatgcaaagacttggatgtgaatgtttatagctgcattattgataatagtcaaaaagtggaaacaattcaagtgtccatcagtgagtgaatggataaacaaaatgtgttatattcatgcgatgaagtactactcagcaataaaaagtaatgaactactgatatgatataatatggatgaaccttataaatgttatgctaaatgaatctatacatactatattggtcccatttatataaaatgtccaggaagtacaaatctatagagacagcaggctacttacttaataattacctggggctgagggttgagtagggattgattgcatatggctatgaaggatatttttgggttataaaaatgttctaaaactggttatggtgatgatcgcacaactctataaatttactaaagatcatttaattgtatacagttgacactcgataacacaggtttaaactgtatgagtccacctacatgtggatttttttcagccaacttcaatagaaagtacaatatttgtgggatgtgaaacccatgtatgtggagggcctacttttcttatgtgggagttccatggggctcactttgggacttgagtatactctgattttggtataggcagagagtcctggaaacaatccctcagatataccacgggatgactatacttaataccccaattatttcctccctttcatcctgatctgactacataaatccttaaaccccctttttgggggagtcagggaggagttgataggtaaaggttaagaatttgggtctgtgagtatgtgggcaatatagacgggagggatcatgagtgaaatagatattgagagaacctgtccaccatatgatttataaacagtgtattttgagagaatgagtttattcacatagaccctctcaaccttctttattcatttacacaaagagcccccttgctctgaaaaaatacagtcagttaggaactatttgatctagtttacctcatcttcccttttagccactcataatccaatgtgacagtatacacaaacatacttgtttatcctaataaaagattgtaaataagttagaaaaggtaaatacacaatggaactcattttttaaagcagtgatatttttggagaagagaaagcttttttaaaattataaaatcaggctgggcgcagtggctcatgcttataatcccagcactttgggaggccgaggtgggtggatcacttgaggccaggagttagagaccagcctggccaacatggtgaaaccctgtctctactaaaaatacgaaaattagccgggcgtggtggcgggtgcttgtagtaccagttactcgggaggctgaggcaggagaatcgcttaaacccgggaggcggatgttgcagtgagcggagatggcaccatcgcacttcagcctgggcgacaagagtgaaactccgtctcaaaacaaaagaaaacaaaaaattataaaatcagtatttgaatttatcttttataatttagatttctaaaatgttttactgtcttcaaagtcagtatattcctgtacttaaacatgtgttatgttggctgggtgcagtgactcacgcctgtaatcccagcactttgggaggctaaggcaggaagatcacttgagcttagaagttcaagaccagcctgggcaacgtagaaagacttcgtctctaaaaaaagtgagccatgcatggtgatgtgcacctatacccccagctatttgaaaggctgaggtggaaggatcgcttgattccaggagatcaaggctgcagtcagctatgatggcgccactgcactccagcctgggtgacgaagtaggaccctgtcccaaaaaaaaccaaaaaaacagcactttattgcttgtgatttatgtaacaacaatatgtttaacattttttcttttatgtttccttgtgaatttttcaaaaatattaattttatttgagacagtcagactttttcctgtaattacattgttttattcttgaaatagctaagaagtaattttattagtaaatcatttaaaaataaatcattagttattgtgttacttgagggactttggctgtgttattatttctgtttgttcaggaagccgcctaagtcatatgtgtactgttcaatgaattaccacaaacttttttcactcctgtgtaactatcacctagcttaagaaatagatacagtgaatttgaaagttgcaaggattgtcaaagcaaaggcaggaaggagctaaggaaggggtcacttaaggattcctctttggcctatagagaaatatccttctgtatttttaaatgtatttatatgccatgctatttcaaaaaactgttgtattttcttcttgctttgtcgtcaatggatttaaattatttattgtgtatttgatgtaggaatacggttggacagaatgaactgaagattacaagtgatcaagtgataaattcaggattgatttttgaagataaaccgaaaccttccaaacagtcacttcagtcttaccaagaggctttgcagcagcaggtattgattcatttactcatttactgttgaacctcttaagtgtaagcatggtggtcccttagagctcagagtgtggccggggaggggaaaaaaaacagttaattataattcaaaatgctgagttttgaagtggatacagtaaaacgctgttggaagcataagatagggaaaataattgcctggggcagttgggagagcttcacacagtagttgatatttaagctgcatgttgtgcaatgactacgttacaagttgctggtgtatacagagaatggaattggggtggaagaaggggctggagagttagttaggttgttctagcagattgtgaaggactagctaataaggggttttcagtttcatctggttatgggcagctgaaggaaggaaattttaggccaagaaaagtatgaaaggattgtttgctttaagcagatttatattttatgaagataattggttgtgatttggacaattgggaagagattggcagagaaattatttagtagatagtccagtaaggaggtgatgaggccctgaaccagatggggacgttggggaagacatctaagagacaattctcaggtttcattgacaggactcagatatagggaatgagaacagagggtttgaagatgattcctaggagaataatgaggctataaaccaaaatggggaatacaggtagtagttcatgtttacagaggaggataatgggttctttcgtagtttgtaatatttgcagagaatttaagagtaactatcaaatgtatggggttctttgtgggaattcccttaccatctgagaggaccctgggactctaacttacttacttttctatagaattacacttggatttcttttaaaagtacttttgttcaacttttacatgggcaactttcttgaaagatagatttttaaaattacagaattaccaaccttttttgtatgttaggattctacaaataaaagactgaattttaaattcagaatctgtttttgcatgagcatattaaaaacaccactgacaaaactagatttttcaactctagaggtctatttgatgtgtgtgatgacttctttggctatgctggagcaaaaggttgcttaaatttactgtgcatatggttatgagtttaaaagtgactttccaaaatgtagacacttgtttattgcctatctgtatgtctctacagaacaaccctgcgcttatacttagtgatgataagaatgcatttgttttttgtgcttaatacagctttacagaagtattgcaggtttagttccagaccacagcaataaagcaaatatcacaatgaaatgattcacatgaattttttggtttcccagtgcatgcagagttatctttacactatactgtggtctattaaggtgcaacatgtcttaaacaagctacgtaaacttaatttaaaaatactgtattgctaaaaaaatttagcaaatcataatccttttgctggtggaaagtcttgcctcaatgttgatggctgctgactgatcagggtggcagttgctgaagattgggtggctgtggcaatttcttaaaatgagacaacagtgaaatttgctgcatcaattgactcctccattcatgagagatttctctgtaggatacgatgctgtttgataccattttatccacagtagaccttctttcaaagtttggagtcctctcaaaaccctgctgatgctttatcaacttagtttatataatgttctaaatctttgttgtcatctcaacagtgttcacaacatctttaccaagagtagactccatctcaagagaccactttctttgctcattcataagaagcaactcctcatccattaaaattttatcatgagattgcagcagttctctcaagtcttccatgcctcacttctaattccagttctcttgctatttcttccacatctgcagtttcttctaccactgaagtcttgaatccctcgaagtcatccatgaatcatccattagggtcaacttctttcaaacttctgatactgttgatattttgacttccttccatgactcacaaatgttcttgatggcatctggaatggtaaactctctccagagggctttcagtttagatttcccagatccatcagaggaattactctctgtggcaactatagctttatgaaacgtatttcctgaacagtaagaattcagtgtcaaaattactccatgagttaatgggctaaagaatggatattgtattagcaagcatgacaacaacattaaccttcttgtatatctagctcttggttgaccaggtgcgttgtcaatgagcagtaatattttgaaaggaatctcttttttttagtagtaggtctcaacagtggacttaaaatactcagtaaaccattcttgaaacagttgtgcagcaatacaggctttgttgtttcctttctagagcacaggtagagtagatttagcatcatctttttttttttttttttttttttttaaagacggagtctcacactgtcacccatgctggagtgcagtggtgcgatcttagctcactgcaagctccgcctcctgggttcatgccattctcctgcctcagcttcccgaatagctgggactataggcgcctgccaccatgcccggctaatttttattttgtattttcagtagagacggggtttcaccatgttagccaggatggtctcgatctcctgacctcgtgatccacctgcctcggcctcccagagtgctgggattacagttgtgagccaccgtgcccggctgatttagcatcattcttaagggccctaaggttttcagaatggtatattagcattggcttcaacttaaagtcaccagctgcattagcttctaatgagagagtcagcctgtcctttgaagcttgaaaccagacattgacttctctttactagctatgaaagtcttcttttaatacaaggctgttttgtctccattgaatatctgttgtttagtggaaccaccttcatcagttatctgatctagactttctgggtgacttgttgcagcttcttcatcagcatttgctgcctcatgttgtacttttttatttttatttttattttgagacaaagtcgcactctgttgcccagcctaggctggagtacagtggcacgatctcggctcactgcaacctccacctcagcctcccgagtagctgagactacaggtgcccactaccacgcccagctaatttttattttttatttttttttgtatttttagtagaggtggggtttcaccatgttggtcagggtggtcttgaactcctgatctcaagtgatccgcccaccttggcctcccaaagttttgggattacaggtgtgagcccagcccatgttgtacttttatgttatagagatggcagctttccctcaacttcatgaaccaacctctgctaacttgcaagttttcttctgcagcttcctcacttctctcagccttcatagaattgaagaaagttagggccttgctctggtttaggctttggcttaagggaatgctgggctggtttgatcttctatttagaccactaaaactttctctataacagcaataaggctgtttcactttcttatcattcatatgtttactggagtggcacttttaattttcttcaagaatttttcctgtgcatttacaactgggcaaagtgtttatttaacataagaggcctagctttcagcctgtctatgcatttgacaagcctttcccactaagcatagtcatttctagcttttgatttaaagtgagagatgtgactctttcattcactcaaacacttacatgccattgtagggttattatttggcctaatttcagtattctatcagggaaaagagagacccaaagagagggaaagagacaggggaacggctgattggtagaatagtcagaatacatatgacatttatccattaaatttgccatcttatgtgtgtgtgattcatggcgccccaaaacaattataatagtaacactaaagatcagcaatcacagatcaccataacagatataataataatttaaaaagtttgaaatattgtgagaattaccaaaatgtgacacagagacatgaaattagcccatgccattggaaaaatggtactgatagacttcctcaatgcagagttgccacaaaccttcgatttgtaaaaaatgcaatatctgtggccaggcgtggtggctcacgcctgtaatcccagcactttgggaggccaaggtgggtggatcagaggtcaggagattgagaccatcctggctaatgcggtgaaaccccgtctctactaaaaatacaaaaaataactgggcgtggtggcaggctcctgtagtcccagctactctggaggctggggcaggagaatggcgtgaacccgggaggcggagcttgcagtgagctgagatcacgccactgcactccagcttgggtgacagagcgagactccgtctcaaaaaaaaaaaaaaaaaaaaaaaaaaatgcaatgtccgcaaagcacaataaaattcagcacaataaaatgaggtatgcctgtatttaaagttgccaagcattccccagagagagttgatcctccgacctctgaattctgggaatagagtttgcctagggaaagtaggtctggtaaggttgagggtagactttgtggctgggcattccccttgaaaggatagatgaaaaaggaacgtagggagatctgatggtcccatggaactggcagggttagagagggaatggctcaggtagacactaggggagggaaggaggagttggttgagtctgaagtaccttagtggctagaaagtcatttggtgtatatagaggaacaggggctatgtattctagccattgaattatttttatttttaatgttattatttaaagacagtgtcttgcataatgttgcccaagctgaagtacagtggcatgatcttggctgactacaaactccacctcctgggttcaagtgattcttgtgcctcagacacccaagtagctgggattacacatgtgcgcaaccacacccagctaatttttgtatttttagtagagatggggttttgcatgttggccaggctggtcttgaactcttgaccttaagtgatctgcccaccttggcctccataggcatgagccacgacacctgacctaaagtatttttacattgagtattacatatatttgtgattttaacctttgtaggggggtacactggggaaaaaaaaaaaagcaaatttttttgcttgttttctaatacaaaaaataacatctggtattactaacttcttgtatcagaatacttgtcagcgtttattttaaatatatcttatgttgtcaagattcgggaaagagaagaaagaaggaagaaagaacgtgaagaaaaagaagaatatgaagctaaattagaagctgaaatgagaacatataatccctggggaaaaggtggaggtggtgctcctctcagggatgcaaaaggaaatctgataagtacgttatttctactgacttgtttttaaaataagctaaattatttttaactttttaaaagattggggagtagaaaaaagtaggaatcatagcctctatagcaacgcatgtatgtaacttaatgcatatgaggtattttaagagtaaatataataacagaggctagaaagcatttcttcttcagaatactatccatttgtttttattataaatatttcatcctccgatgttgataacccagttgcagagaaaagctcatgttagttgataagtttttactgaaactggtacttagaatattttgttccctcataaaaatgataaaacccatattacaatttaaaaaaaataaactagtaagatgtcttagaaataaaggatgtaaaacagttttgggaggggattttgtgtttaatttatctatgcaatatacctgctaattgcaagaattcctttgggaaaaagaagacatgatcatagaaactttctagcaagtttcataatttgttgatttatctttcaattatgtactctcaaaaatgtttgatctagtaatcacacaacaaatacttcgaaagagtggctttatacaacttgttatatacagttgtctgttggtaaccatgggacattggttccatgatctcctgtgaatacccaaatccatggatgctcaagttcctgatataaaattggtaaagtgttcgcatataacctacacacatcttcctgtatactttaagtcatctctagattacttgtaatacctaatacagtgaaaatgctatgtaaatagttgtaatcttgtattaattagggaacaatgacaagaaaaaaagacttttcacatgttcagtgcagatgcaagcatccatttttttttgttttttaatgtttttgaattgtggttgattgaatccacagatgtggaacccgcagttacaaagggctgttgtatatattaggatggtctttgtttagcgtttagttaagcagaataaaagtagatcaaagatacacacttcatgttctttaggtgttatgtattgtaggaatagatgagtgatagaatcggaagattggatgttgagttagaattctcgtgtgttgcaaaaattttctcccattctgtaggttgcctgttcactctgatggtagtttcttttgccatgcagaagctctttagtttaattagatcccatttgtcaattttggcttttgttgccattgcttttggtgttttagacatgaagtccttgcccatgcctatgtcctgaatggtattgcctaggttttcttctagggtttttatggttttagatctaacatttaagtctttaatccatcttgaattaatttttgtttaaggtgtaaggaaggtatccagtttcagctttctgcatatggctagccagttttcccagcaccatttattaaatagggaatcctttccccatttcttatttttgtcaggtttgtcaaagatcagatagttgtagatgtgcggcattaccagaatctacaatgaactcaaacaaatttagaagaaaaaaacaaccccatcaaaaagtaggcaaaggatatgaacagacacttctcaaacgaagacatttatgcaaccaacagacacatgaaaaaatgctcatcatcactggccatcagagaaatgcaaatcaaaaccacaatgagataccatctcacaccagttagaatggcgatcattaaaaagtcaggaaacaacaggtgctggagaggatgtggagaaataggaacacttttacactgttggtgggactgtaaactagttcaaccattgtggaagtcagtgtggcgattcctcagggatctagaactagaaataccatttgacccagccatcccattactgggtatatacccaaaggattataaaacatgctgctataaagacacatgcacatgtatgtttattgcagcactgttcacaatagcaaagacttggaaccaagccaaatgtccaacaatgatagactggattaagaaaatgtggcacatatacaccatggaatactatgcagccataaaaaaggctgagttcatgtcctttgcagggacatggatgaagctggaaaccatcattctcagcaaactattgcaaggacaaaaaaccaaacaccgcatgttctcactcataggtgggaattgaacaatgagaacacatggacacaggaaggggaacatcacacaccggggcctgttgtggggtgaggggagcggggagggatagcactaggagaaatacctaatgttaaatgatgagttaatgggtgcagcacaccaacatggcacatgtatacatatgcaacaaacctgcacgttgtgcacacgtaccctaaaatttaaagtatagtaataaaagaattcttatgtattatgcctttgcttgttaaatattggtttttttgaagatatatttgaggcccactttaatttattttaatttaattaattaattttttcgagacagagtttcactctgtcacccaggctggagtgcaatggcaccatcttggctcactgcaacctctgcctccaggttcaagcaattctcctgcctcagcctcccaagtaactgggatttataggcatgcaccaccacacccggctaatttttgtatttttattagagacggggtttcaccatgttggtcaggctggtctcaaactcctgacctcaggtgtcccacccacctcagcctcccaaagtgctgggattacaggtgtgagccactgtgcccagcctactttaattttaatagctctttttttcttcccaaaagatttgttcctttcctatcttcacctcatgaataattttctcacagttttgaaagagtgaaactcttattactttctttatcaatgaaatgattttagatgatgcctagctaacatttcttattttaataggtaagtgtttacttgaaaatatattagaaaaacactagttttccatttatgaatagtgctataatattttcttttaaactacaggtattaaagtgaaggcattagtccaggcatttaatggaaagtgctgtaataataaacaaacccaaattcttagaagcttaaggcctctcttgttaggcatccacttttgtcccactctgatgctgctgtttgggtggttctcctccaagaagtgactcagggatccattgtttcattccttcattttagagtccttttcttcttgtccagggacaaattgaggattttgttggggcctggcctggatgtggaggaagatcatttttgccttcattccattgttcagacctagttataggttctaacctaactgcttgggaggctgggaagtttaactttctttatgctcagaagaaggacatgggattaatagccatatgggcaatctttgctacagtaaatttaaattataaattgatagaagttaactagttaccatgaaaaatgtgcttaactgagtgaaacattggaaaacattgggatagagcagttttctaaaatcttacctctaagattatttctagttcaaacaatacaattattgtgttctgtatgcctttaattggtggaagtgagtaggataaatttgggttattgagttataaaacattattttagaattgcttgacctaatgagcatggagaaaatgtttccacattattttagaattgcgtgacctaatgagcatggagaaaatgcttcttagatttcaatttttaatagtaatgtttagttggcttatttaatgccgtcttcatgccatgaaatagaaaaggcatactattttatcaaatacagtataactcttttaatgatattttcaagcaagtaaactcatgacttaaagagtatcagtttattttgtatgtggatgctacattttatctttatttttattttttgagatggagtttcgctcttttgcccaggccggagtgcaatgatgcaatctcagttcactgcaacctctgcctcccgggttcaagcagttctcctgcctcagccttctgagtagctgggattacaggcatgtgccaccacgcccccctaattttgtgtatttagtaaagatggggtttcaccatgttggtggtcttgaactcctgacctgaggtgatccatccacctcggcctcccaaagtgctaggattacagacatgagcgactgcacccagtgtagctactacattttagagaaggcgggaacattacatttgaaatatgtagtatagagcagtgtgatgactaagaccacataacgtctgttcattatcttggctaactttaattctgctgctgacttttctaattactcctgttctttttttgatcttttattccaaagaaattaataaaattgaatcttaacactgcacccttatcttacctaagaagatctcattataaggcatagtagttactaatgaaatataaaaatgtgttattcatgcaactttaaagtatcaccccttttaaagtaaatatttctcattttaattatttgtacagtattttattctgttgtctttctcagttctttatttattaaagttctttattcaggtttttatttgaaactttacatgaaactgtccatgtcaaatgttaaaacgtatacaccaaaagaaaaatgtcaataaaaataaattaaaagataaaattaaaaaccactttgaaaaatggtatctcatagttccaattgattaacaggatgattagttagtcagttctcttacttactcgtccacccatgccaatctgtgatctcgtttctggcatgaaaatattgccttttttctgacatttgtgttttagcatagtgtttctgagattcatccatgttgttacatatgtcagtagcttattttttttattactgaatagtattacattttctgaaggtatcacagttgtttatccatttaccagttgatagatatttgggctgtttacagttcaaggctattataaataaagctgttagaaacattcacttacagatctttgtgtgaacataaatttttatttcttttgggtaagtgcctaggaatagaattgctgggttgaatagtaagtgtttaactttgtaagaaactgccagaacattctccaattttgttttgtcattttgcattcctatcagaaaagtatgaggtttctagttgctctgaattttcatcagcacttgaaattatgcatctttaaacttttagttattttattgaaagtgcagtgatacctcatttaaaaaaagctttttctattgtgaaattaagacctaaaagagttgcaaagatggtgtagagagtatccttcaccttgtttcccctgacgttaacgtcttagataatcatggcacaatgatcaaaattagaaattaacctagatacagtgccgataattaagttacataccttgttcgaattttaccagttttttttttcttttcctaatgtccttattgtattttaggctctggtccaggatcctataatgcatttagttcatgtctctttagtctcctccaatctgtgaaattcctctttctcagtctttctgtctctctctgttccattgctctatatttctatccttttgcccgtatcagagtctcttgattactatagctttgtagtaagttttgaaattgaaaagtttgagtcctccagctttgttcttttttttcaagatcttttgacaactcaacttcttcgcatattttactatcactatagtaatgtagtaatattattatttagtaataagttatagtaagtaaataatgttatagtaagtaattattactattactattactttgtcatgtcaagcatggtggcattttcattgggattccattaactttatagataatattgaaacagccagcatcttaataatattgagcctcttgatccatgagtgggcagtgtatatccatttattgcttctagttaatttctctcagcaatattttgtagtttttggtggcagatcttgtgtatattttgttaattgtttccctaaatatttcatgtggtttgaagctattttaaaatgttacattaaaaaatttttaattcatttgttcattgatggtctatagaaatacaggtaaattttttatattgtctgtagtctgtgtgcttgctactgtctgtagtctgtgtggttgctaaactcacttgttagttttagtagtttttttgtagattctttgatttttaatgtaggcaatcatagcatctgtcagtagagttagttttacttatttctttccaatctgatgccttctatttattttaattgccttttacactgtttaagaactccagtacagtgttaagaattcatgagcgcagacatccttgtcttgtctctgatttcagatggaaagcaatctttcaccattaagttagctgtaggcttttagttgatttttcttttatcccattgaggatgttctattccttgtttgcttagaggtttcattgtgagtgtatgttgaattttgtcaggtgcttttctgcatctattgagatgataatgtggtttctttacccttctgacctatggtaaattacattgattgatttttgaatattcagccaatcttgcattcctgggaaaaaccaagctgtattattgtcttttatacgtgttgtagaatttgatttgctagtattttgttagagatttttgcatctaggctcataagatattctggttttttatttctttataatgttgtctggttttggtgtcagggtaattctggcctgataacatgaattgggaaatgttttttcttttgttttttgagacagagtcttgctctgtcgcagaagctggagtacagtgacataatcacggctcactgtagcctcgacctcctaggccgaagcaattctgccacctcaactttctgagtagctgggactacagtcatgtaccaccatacctggctaattttttttattttttgtagaaacagggtctcactatgtttatgttgcctaggctggtctcgaactcctgagctcaagtgatcctcccaccttggcctcccaaagtgctgggaatacataggtgtgagccacatcgcctagctgggaaatgttttttctgtgtttagaattcaccagtgaaggctgggtgtggcggctcacgcctgtaatcccagcacattgggaggctgaggcaggtggatcacaaggtcaagagatcgagaccattttagccaacatggtgaaaccctatctctactaaaaaaaaaaaaaaaaaattagctgtgtgtggtggtgtgctcctgtggtcccagctactcaggaagctgagacaggagaatcatttgaacccaggaggtggaggttgcagtgagccaagattgcgtcactgccagagcgggactccatctcaaaaaaaaaaaaaaaaagcattcaccagtgaagccatctgggtggggaatcttctttttgggaaagttttaaactatgacttcactttatttaatagataaagagacattcagtttatttcttatgtgagctttggttatttgaatcattcaaggaaattattcattttatttatttatttattggcataatgttgttcataatatttcttttttattctaatgtttgtaggatctgtggtgatggcttctcattcattcctgatatttgtaatttgtatattttcttaatctgtctggctggatgtttatcaactttatggatcttttcatagaatcagctttagttttcattgattttttttctctgcttttcttcttgtttcagtgattttgctcttatctttactatttgcttcctttagtttgctttgtgcttacttttctcccttttctaatttctttcttttttttttgtttttgttttgagacagagtctctctgtgtcgcccaggttggagtgcagtggcacaatctcggctcactgcaacctccgcctcccgggttcaagtgattctcctgcctcagccttccaagtatctgggactgactacaggcacacaccaccacacctggctaatttttgtatttttagtagagacggggtttcaccatactggccaggctggtctcgaactcctgaggtgatctgcccacctcagcctccgaaagtgctgggattacaggcatgagccaccgtgcccagcccccttttctaattttttaatgtcgatgcttagactatgatttgagaccttacttattttctgtgcatttaagtgtgctacacatttccctctgagtactgttttagctgtacatcacaaatttttatgtgttgttttaattttcattcagttttctgattttcattgtgacttttctttgacccccattagttatttggaagtggacttaaaaattttccaagtatcaggggattttcctgagagctttcttttattcaattctagtttgtattctgttttgtaagagaatatacttttcttttttttttttttttttgagacaaggtctcactctgtcacccaggctgtaatgcaatggcacggtcatgcctcactgcagtctcaacctccctggctaaagtgatcttcccgcctcagctcccccaagtagcaaggactacagacacatgctaccatgcccagctaattacaaaattttttttagagacagggtctcacttttttgcccagctggtctcaaactcctggcctcaaatgatcctcccacctcagcctcccgaagtgttgagattacaggcatgagccactgcgcccagctggagagaatatacttttaatgacttcagtgtttttaagtttgtgagatttgttttatgagccatcagttagaattttactctataagtaagtgtatatattttaaattaggttaattttgatatatgtattgttagtagtgctagggttgggaattttgcttagctctctgaattaggtcattataaaagagtttctgtgtcagccatgaattgctgaataatcctgggtttatagtaacatttaacatatctcagcccttcacaaaatatattttgatatgtattttccaccaaagtataaagagtagcagctaacttgtgaagttaattaaaattaatttttttataatgagctaattcactcagtgaggagcacgtaagtgctcctaattttatattgaatgttatgatgatttacatttaaaataaagtcctatctttgcagttgacaaattacactcttgaccaaagtgccttttttaattttcgttttttagctgatttcaaatcatttattttaccatctcacagaaagacagaaaaggagtggccagttgccaaatcatttttcccaataaaaagcaatatggatttggtttgcttgctaaatctgatagtcttaaatcttaataattatgtactctgatgaaattaattttctcttaatataaatatgttgaatattattccagttgagaagtccatatataatcaacaataaattataatgtgttatcgaagtttgcttacatatagggtatctcctaatgtatggtttgtgcaggtgactatcaaactaagattgcattccctaagcactcactagtttggcaacacagctgtagattatttcaagaatatctatctgccttgccagtccttggcacttgggaattttcttgcagtcacctttttctgtggtttcacccagtcccttctctttgcattttttctatttatttcttctttctacctctgaacatgcttaggtcacttgtattaaaacacagacaaatgcttcctttaccatataaaacacattcaaaaagtagtccatgcttgttgctgtcacttcttaccaccctcttattggctatttttccatagtataacatctagcttgtacccccgcgccccaccaccccatgccacattgtcaacaaaaagcctgatgacctaatttcaatttaatgatttttactcatcttttatcttctttgaactggcttgacagttcctttttttctctaagtcctttgtatcctccgagatgctgtccagacttcagctaatattttttggatgtgcattatgaactagagttagactctgctaggtttgtgagcatgatctttcttctaaggactgtcatctgaccttgtgtgtttctcatcccttcatccattctcttccatgtcatctcttttactcctgtgttactctttaggtcttccctacagattgatctttaaatctttttctttgccctcaaccatttttatttttattttttttgagacagtctcactctgtcacccagcctgaagtgcagtggtgtaattttgactcactgcaacctgcacccccccggcttaagtgatcctcccacctcagccccccaagtagctgggactacaggtacatgccatcatgcccagctaatttttgtattttcagtagaaatgggatttcaccatgttgcccaggatggtcttaaactcctgagctcaagtaatccaccctctttggcctcccaaagtgctgggattataggtgtgagccaccacgcccggccagactaatatattaatcccacttctgtaacaaccacaactgcctccattaccttctacagaacaaaattgagagccattgacatgtgttttaggatattgaagaataggtatccattctatggtttccagtcttatttgccattgctctattacatgtgctttatgctctagtctagctggactactttaatgttgccagaacactcatcatgctttacccacttggagtgctttctcacattgttctatttctctattatgctttcctacttatcttcatctgtgaagctcctatacattttccaagtccaagctgccctaaatattgtaacagaatgtgaaccttcctgattctgaactcccattctcttttgtagcatttatgtattacttgccatgttctatctggaattctaattgtgattcatgttcaaaatacattcttgaacataacaggcttcctgataaatacttcttatatccaggtttaagttcactttcagtgctgccatactgttgcagttttttggtttgtttgttttatggaaaacaggtactttttattttattaaagctttaagttctgtaatcattcagttctgtttttgagattggttgtttgacccaattctaggtgctcagatttttgctgtgtgtattagatatctattctatgtaatgaattaacccaaaacttggtgttttagcatgataaacagttattatcttgcggttctgagggttagaaatttgtgagtggtttagttgggtggttctgtctcaggctccctcataatgttggagtccaagatgttgaccatggcagtagtcatctgaggcttgatggggactgtaagattcattttcaatatggctccctcacatggctcaggaggccttagttccttgtcatatgggcctctccatagggctcccttagtgtccttatggtatggcagttggctttcttcagagtgaatgatccatagataagcaaggtggaaataatttcttttatgaggtagcctcagaagtcatataccattatttctgcaatatgctagtcataagaagtgagttattaactctggacaccactgaaggggaatggaatttagctttaccctttgagggaggattgccaagtaatttgtgaatatattttaaaactccactccacataattatgtgttattaggagaccgatgacaggtaaattacactatgagttgttttaaattgttgctatattttttctatattaaagaaattctaagttctgaagtaacatagatactgttaatatggtttttatgttttgttaaagatttatgtgtccttaatttatctactaattgagattatttttaaggattattttttgaaaatcttaaaagttttgataattttgtttctcttttcagggcaccaacatatcattgaattattcccaactttgtcctattgtttttctttctgacttcctattttaagaaaatatattttgcatgccaattacagaaatgtgtttattgaaataaatggcttattttttcctctcagctgatttgaataggatgcacagacaaaatatagatgcctaccataacccagatgcaagaacatatgaagataaaagggctgttgtatctctagacccaaatttagccacttcaaatgctgagaacctagaagatgctgcaaataaaagctcaggtttttaatcacttttttttttttttttttttttttacatttctgaaattgttcagtaacatttctgttctgtgactaagttcttattgggatcttgagaatttggctatcctgatacaggaaacataacacactattcataaagtgccttttcttcatagttactttgaaaaaaggtgaatagggaaaggttacttcttcctactgtgtttcttctcagctttgtaacttgctgtgtatcctttagctgctgctaacatttttattttgctagtgggggacatttcttaatatcaaacactctttttacacacatacacaatttgcatcttatatccatagctgtttgaattagtgaaacagtatcattgtgatatgataaattgtacagggaaattcattttttacttgttttagtaatcatttaccctcccttgtaaaacaacagtgtacaaagaaatgaagcaatgttgtttttttttttgtgagatggagtctcactttgttatcccaggctggagtgcagtggcataatctcagctcactgcaacctccacctcctgggttcaagcagttctctacctcagcctcccaagtagctggaatcacaggtacccaccaccacacctggctaatttttgtatttttagtaggtatggggtttcaccatttagccaggctggtctcgaacttctgaccttgtgatccatccgcctccacctcccaaagtgccgggattacaggcgtgagccatcgcctggttacatgcctcttaactacttatctttgatttactattaatatcctttaatcaattctgaaagatgaaaattattcaattatctttttttgacataccaggaaaagttgtcaggtatgttaaattgtgttatatatttaaaaataaaatttaatacagcacctcacactatattttgatgcctataaaactggccatttattcattacaaaattctactttgtgctttcacagaagttttgattttagattagaaaagaacttttcattaggaagttctaaaatatttgtgactgatcatgtagtcttttttgtttttaacccttatttttggctaaacagataagtgaagtggggagctgtgattagagtcatagccctgcatctttcaaggctttgatggtagcacacttatctgtagcctttttgaacagtttaagagatggattatttaccgttttcatgggcagcttgtaccagtgttttctaattatgagaaaatgctttctttgttctacaatatattttatcggatccagttttgatttttagagcactaaaattggaacctttgattttgacaatattattgatttggctcttttaatttgtaatagtgtgtggtaagaacatcacaacaccttttcatattattgctgctaagagaattttgacttatttctgatatttttctcatttgctgctgcttctagtagtctgtattgagatctcattgccatacagagtctttctctacccttttcttccatacctggtattgtttgtagttctggctcagcctagaactttcgctatcttagtaataacactttttagccatctagctttgcacaccaagcaaaaacaccagaaaatcaacagttcccatgatcccttcccaaaagcataagcctgatgattaaacatgcacagcaaaatttgttgcctatagcctttctgtaccactgccaggtttttatgctgatattgttgccaagatgttctgttttaagaattgagtaaaaaaaaaaccataaaatgtttaaaacttccttttttttgtgaattgaaattcccaaattagacttttcttccctaagaatgaattaattggctgggtgcagtggctcacgcctgtaatcccagcactttgggaggctgaggcaggcggatcatgaggccaggagatcgagaccatcctggcctacatggtgaaaccccgtctctactaaaaatacaaaaattagctgggcgtggtggcatgtgcctgtagtcccagctacttgggaggctgaggcaggagaattgcttgaacccgggaataggaggttgcagtgagctgagatcacgccactgcactccagcctggtgacagagtgagactccatctcaaaaaaaaaaaaaaaaaaaagaattaattaatctaaaataaactttctcaatacaagaaatgattcaaagccacctaattttgtgctatgccatatatatgtgtatgagtgcatgtatgtgtatgtatgtacacacagacacacatatctttgcatatatgtagcatttgatattttaaaagcctgaaggaacttgaatatagctgaaaattgaatgttacaacatgtgtttaagtttccttatcctctaatattttatcttcattaggtttgtttctgatgccctttataatgttcattattttttcttttattttatggtttttagatgagctatggcttatgaagtctaatacgaatttggcttaaatttatttttttggcttattatcatgccaagatacatttctgctttctttgtatatagcaagtgtttccctatgattttccttttatagtttattcatttctaaaaggacttctcttgtctgtctctaataatatttcttctctaattgccccaaaggtttagaataggagtgagcatcacggtgaaacatgctactcaagtttgttttgctaatcagcttttccaccacagcataaaatttaaaagagccttcaaggtgtatatttagtttgttttcagtgggaaaattttctagagggaaaaagtattcataatgtttaagtattgatttggctttctgccagtctgttcaaataagcattaataaatttaaatacaaaagcaaaatagacctgagtggtagctgaactgcaaagcaatttgcctatacaaaactacatgcgagaaatacatgctttaggctgggcacgctggctcacgcctgtaatcccagcacttttggaggccgaggcgggcggatcatctgaggtcaggagttagagaccagcctggccaatgtgacgaaatcccgtctcaactaaaaatacaaaaaaaaattagccaggcatggtggcacacgcctgtagtcccagctacttgggaggctgaagcaggagaatagcttgaacctgggaggcagaggttgcagtgagccgagatcatgccactgcactccagcctgggtgacagagcaagactctgtctcaaaaaacaaaaaaagaaatacatgctttagtttaatggtataaagaatgagtcagaaactcaaaaataatataaaaagttatgtgaggcttaaatttaaatgtcattttttcccatctgcattcaaagagactctaagggtataattgtttttcgaattgcttttatgaaataattttttccattccaagaatatatgatactatttataggtaatatatactaaaaaatttttgttcatgtttatatctcattaagttgagagttttaaaaataaaaacgattacaataattaagatgcattctaatttgttaaatatgtttttcaaagctgactttctattctgtcatttaaactattgggaagcattttgaaattactgatttttaaaaacggttttagaaaattttaaatatatgttacataatacattttaatatgttattaagcaatattcttaagtaaaggatattcacatactgaagaatgtaaatatgtcctttttttctttataaattctattttaaagcctttgttgcaatgagggttgtttaagctgttagcttttatgtttcctttgtatctttcagatattatttgatttttttaactgttaattttattttagtattaccatttttctttctcttactactgttcatctgatcttcagattctaatctcaaccttccccttctgattttaatctttggactttttttttttttaaaaatgaatttattagcaaactgttcattctttaactgttaaattttctaagcattggctaatagtatgtttttgcaaaatatttctttcaaggtcatatgcaaacacagagctctccttttgctcggggaaatgtatttggtgagcctccaactgaacttcagattaaacagcaagaattatacaagaattttcttcgtttccaggtgaaatgctatttgatcagtttcaaagtttcatgagattttaataaacaaaacttgcaaagattttctccaggataaatactaaattctaaaatgccatactgttatctaaaatatctaatttatatcagatcagatatcagtagtacaaaagttatttcatttcaaggaaataaacagatgtattaagtatagtagttgacttaatcttttattttattaaataattaattttttttatttttttgagacggagtcttgctctgtctacccaggctagggtgtagtggtgagatcttcgctcactgcaacctccgcctcctggctttaagtgattctcctgcctcagcctcctgagtagctgggactacaggtgcctgccaccacgcccggctaattttttgtatttttagtggagacagggtttcaccgtattagccaggatggtcttgatctcctgacctcgtgatctgcctaccttggcctctcaaagtgctgggattacaggcgtgagccgccacacctgaccaatttttgtatttttaatagagacgggatgtcaccatcttggccaggctggtctcgaactactgacctcaagtgatctgcctgctttggtcccccgaagtgctgggattacaggtgtaagccaccacgcccagcctaagtcattaattttaaatcaaagaatgctgagattttaaaaactgatttactaatatattcatctattaggcagagaatgcatctttctagatatttgtaagttattagaaaatcaatagattttttccaaatgatttgatattattacagattgtaaataaataaaaattagatttaagataatcacagtttacaattatttgccccatttatgtacataagtaaatggcatttaacatagtagaactgcccagactattcgcaaaggaagacacttgaacatccagtgtttatgaagcaaacagacttactcccatactgggggtaccctgggctgagtcctagggatggagcctgagatgaatgtgagatacttgctcatgagggactcacagtttcttctttccctacctccctccccttcacactcacacttagataccagtgtcagattaatcttatggcctggttaatcctcctttgatatgacttttcacctgctattcttctttactcaaaatctggtggtagcttttctttgcctacagaaattatctcaactcttgaacctaacatttaaggttttataatctaattccaaactcttaaatagatgccctcaaacatatcttctttttaatcctaattattcttgactcttaaataaggcagtgacgtaatggatatagcctttaaggatgattgatattaggctgggtgtggtggctcacacctctaatgccagcactttgggaggccaaggtgggcagatctcttgagcacaggagtttgagactagcctgggcaacatgatgaaaccccatttctacaaaaaattagccaggcattgtagtgtgtgcctgtcaccccagctactcgggaggctgaggtgggaggattgcttgagcccaggaggcaaaggttgcagtgagccaagatatgccactttattcttgcctgggtgacagagtgaaaaaaggatgattgatgtgacatcactgtttaagatacaataatagaggattaaaaagagtggaagcagggatattttactagtgtgggtgacagtggaaatgggtggaaagtgctttttaaggttcagcagaaacaatatagatattaaatgtgagaaactggtatcagaggtcccaatattgtgcactcaagtcaggtagcagcaagttgagggttcagagtccctgttgaacgtaaaggaccgtgtggtatattgaccatgacagcaggtcataatttaagtacctcctctaatgcttagcagttcttatcatggtctaaggtagaattcagccaaaaaacaatcttacaattgtatagacttttattgtttttgagatacttttacatatagtgtctcatcaaacctcagatttctctgagagaggttttattatctctgtttaataacatacaactaatacacagactaacaggcttgcccagggtgtcacagctagcaaattgtgaggccattgcttgaacccaagtctccagacttcaagtgtaatatctatggatatcagacttctatttataggattcactaggaagtctttacctctagaaaaagtatggtaatgggggaagctttaactattttagtttcaaccttcagttcttccaccctgtcaaccctcaatttatctgtgaatggattgctttcagatgatgattttttaatttttctttcagcagcctcttcaaaatctcttctcccacctcaaacaaaacctaatatgtaattctaagaaaatgtaaaatagatcaatggtatttattattactgtcaacaatataatgtcagataaaaagtatccaaaacttttgttaaaaaaaatattatgaaatgttcaaatctgtgcacaaagatggtaagaaattagcctgaggtctgtacaagtaagttccacagttagctcaagttaatgcatcagaagtcttcatgctgttaaaatttggtgaatattaataacacttgtgaatgtttgacatttttaaccacagctttaaaaatagttaacaaataaaatatttttaagaactctgaagcatttttgtgttatgtaattggaaaaccatgacaggaagatagctttccctgctttccagaccagaaacctgttgaacaactgtctagcattcctgttggcactgagctttggatccattaggtgtatgatccattaatagcttaaaaattggtattctttgattttgatggaaaagtgacccctgtgaatgtgatttttttttccatggagtaggaagaagggggaattgagtattgaatatgaaattttgatgaattataaatgatgttttctttaggcatattggacttgaagaagtgattgcatgcaaattgctaactaaaagtactaaatattaggcttatgcatatttaataatgttgtgagaaagaagtgttggaaaaagccctagtatataaaatcataggatgtgttagaagattaaagttcttttttttttttaaagacagagtctcattctgtcgcccaggctggagtgcagtggtgcaatctcggctcactgcaacctctgcctcctgggttcaagtgattctcctgtctcagcctcctgagtagctgggattacaggcacacaccaccacgcctggctaatttttgtatttttagtagagacggggttacaccatgttggccaggctggtttcgaactcctgacctcaggtgagccaccgcgcctggccagattaaagttcttgtagctcaaaaattaatagcactagatagagcaaccttgaagctagaggaagtacagacaagaaaaacaaaaatatgctgagtagtatgatccatacctaaggataactaaaatctgttgataactttaaaccagagacatgaatacctggttcccatgctgctgttcttccctgcctcattcatcgggcgtgtggactatctatctcttagggccttctttccttcaaatcttaggctctagagtactcaacgctgcagactccaggtagcattcaagatgaaacttaattgtgagtccttgtgacctaaatcctcctccacctaatagttttagttctttctccattaacctctatagttaggaaataacaaagggcatttgggagaaatggctcttgcattaaaaaatgattgaatactaaaatactaatttcactgttattttagaataatcaattccaagaattttgacacataatagcagcaatcactatagaataatataatcatgaattagttgcttagaaccttctatataggaggacttttatgttccttacattgtttcactttaattctttaagcactcctttgagatgtaggcgttaataactgtgtttaccagaaaaaagagaaaactgaggacaagcaagtttcttaaggtcacacggtctgtttggtggaactggaatttaactcaaagcttttaacagtacagtaaatcatgtagcctccctgaaaatacaggagactgaaaaatttaggaacatgcaaaaagagggtacaagtgttgagtttatatactatcaggaaaaaaataagtgatattctaacttttcaatagttttacaagataaataactaagtttaattctttagattgaggaaaagaaacaaagagaggaagcagagcgagagagactgagaattgcagaagaaaaagaagaaagacggcttgcagaacagagggcacgaattcagcaggagtatgaagaggaacaggaaaagaaaagagagaaagaggaggaggtacatcttttttccctattgtattttactacttagtctgaaggtgaaatctttgacttgaaaaggtatttcttacttataaaggagaacagtgttggagtacatttagaaaatatcagatcaatatacattctttggatattattttattaaggtgaaagggtaatttaagaaaggagataagtgatgactttaaaaatatagatgtaggctgactgaagactttataaaagatgcctaatattttatttttaagcagacaacttatgttaaagaacaccatatcatgtcatctatatctttatctcattttatcagataaataaggcagcacatttttgaatgtactatagaaggaatatatggaatgcatatttctctttttattttaaagcaaaggctaaaaaatgaagagcatattcggttagctgaagaaagacaaaaagaagcagaaagaaagaagaaagaagaagaagaaaaatataacctgcaacttcagcactactgtgaaagagacaatttgattggggaagaaacaaaggtaagtttcagacaaaaatgtcaatcaaacccatagtttaactcactttcactgtgagagttgtacagttgttagaaaaggggagaaagaggaggaggtgcttttgttcctgttctgtcttactgtttagtctgggcacaatgtactgaactttctgtaggaggtactgtcactgtgctttgttggtattttctgtccattgaaggtaatggatttacttacttgagccattcttagtctcattcccatggtgtatgcggtgccacccaagaatatggtctgcagacagtacaacatgaactgtttgttatggttcatgacaagactaatacagaaagtgagagtggtttatatatatatatatatgtattctttttttttttttttttttttttttttttgagacataatctcgctctgttgcccaggctctggagtgcagtggcacaattttggctcactgcacctccacttcctgggttcaagcagttctcctgcctcagcctctcaagtagctgggactacaggcacacgccatcatgcccagctaatttttgtatttttagcagagacggggtttcaccatgttggccagactggtctcaaactcctgacctcagatgatccacccacctctgcctcccagagtgctgagattacaggagtgagccaccacgcccggccttctctctctttctttctttctttctttctttttctttctttctttctttctttctttctttctttctttctttctttctttctttctttctttctttctttcctttccttccttccttccttccttccttccttctttcttttcttttcttttcttttcttttcttttcttttcttttcttttcttttcttttcttttcttttcttttctttttctttttctttttctttctttttgttttaagagaccaggtcttgctatgttgcccaggctgatctcaaatttttgggctcaagttatcctcctgcctcagcctcccaaagtggtgggattgcaggtgtgagccaccacaccctgcctcacagataattttttattgtaaaattcatcatttaagaatttaaggtcgaggcaggcggatcacttgaggccaggagatcgagaccagcctgggcaacatggtgaaaccccgtctctataacaaatacaaaaattagctgggcgtggtggcaggcacctgtagtcccagctactcaggaggctgaggcaagagaatcgcctgaacttgggaggcggaggttgcagtgagccgtgactgcactgtggcactccagcctgggtgacagagcgagactccatctcaaaaaaaaaaaaaaaagaattaaacagaattgttagtttcccataattatatttcttgtaatttcttatgttttttaaaaatgctattttttaaggaatatatacttttatgatattataatttaattgtaaagtaccataaagttttaaatcagctttatcccatttaatgcatttgcctttctgaaattaacattgctatcattttctttcatttatgtatgtctgatatatatatatatttttgtctattccttcagttttacctttgtgtcaccatattttttatttagttagcttctatctttagtttgttgaatttttaaaatcctaatctgagttataatctttttatttttatttatttatttatttatttagaaatagagactcgctttgttgcccaggctggagtgcagtggtgcaatctcggctcactgcaacttccgcctcccaggttcaagtgattctcctgccctagcctccccagtagctggaattacaggtgcaaactaccacacctggctaatttttattagagacggggtttcaccatgttggccaggctggtcttgaactcctgtcctcaggtgacctgcctgcttggcctcccaaagtgctgggattatagacatgagccactgcacctggcctaatcttttaaaatagggatatctaaatccatttatgtttatcaaaactaatgtctttgcattaattgcatttctgacttttttgtgtttttcttccttgatagctttttggtcttttgttatgtgtactatggcttgtttgctccatcctctacagggatttagaatgtctatgttgtatttacaatgaagtttttggactataaggtttaatacactataaactgaaatatagaaccccatcgtgatcttgaaaagtccctcatccatgatgctgttagtgattagatctagattttcgaggttgatttgtattgctttccagaaggattttgttatttaatttttttgtattgtcatggtacctttttattattaaagatgattctttagttttgttatattttttcttttttgttgctttacttgtgtttgttgattttttaaatcctaatctgacagtcatactgttttaataaagatgtctaaatccatttatgtttatcataaccaacatgtttgatcttatgtaattgaatttctgacttttgtagaaagcattttattaaataaaagcaataacaatctaaacttcttagatgactttcttaactataaggggtgtgtgtgtgtgtatatatgtgtgtgagtgtgatgaagcaaatatgctcttaaattttttaaatttttcagcacatgagacagccttctcctatagttcctgctcttcagaacaaaattgcaagcaaactccaaagacctccttcagttgacagcatcatacgttcctttattcatgtatgtacttttgtttttatttgttcatcctagctcagttattttggattgggggatcgaatgaaattttctttttcattatatttggataggttaaattttttcagatctgaaatataggtgatatctacagtaatttgcctgctgcttcgattgtaactgatagtgcttggtgccctaaagtttcttttgacaaaccataatttagcccctcaagctaggtagctgtagatatgctcattgagtctgttatactttagattgaactacaaggaaaagagaacatggaaaatgttctaagattgatcctcaaggtgatgcttgaagaatatgcaggaatttgccttgaagaggagggtgagggattatcagcttgtggaaagtcgtggagagcaatgtaagctcatggcacatgtggagaatcttccatggtgtggtctggcctgatgatgcttgtgcattaaggcagcagaggaggtggaggtcagaacatgtgtggcatgctgtacggagtgctaagagctttgattttgttccataggctggtagattccagacaggctaattagcagaaggtaaagaaatgtgtcagaagaacatgtttctgaattccaccctttgagattctgatttagtaggtctgtggtagataatgcataggaattcattgtaatatttaagtaggggaatgacatggccacttttgtataatgtttttttaggcaatggtgtggagataagttttggaggtggggcaagactaaacatggagataagatgcttttgcacaagtccagatgtgagactgaggacccaaacaaaggcagtgacaccaagaactgtgaaggtgtgacagctttatgatacatttaagagacatagtagtactatttgttgagtgtgtggtgggtaggagtctatgataactttcaagtttttggtgagggttacatagagtaggcagttgaaaatatgaattgtggcagcagaatgagttctggactcgatttgtagttctggacgccatcaacatattggtgcttgttaaattagtgccattgtctacgatgagtgtctacaagagaagtaaaggaggctgagaatagaatactgggaaattaccaacatttgagaagcagtgaaaggaatggacagagggtgagagaggatggcagtgacggcagttgcgactggccaagtaaaatgcccactgaatgtgtcacttgggggtcacttgatgactttggtgaaggcagtattgttggagtgatgggtgtgaaagcaaaggccatagctgtgtgttgagaagtgaatgagagtaggcagtagacccaaaagtactgcatttactgttctttaaggaagctcagctgtgaagggaaggacagaatggacaggagacagtgagcaatgaaggatgaggtaaaatttttttttaagaaagggagaggtttttacacataggctgagaggaaggtgcttggagagaggaagttggaaaaaagaataatcggaggagaatgggagtcaattatcagatacagagtacaggtgaagggattctgtttgggtagaggcaaggacacttccatcgtgatgagaaggaagaatagatttacatggtagatacactctagaatagatataaaaggtggatatactctaccttgggtagagtatagctgggtaagttttggaggtaggatagtgtggagtttggtttcctttacatataaatacttcaaaaaattactcccttcaagcttctgtgtagggaagacatactgaacatgtctttgtcattattgttgaacaggaaagttccatgtccagggcacagtcacccccggtacctgccaggaaaaatcagctccgtgcagaaggtagagttaactactaaacctgttacctagagtatttctctttttaacttttcattttgaaataattataaactcatagaaaattgcagaaacagtatagagcggttaggtgctgtgtacccattctccaactttcccctggggtaacatcttagatagtatagtctcatagccaggaagtggacattgatgtggtccacagaccatcagattttaccagtttttacatgcatttatgtatgtgtatttctgtgcatttttatcatgcacagtttgtgcgactaccactgcaatcaagatacagaactgttccatcaccgtaaaggaacttccttgggcctctcctttatagttgcactcccccaagaatatcgcttctgaaattcctatattataaaaaatgtacttgtgggtcctaatgacgttcacaattatgatccatgtatgtgtgtatatataaaatgttaaaatatctttcataaaattgtctctctgagcagtttcactttattattagtcaggttgtgttttaatgtttagtcttttgttcttattcctgtcttgtgttttacttatcaatgggaatttgcagaggagaaaaaaaatgtaattatggaattatcagaaatgagaaaacagcttcgtagtgaagagaggcgtctacaagagcgattgctacacatggacagtgatgatgaaattcctatcaggcaagtttagaattgcagtttttgtgttcgcttgagttcttttatcttacttcacctatccagtaattttgtagtttgggaacaggactaattcatcttacttaaaatctccttactttccttttctttgtcttttacaaaatcagctgtagaaatttagttctcaaggggattcatgtaggaatggaaatttccgggttggaataattacagacagtagttgcattttagaactgttttttatattttccattaataacgtagctttctgaaatactttttttcaacaaaatcacgtacgggctaccgaacatttctgatcatttttgccaggagtcataaatttcatgaagcagtgttcttcaaacttcagtttgcactgttttagtaggttgtaaaatcaacatagtgggtaactaccacattttctttctttctctttttaaaaataaactttctattttggggtaattttgattataaaaaagttgcaggctgggtgcagttgctcacgcctgtaatcccagcacttttgggaggccaaggtgggcggatcacgaggtcaggagatcgagaccatcctgtctaacacagtgaaaccccgtctctactaaaaatacaaaaaattaactgggtgtggtggcacgcccctgtggtcccagctactcaggaggctgaggcaggagaatggcgtgaacccaggaggcggaggttgcagtgagccgagatcacaccactgcactccagcctaggtgacagagtgagactctgtctcacgaagaaaagttgcaaacaatacagagagtttctgtacacccttcatccagttttccctattgttaacatcttatattaccatggtatgtttgtcacaactcagaggctgacattagaacattactatgaactaaatttgagactctttggatttctccagttttctactaatgttctccttctgttcatgggccccatacaagatgtaccacattgcatttagttgtcatgtctcccagtctcctcgggtctgggacagtttaccagtcttctgttgtttttcttgtgaaagtctagatgggcactggccaggtatcctgtagaatgcctcctcctccagtctggatttgactgatgttttctgatgattagactgggattaagggtttctggaaagaagagcacaggcattgttctgacatcacatcatcacattgtatcaggggtacatgatatccacatgatacctctggaaatgttaaccttggttaaagtagtgtttgccaggattctccactagaaagttaactattctttggtcacaaatgactaaatctagcgcacctgcaagagtgagaagggggtggaattaagcttcatctcttggagcaggggttacctatatacagtttttagaattcttccataagaaagacttgtgtcttcttccatttatttatttattcaatcgtttatttattactgtcatctcatgtatatttatcatatactttgggttataagccagtgctacattattttatttcacaaattgttccaactttggccattgggagctctttcaggttggctcccgtgtctctttgacatgtccccatccttttgttttttgaagacttctttccagatgcctcaggatcatcttgtatttcccctgccccatccctagaatcagctatttctccaaggagccctggttccttttggagaatgtatttagaaaccagataagctgggtctgcttattgctgggtgtcactgcttctaggccctctggataatatatgtatgttatactaagtcataaatataaacatatctataattgttcctatgtctatttgtatacatattaagtttatgctgatgtctgactgtaatccagtatgtggtaggattttaacatagcacgttaatttgactacttatggtttgtttagatttttgtttgtattctccaggaatattgaaacaaggtaaacaaggtgaggaaatttcaaggtacagattggcttgataatgaaatgttaatccaaggtggtaattttcagtgattcaataattctcccatagtaggtcaatacgttccaagcaattgagaggtagtgttttttttctatatttacttttacagtgttataaatgccttaactgtgcagctttccaacttctaaacatgcatatttaattcagtttaacggtttttttttttttttaattgatcattcttgggtgtttctcgcagagggggattttgtagggtcataggacaatagtggagggaaggtcagcagataaacaagtgaacacaggtctctggttttcctaggcagaggaccctgcggccttccgcagtgtttgtgtccctgggtacttgagattagggagtggtgatgactcttaaccagcatgctgccttcaagcatctgtttaacaaagcacatcttgcaccgcccttaatccatttaaccctgagtggacacagcacatgtttcagagagcaccgggttgggggtaaggtcatagatcaacagcatcccaaggcagaagaatttttcttagtacagaacaaaatggagtctcctatgtctacttctttctacacagacacagcaacaatctgatttctgtatcttttccccacatttcccccttttctatttgacaaaaccgcaatcatcatcatggcccgttctcaatgagctgttgggtacacctcccagacggggtggcggctgggcagaggggctcctcacttcccagaaggggcggccgggcagaggcacccccacctcccggatggggcggcggctgggcggaggctgccccccacctcccacccggacggggcagctggccgggcgggggctgccccccacctccctcctggacggggcggctggccgggcgggggctgccccccacctcccggatggggcggctgctgggcggaggggctcctcacttcccagacggggcagctgccgggcggaggggctcctcacttctcagacggggcggctgctgggcggaggggctcctcacttctcagacggggcagctgccgggcggaggggctcctcacttctcagacagggcggccgggcagagacgctcctcacctcccagacagggttgcggccgggcagaggcgctcctcacatcccagatggggtggcggggcagaggcgctccccacatctcagacgatgggcagccgggcagagacgctcctcacttcctaaacgggatggcggctgggaagaggtgctcctcacttcccagactgggcagccgggcagaggggctcctcacatcccagacgatgggtggccaggcagagatgctcctcacttcccagacggggtggcggccgggcagaggctgcaatcttggcactttgggaggccaaggcaggcggctgggaggtggaggttgtagccagccgagatcacgccactgcattccagcctgggcaacattgagcactgagtgaacgagactccgtctgcaatcccggcacctcgggaggccgaggctggcagatcactcgtggttaggagctggagaccagcctggccaacacagcgaaaccccgtttccaccaaaaaagtacgaaaactagtcaggcgtggtggcgcgcgcctataatcgcaggcacttggcaggctgaggcaggagaatcaggcagggaggttgcagtgagccgagatggcagcagtacagtccagcttcggctcggcatcagagggagaccgtggaaagagagggagagggaggccgtgggggagacgggagagggggagggggagggggagagggagagggagacctaacggttttttgacattaatttttcttttcattaataaattcttttggcaagccaatatgatttaagaaagagtactcgagcagcgcctcaattttctcgcttgaaaattatacatgataatttctaccctttgagaatctagtgaagaataaataaatgtatgtatttgaaataaataaataaatatatgtatttgtgactcttaagttctaacttaagttataaaacatgttacatttatcatcatttagcaagaattggttaaatacatttactttggaataattttaatacatattctgattaaagacatctcagagttggttctttattgcaatttcatgaatatatgtacaaaaggaatcttgtattcactaaataatttgccatattcaactcctattatgtgctaggctcaaaacaaatgtgatgtggctcacatgtgaagatttagtaacctacttcctaacttatcagtgtataactattagcattaatggaaactagacagcagtccaatttaatggtctcttggatgtctttttagtattttgcattatagtaaatctccatagagttcctttcaccttaagtattagaggtctctgtcagccttgaccagagtcattttgtggccccagtgaatgctcccctgcaaaagggaaactccattagagcaggggcattgtctgtggggatcccagctatcttgtcttggtgcttagggaagatttaatgataaagaaatgatgggaggagtctgactaagcctcataatgaccatagcttagagctccattttcaaaaatagaggagacctagtgctgactgaagcagcagtaggtattttattttattttattttattttcaggactagaaacaccatccctcttttatcatcactccctcaaagccctggcagaaaacacccttactacctgctatctattaatttcttaggtaccacaggaatcagttaactagttaggttatcaagttccttgtaaagtccattgtaaagttaatgttgggtcctctgaataatgcccatattgaactacgtattagtaccatatttctgtttttatttttatttttttgagacggagtctcgctctgtcacccaggctggaggcatgatcttcggctcactgcaacctctgcctcccgggttcaagtgtttctcctgcctcagcctcctgagtagctgggattacaagtgcccacccccacgcacggctaatttttgtatttttagtagagacagggtttcaccatgttggtcaggctggtctcaaattcttgacctcaggtgatccacccgcctcggcctcccaaagtgctgggattacaggtgtgagccaccgtgcccggccagtaccatatttctttttatatttttggagacagagtctctttctgtcacctaggctggagtgcagtggcatgatcttggctcacagcaacctccgcctcctgattcaagtgattctagtgcctcagcctcccaagtaggtgggactacaggtgcaggctaccacacctgctaatttttgcattttttagtagagacgtggtttttccatattgcccaggctggtctcgaactcctgagttcaagcaatacgtcggcttctcaaagtgctgggattataggcgtgagccacagggccctgcctattaccatatttctatgtgtgatttgtgtcttaggctgaggggaaggtaatttattgattatctaatgcatgtcaggtactatactaggtacttaacagtatagcatttatctcaattctgaccggatatggtggctcacccctgtaatcccagcactttgggagactgaggcggatggatcacctgaggtcaggagttcgagaccagcctgaccaacgtggcaaaatcctgtctctactaaaaatacaaaaaaaaaaaaaaaaattagccgagtgtggtggtgcgtgcctgtagtcccagctacttgggaggctgaggcaggagaattgcttgaactgggaagtggaggttgcagtgagctgagattgtgccactgcattccagcctgggcaacagagcaggactctttcaaaaaaaaatttttttatcttaattctgttgttcaccgtaagactataaggggtagacatctgcattttacagatgatggaatcgaggtcaaactgctaataaataacagagctggtctttgaatctcagtttctctgacctcaaagactgtgatcttcatactccatgaacattttattttattttttccatgaacattttaaagtaaggctgaatcattctattgtaataaggtatcttgcatctgaggattttgaaaaatttcaataacgttataaatatgctatattttaaggtaaaggatggaactaatagagctgttcgaataatttatttatttatttatttttgagacggcttcttgctctgtcacccaggctggagtgcagttgcactatctcggctcactgcaagctccacctccttggttcacgccgttctcctgcctcagcctcctgagtagctgggactacaggcatgcgccaccccacccggctaattttttgtatttttagtagagatggggtttcaccgtgttagccaggatggtcttgatctcctgacctcgtgatccgcccgcctcggcctcccaaagtgctgggattacaggcatgagctactgtgcccggccaattttttttttttttttaagagacggggggccgggtgcagtggctcatgcacgcctgtaatcccagcactttgggaggccgaggtgagcagatcacgaggtcaagagatagagaccgtcctggccaacatggtgaaaccccatctttactaaaaatacagaaaaatcagctgggcctagtggtgcacgcctgtagtcccagctactcaggaggctgaggcaggagaattgcttaaacccgggaggaggaggctgcagtgagctgagatcacgccactgcactccagcctggcaagagagcgagactccacctcaaaaaaagagacagggtctccctctgttgtccaggctggagtgcagtggcatgatcacagcttattgtagccttggcctcctgggctcaatcaatcctctcatctcagcagtagccaggactacaggcacacactatcatgcttgactaattttgttgttgttgttgagatggaatcttgctctgtcacccaagctggagtgcagtggcgtgatcttggctcaccacagcctcctcctcctgggttcaagcaattctcatgcctcagcctcccgagtaggtggtactacaggcacacaccaccacgcccaactaatatttgtatttttagtagagacagggtttcaccattttggccaggctggtctcaaactcctgacctcaggtgatttgcctgccttggcctcccaaagtgctgggattacaggtgtgagccaccatgcctggccaacttttttttcttttttgagatggagtcttgctctgtcacccaggccggagtgcagtggtgtgatctcagctcactgcaacctccacctcttgggttcaagtgattctgctgcctcagcctcccgagtagctgggactacaggtgtgcgccatcacacccagctaatttttgtatttttagtagacatggggtttctccacgttggcccagtctggtctcgaactcctgacctcaggtgatccacctgtcttggcctcccaaagtgctgggattataggcatgagacaccatgcctggcctcataattttttttttttttttttttttgtagcgagggggtcttgctttataggccaggctggtattgaactcctgatttcaagcagtcctcctgtctgcctcccaaagtgctgggattacaagtgtgagccacagcacctgtcctagagtaattttttaataatatgatgtggtgaaaaagaccaaatttcttttacagtgaattagatgtgaactcacctatttttcctgtgaagcacatattatgatttgtcatttatctataggaaaaaggaaaggaatcccatggatatatttgatatggctagacatcggttgcaagctcctgtcagaagacagtcccctaagggcttagacgctgccacttttcagaatgttcatgattttaatgagctgaaagatagaggtgagtagattgctgctcttttaaagatgtagcagaagtgttctacccatatttaaatatctataaagatctttgtaccctttttctaaagtggaattttatctatggtatgtattttagttaaaatgaaatgaaacttatgtattctctaggtcttcagttaaccagtctggtagatgaagctttagtttgactaactgctttcttttggagagcatacagtgttaaagtctggaatggatgagatcgcatagactagtacgaagaatggaacttggcatttaatggaggatggacagacaaagatgagctcatgaaaaatactgaggagaagccagagagactggaggagaagcaggagaatgtaggatcctgaaacctgaggggaaggagtatcaaggagacaggatcatgtaaggtgaataccggaaaatgtcagttggatgaggtcattggtgacctcagctagagctttttaagtggaatgattgccgattaactttggaatgaggattgactaggaggcaagatgttggagacaataggcataagacttttagaagacccttggctgggaaagggaagggaaggagagggatcaggagctggaagagtccttagaatgtgaacgtgaggagctatgcaggagaaagaggttcaggctctaggagagggagagtgattgttgaagtgaaatctaggggatttgagggaagagttaggagaagctttgatgtagccacttagggctaatggaagagaaagtttagtaaggaaacgagatttccagggtacatgaggcctgggagatggagaatgtgtggaggaaccaaatgtgtgttgtgtaattttcctttaggcatattcagcagagcaggtgttggagcagaaggggcagattatgggatgtgtggtcgtatgacgtaggccagaaaactggaatttaggctttttatccttttgaaaatactatctgtttattatagcaaattttcaaaatacagaaagatagtaagaaggaaaaatcactttagtcaaactacctatatgtaagtaccattatcattttggatgttttctagtctttctgagcataattaaaagaaaaaaaaagataaattgtgttatttatttaattttctctattgtttttcacctagatttacacgtattatcaattacgtatactgttattttttatgctatcaaatattgattacttactatctgccaggcattgtgttaacccagtgggtctcatgaggagtttggtctgaagtcaaaactgtttgtattataaactaagacattatttgtctttttcattctcattctctcatgtgtatatagattggccagagactacatgacatgtaatgatttcatctctttgaagctagcaaaatgtgtccttgtgtattcttgtgttttaggaatctcttagttttaatttctaatatggcgtgtgtgtgtgtgacatacataagtaaagctctttggggtcctcaatttttaagagtgtaaaaaagatcttgagaccaaaaaggtttaagccatagaattgggctgttcatttccctgtgttactacatcttgccctcattcacccatgacttggtggttggtattgtttttttaatgagtttggaagcagtgaagccagggaccaatccaagtttatgtgtccagaaacttctgttaacttctgaaaatggctgttaaccattttcactattttgttcttttgataatttctgatcataaagctttatacatatttaggaccataaaactacatatatatttaggatcatttctttatattccagcagtgtaattagtgagtcaaagggaataatattttcaaggctttttatatgtatgaactgtatgtttcttctcaagattaaaaaatttttattcttggccaggcacagtggctaatgcctgtaatcccagcactttgagaggccgaggcgtgtggatcacgaggtcaggagttcaagaccagcctggccaacatagtgaaacctcgtctctactaaaaactacaagaaaaattagccgggcatagtggtgggtgcttgtagtcccagctacttgggagactgaggcaggagaatggcatgaacccaggaggcagagctggcagtgagccaagaccgtgccactgcactccagcctgggcgacagagcaagactccgtctcaagaaaaaaaaaaaaaaagaaatggcattccccctcaagttccagccagtctacatttatcttgctttctgcatgatatttgtaaggactaaaatattaattggccagtaacattattttttcacgtttccagtatattttagagatcagccgtgattacagtgtctcatggctgccttagtcatagccatgtgaccatctgcttggatatacctgcacgtagtctgtgttctgggtggcatcctggcagggctaggacaggtagagatggacaatgcaacatccactgcttgttctggggtattccttatgttggtaagtttgtgaaaagacacttattaaagaatattaatttcatattctttagttttgtggctattttactgtcctttgactttagtgatgtttcactatttctatcatttccttgattttgaaattaggttactcatgttacttacagtgaagttttacaaaatcccatttgaaaacaacatttaacttagttatataacatattttttataccagattcagaaacacgagttgatctgaaatttatgtacctggatcctccaagagatcatcacaccttagagattcagcagcaagccctgctaagagagcagcagaagaggctgaacagaataaaaatgcaggaaggtgccaaaggtaagaaataatcattgctgtgtcaaatagtatcagcacgctgtttttccgtaggctttctgcatctcttctattgatttcattcccaggcatcctcctttcactggcagccccatgctcacagggtccgtttggtctgtagtaccagaaaagaacaagtatgagagagagctctgagtggctccactagggtggtgtattcatgcatgagaggggcccagtcattcactgtagccaggaggactgaatactttgaccaggccaggtgacgtctgcatcaggaactaggaaccaaaggaaggagtgtcaggcagacatatcagtgccctgtcatgatgtgtcgggcatttgcctactgtgccatgtcaggcatttgtctactgtggtgtgagtgtgtttaagttttgatgtggcgtaaaatctgtaaagcatcagactggactatgaatatgttttcgtataatcaactaactgaaagatacttagtggttactaggagtgcaggtactggcctatatccaggggatatggtgatgagtgacatatgctgctgctcttgaggaggttatattttgttggagaagtgtgatgctaaagaagtacaactgtgatgaatatcgcacagaagaaatctaggatgctgttgggttggggtgggtgggcacctagaagcagagtggggctagttgtctcagagagcactgatgggccctgacgatagccaggtgtactgcatggccttcccatctgtatttcaccagccttcaggccatcgaggttaaccatggaaaatgagtaatgaaaacccaacaatcagataacaagagtggaagggatgctcctgctagttatttttaagaaaagttaagaccctatcttgggaggctggtctggcttgcagaatctgaggaagattttttgacttcatgagatagcatcacaggagtaagtgatgcagcagtttaggcccagatcataggtcaagacttcaataaacatttgtatagggattgtcgtcccttcatctggtacagaatttttaataacagcctcatagccctgtgacagaataagcctaattctaggataagcagtaggtatatcatctggagagaggagagaagcaagtgcattcttcaacctttgtacccagtctggtggcatttttctttagtctcaaaatgaagatctgatcttgtgggattttggcagcttagactgattagcccacaagtagtccccatgtggatacaggtacattttagcactgaaggtatctatctcccacagcagccactccccaacttccagtagacactatgaagacctaattcataggaatatgacctcactggccaggcgtggtggctcacacctgtaatcccagcgctttgggaggctgaagtgggcggatcatgaggtcaggagttcaagaccagtctggccaacatagtgaaacccccgtctctactaaaaatacagaaattagctgggcatggaggcgtgtgcctgtagtcccagctactccggagcctgagtcaggagaattgcttgaacccaggaggtggaggttgcagagagccaagatcgtgccactgcactccagcttgggcaacagagtgagacttagtctcaaaaaaaaaaaaaaaaaaaaaaagaatatggcctcactataaacaatcacaaacatgtctattaaaatatctgagaaggaatacaggctatcattcgcagcttgtttattttcaaaggcagtatctaaaaagggcaaaatgtactattcacaggaacacataggaaggctggtcatattggagaggctttgggatacctgatccaagatctttgcctctggaactaagtgcctggaattgagcttatttcagttccatgtgagggagcccctgtttaactccatgcaacaactttctacagattgtagaaatctgacaagatggtgaaggatcctgcattgatcattttctttttctgttggcattagttttacatttgcaatgattttacttgttatgttcattcatgtgaatgggagaattttatgcagctagaatggatgcagggctatgttttttaataagtgatatctttaaaatactctgaagtgtgatagttgaaaagtaatttccagtagagagctagtcaaaaaagatattctaaaatttaatttatatagtaagcattttctgaccttttaatttgcttttgttctccattgactacagttgacttagatgccatcccaagtgctaaagtacgagagcaaagaatggtaagcaaccagttacaatttttcaagttagtttttgggggattaaaaatctttaggcatatgatgatcaagtaattcaaattttgaattattcaggaatattgaattaagaacgtaagtcttatcagtaaagtggatagcttgagaagtgttagtgtaatatatatagaaaacatattgtaatggctaagaacaagattctagcactaggctgttccagtgagtctatttttagctgcgtgacttagggcaagttatttaatctctttatgcctcagcttcctaatctgtaaaatgaggataatagtacataaattaatatttgcaaggtacttagagacaggcctggcatataagttttatgtaagtgtttattaaataaataaaaatagctcaagtgctgttgtgagaactgagataatatattaaaagcccttacagcagtcctggcccattatgagtgcagtgtgagtgtttgctgtcattaccatgagcagtagtgggagtaggagtctgttatggaagtagtgttgaggtctacaaagaaaataagcaaaggaagggaacagagaatgataacacccacctgtatcctgaggggggtactttttgtgcaagactgaataaagggacaggatgagctcttttcaatcaacaaatatttattatttcctatggacaagaaactgttctaggtgccggggtataggagtaaacaaaagggacaaaaatccctgtcctgtgacaggttacattccagaaggagggagagacagtaatcaaataaatcaatagttttttgaatcatggtgctgtggagaagacaacagcagagaaggcagctggaggatcctgggtgggagggtttatagttggaaatacagtgggcatgggggctcactgggtaggcaacatttgagtaaggacatcagggaggtgtctatgggaaatgtgggggaacttctggaggaagaacattccaggaagaggccccagtggaagttggcctagtgcatgtaaggagcagtgggagagccatgagcaagggccagttgggcacatggggcagggggtgacgaggggaggcagcagggccttgggggccattctgggactttgcctttgacacttgtgcatgtgatgggaagctgccaaggtctttaagtggaggagtgacatgatctgcttgaggtttttacttgatccactgactgctgtgcattttgactgagtgggacaggaggctattgtagtaatttaggcaagagacaagctcactttctgattaaagaatgcagtgcatcattgtaattcattgccttaaaaattaatggacagctctttgctggagtgtcctactgaagcccagattatctggtaagaaggtgcagggaggtggagttggatgactttaggttccttctgacatgttggttattattctgtactgcaaaattctctatatgtaaatttaagttttctctaatttgggagctcattataataagcccaatcttagcattttttttcgttactatactatatgctccactatatctgtgctgcatcattgtggcaattgctgtcacatagggctgtcataatctgagagtatacccctctctctcccatgacactgtgatctactccagagcagaaactcttaattcatctttgtatccccagttcctagcatgaaagaaatagtaagtgggctatacaggtttatggaaattcggatgaatgaatcttggcagtggcttaaagacttaatgtttaattggggtctttgcttcatactgtattatattttccatcagtcataatgtgatccttttatttgacttcaaccataaaggggcaggaaggagtggagctagggagtaaatgtgttagcttgtagaatctgtagcctggagagagactgtcttctgttgctatcaccgtcttcgtaggaattgtgtgtgttaaggctttccagtattttctgagcattggaatgtagtcagtcctacctctacccatcctctgcttttagggagaacagtgtggaaacttgtgcctcttcttagtataaatttgttgtttttgtacacaaaactaataaaaatagtcattgaaacatgtttcttttagcccagagatgacactagtgatttcttgaaaaactcattattggaatctgatagtgcttttattggtgagtatatttattttattaaggctatattgtttaaatattaaacctttctccacacttaaaaaccagtactgtattccttgttgtacaaggtagtaaaaaaaaaaaaaggaatattcttttttctgttttaatcagatatgccttggaaagttttcaaaatcagaattactgaaatgaactttaaaagtcttaggaatagttgacaaacctgtacatgaatgttcgtaacagcctcatttctaatgccaaatgctggaatcagcccagatgtccttcagtagatgaatggttaaaaaaactctggtacatccatgccatggaataccacttagcaataaaaaggaacaaagttttgaaacttggatgactcttcagggaaatagtctgagcaaaaaagacaatcccaataagttacatactactgtatgattcaatttacataacatttttgaaattacaaaattaagaaattgagaacagattagtggttgccaggggttgagggatagggagaggtgtatatggttataaaagggcaagaagagggatccttgtggtttgggaactgttttaacaacttgtttgcaggggtagatacatacatgtaaatgggaaataaaataataataatagatcttaatacacacataaaaacacacaaatgagtattggtaagatggtaaatttgaataagatctgtggattgtatcagtatcgatatcctggttgtgagattatacttgagttttgcaaaatgttaccattgggggaaactggacaaagtgtataaggaatctctactatttcttatacctgtgtaccttaattattttaatctatttatagttctcttaatatttcagtcaaaaaagtcataagacttttatttagtcttcagaagataagtaaaggtaccatgggatcttcttttttttttaaagtagtatacacttacgattatgtactctgatcatgagtgtttctgctatcctagggccatcagggaatgatctagtctacatattagttgtatttcaggccaattactttagattttcatgtgataaaattccaaattaacttatatttttctcttaatggttttttttttgttgttgctgtttttgagagagggtcttgctctgtcgcccaggctggagtgcagcagcacaatcattgctcactacagcctcaaattcctggactcaagtgctcctcccatctcagcctccccagtagctgggactacagcatgcaccacgatacctggttatcttttttatttttttgtagagatgaggtctccctatgttgcccaggctggtctcaaacacctggactcaagggatcctcctgcctcagcctcccaaattgctgggattacaggcatgagccactgtacctggccatttttttttttttttttttttttaatgaatttttcctttccaaggaagatgcactgcggagagaaggaaagataaaaccagcaggagacagggatgggaagattgcttgtcagggaaatgagaccttccttcctaacagtgaagatggtctgggccactcaagatggtgtgttggagtattgcatgacactagagcaaagatacagcagtatttatggttaacagtcactgcaaatgctgcataagtaagtcatggctgtgttaaccactgctctaaggaatgtaaagctgatggtttcagtgcattattttaaaaaatagggtttttaaaattgtaaaatacacataaacataacatttaccattttaaccattttaaagtgtacattgactggcattaagtatttctattgtgcaaccaccactatcatccatctccagaattcatcttgaaaatagaaactcttcatatgaaacagtaattccccattgccctctccctccagcccctggcagccaacattgtactttccatctccataaatttgactactctaggacctcatgtaagtggaatcatacagtatctatcctttgatgactggcttatttcacttcacataacatctttgaggtttatccatgttatagcatgtgtcagattttctttttttaccccttagagacagggtcacccttgccacccaggctggagtgcagtggtgtgatcatggctcactgcagccttgacctccctgtgctcagatgattctcctacctcagcctcccaagtagctgagactacaggcacacactaccatgcctgaataatttttgtattttttgtagagacagggtttcaccatgctgcccaggttggtcgcgaactcttgagcttaagtgatcctcctgcggcctcccaaagtgccaaagtgctgagattacaggtgtgagctaccacacccagccagatttcccctttttttttttatgctgtgaataatattccattgtatgtgtgtaccacgttttgtttatccaatcatctgtcagtagacacttgagttgcttccaccttttggctgttgtgaataatgctcctatgaataggtgtacaattatctgttggagtcactgctttcagttcttttgggtatacactaagagatagcatttgctagatcatatagtaattctatttttaattatttgaagactcaccacattgttttccacagcagctgtaccattttacattcctaccagcagtgcacaaaagttccgatttctctacatccttaacacttgttactttgttttttgaatagtagcaatccttacgggtgtgacgtggcatctcattgtggttttgacttacatttctgtaataattagtgatgttggacatctttacatgtgcttattgactaattgtacatcatttttgaagaaatacctatttaagacctttgctaatttttaaaatcagagtttttttgttattgagttgtgggagttctttattatctattctggatattaccccttatcagatacatgatttgcaaatgttttctgcatagtgggttgccttttcactgtgttgattgtgtcctttgatacataggagcttttaattttgatacagtccaatttatcttttcttttgttgcctgtgcttttggtgtcacatctaagacatcgttgccaaatccaataccatgaagctttcctcatatgcttgcttctaagagttttatctataggtttagctcttaatgtttagatgcctaaccacagagtgtcaaaatacatgtcagaaagcaaaagaatggcaaggagaaatagatgaatccactgttacagttggagatttttaacacctctctatcagaaatggacagagacagaaaatcagtaaggacgtagttgagttcagcaacaccatcaaccaactggatataatggatgtcgaaagacaacttcattaacaacagcagaacccatattcttctcagggtcacatggaacattcaccaggacagattacaatctgggcaagaaaacaaaccttaacagatgtaaaagaagataaatcacacaatatctgtccccagaccacaatggaaataaactagaaatcaataacagaaagatagctggaaaaatctccaaatactttggagattaaatgccacatttctaaataacgcataggtcagagaaaaaatatgaaaatacattttaaaatactttgatctaaatgaaaatgaaaatacaacttctcaatttgtaggaggtagcagaaataatgcttgtctttctttctactttcctaatgtatgcattcagttaaatgtaaaatgccaaactctaaaactcacagaagataccaacagaaaatctagacgaccttggatatggtgatgacttttagataaaaaaccaaagccacaatttatgaaagaaataattgataagccagactatgtaaaaaattgggaattttttttttttttttttttttttttttagacaaagtcttgctgttgtccccaggctggagcgtgatggcgtgatcttggctcactgcaacctccgcctcccgggttcaagcgattctcctgactcagtctcccaagtagttgggattacaggcgcctgccaccacgcctggctaatttttgtatttttagtagagacggggtttcaccgtgttggccaggctggtctcgaactcctgacctcaggtgatcccccggccttggcctcccaaagtgctgggattataggcgtgagccactgcgcccggccaaaaattggtaaatttttaaggtgcttaaatttataggattgactgtgcatacatgaagaaagtagaaagatctaaaatcagtattctaagcttccacataagaaaattagaaaataattaaatccaaagtaagcagaagaagagaaataaaaattggagcagaaatcaatgaaattgaaaacaggaaataaatagagaaaatcaatgaaaccaagagttatttctgagaagatcagtaagcctctagccaagctaataaaagagaagacacaaattactaataccagaaacagggcatatctagctgggcatggtggctcacacctgtaatcccagtactttgggaggctgaggtgggcggatcacctgaagtcaggagttcaagaccagcctggtcaacatctctactaaaaatataaagattagctgggcatggtggtgtgtgcctgtagtcccagctatctgggaggctgaggcaggagaatcacttgaaccaggaggtggaggttacagtgagctgaaatcgtgccactgcactccagcctgcatgacagagtgagattctgtctaaaaaaataataataaaaaaatataataataataataataataataaaggttggggggcatatcactacaggtcccatgaacgttaaaaacagtcggccgggcacggtggctcaagcctgtaatcccagcactttgggaggccgaggagggcggatcacaaggtcaggagattgagaccatcctggctaacacggtgaaatcatgtctctactaaaaatacaaaaaaaaaaaaaaaaaaaaaaaggtggtgggcacctataagtcccagctgctcgggaggctgaggcaggagaatggcgtgaacccgggaggcggagcttgcagtgagctgagatcgcaccactgcactccagcctgggcgacagagcaagactccgtctcaaaaaaaaaaaaacaaaaacaaacaaacaaacaaacaaaaaacacaacatagtccaagagcctggtgtgattccgttctgcatggctgttctcttgagaagtggttgtttatctccgtccaccttctttcccacctaagtgcatgccaccagccaatggaagatttgatgagccctgaggccccagaactatcttttcggttgtgaactaaaggccgacaaagattatcactttaagatggataatgatgaaaatgagcaccagttatcttaaagaacgttcagtttaggggctggtgctggtgcaaaggatgaattgcacattattgaagcagaggcaatgaattacaaaggcagtccaattaaagtaacactggcaactttgaaaatgtacagccaatggtttcccttgggggctttgaaataacatcaccagtggtctgtcggttgatgtgtgcttcagggccagtgcatattagttgacagcaattagtagctgtggaggaagatgcagagtcagaagatgaagaggaggatgtgaaactcttgaagtatatctggaaagcagtctacccctggaggtggtagcaaggttccaaagaaaaaagtaaaacttgctgctgctgaagatgatgaagatgatgatgatgagtttgatgatgaggaagctgaagaaaaagcaccagtgaagaaatctatacaagatactccagccagaaatgcataaaagtcaaatcagaatggaaaagactcaaaagcatcatcaacaccaagatcaaaaggacaagaatccttcaaaaaaacaggaaaaaactcctaaaacaccaaaaggacctagttctgtaggtcctttgcacttaaagcaaaaatgcaagcaagtataggaaaaggtggttctcttcccaaagtagaagccaagttcattaattatgtgaagaattgcttctggatgattgatcaggaggctattcaagatctctggcagtggaggaagtctctttaggaaaatagtttaaacaatttgttaaaaattttccatcatttcatttctgtaacagttgatatctggctgtcctttttataatgcagagtgagaactttccctactgtgtttgataaatgttgtccaggttccattgccaagaatgtgttgtccaaaatacctgtttagtttttaaagatgcaactccaccctttgcttggttttaaatatgtatggaatgttatgataggccatagtagtagtggtggtcagacatggaaatggtggggagacaaaaatatacatgtgaaataaacctcactgttttaaattaaaaaaaaaaaaaaaaagtccaagaataccatgaacaactctatgcccacaaatctgataacctaaagtctaccacccatttatggtaactcagcaaacttggaatagagggggaacttctgcaacttgataaagaacatctacaaaagtcctacagctaacatcataatgatgagaaactagaagctttcctgctaagatcaggatgtcctttctcaccactgattaacatcatactggaagtcctagcttaatattagcagtaaggcagaaaaggaaataaaaggtgtgattggaaagggagaaatagaattgtttttcttcacagatgacatgattgtctatagaaaatctgaaggaatcaactaaaaaatgcctggaactagtaagcagttataatcaagttgtgggatacaagatgaatatataaaagtcagtcactttacaatatgccagcaatgtacaagtgaaatttgaaattaaaaattaaaaacacaataccacttacattagcattcccccaaggaatactgaggtataaatctatctatcatctatctatctatctatctatctatctatctatctatctatctaatctatctatctagaactgcctgaggaaaactacaaaactgatgaaattgaaggactactaaataaatggagatatatttcatgaccatgcacaggatgactcagtattgtcaagatgtcaggtcttctcaacttgatctatagattcagtacaatcccaataaaaatcccagcaagttattatgtggataacaacaaactgattctaaagttcatttggaaaggcaaaagatccagaatagccagcacaatgtttaaagagaagagttggaggactctcacagctgacttcaagagttatgataaagttataataaacaagacagtgtggcattggtgaaagaacagacaaatagaccagttgaatggaatatggagcccagaaatagactcatgcagcctgggcacagtggctcacacctgtagttctggaactttgggaggctacttgaggccaggagtttgagaccagcctgggcaacaaaacaacaccttgtctctacaaaaaaaatattttaaattagccgatgtggtggcacacacctgaagtcctagctatttgggaggctgaggtgggaggattacttgagcctggaagttcaaggctgccgtgagctatgatcacgccactaaactccagcctgggcaacaaagaaagaccttgtctcaaaaaaagaaagaaatagactcacgcaaatacagtcagctgatctctgacagaggaccaaaggcagtactgacaaaggaccaaaggcagtattatgatggagaaaagatagtcttctctacaaataatgctgggacaacaggacatctgcatgtgaaaaaataaacatagatcttacgcccttcacaaaaattaactcaaagtcgatcttacatctaaatgtaaaatgctaaattgtaaaactcatagatgataacaacagaaaatctagatgaccttgggtatggtgatgacttttagatacaaaaccaaaggcacaattcataaaagaaataattgataagccggactttgtaaaaatttaaaacctgctctgctctataaaagacactgttaattaagagaatgagaagacaggacagagactgtaagaaattatttgcaaaagacatgtcagataaaggactgttatccaaaatacacaaagaaatcttaaaactcaacaataagaaaacaaaatacctgattaaaagattcagcaagacttgcaccacacatcaccatacagataacaagacaaaggatgctactgagagacaggactagctggatttcaaatctaggccgactaagaattcctaagcctagctgggaaggtgactgcacccacctttaaacacagggcttgtaactcagctcacacccaaccaatcaggtagtaaagagggctcactaaaatacaaattaggctaaagcaggaggtaaagaaatagtgaaatcatatatcgcctgagagcacagggggagggacaatgatcgggatataaaccccaggcatttgagctgggagtggcaacccgttttgggtcccctcccattgtatgggaactctattttcattctattaaatcttggaactgcatgctcttctggtccatgtttgttacggctcgagctgagctttcgcttgctgtccaccagtgctgtttgccgccgttgcagacctgccactgacttccacccctccggatctggcaggatgtcctctacacttctgatccagcggggtggcacccactgctgctcccaatcaggctaaaggcttgccattgttcctgcacggctaagtgcccgggtttgtcctaatcgagctgaacactagtcactgggttccacggttctcttctgtgacccacggcttctaatagagctttaacattcaccgcatggcccaagattccattccttggaatctgtgaggccaagaaccccaggtcagagaacaagaggcttgccgccatcttggaagcggccctccaccatcttgggagttctaagaacaaggacccgcctggtaacacattaaagaatgtaaattaaaatgagataccaccacatacctgctagaatggccagcattcaaaacactgacaccaaatgctggcaaggttatggagcaataggaactctcattcattgctggtgggcatgcaaaattgtagtcaattttggaagacagtatggcagcttcttacaaaaataagcatattcttaccatacagttcagcgtatacactccttggtatttgcctaagggagctgaaaacttgtccataaagaaactggcacacagatacttatagcacctttattcataattgctaaaacttggaagcagccaagatgtctttcagtaggtgaatggataaagtgtggtacatccagacaatgcaatatttttcagcactaaaacaaaatgagctactaaaccatgaaaaggcatggaaggacccaaaacttattttagaattatagaaagccccatatcttattcaataaaagttattcctatttttaaaaacccatacagtatacatttggaaaatctgaatatcaattatatgttaaacaatgatagtgttgtataaatgttaaattttctgaatgttataattagatttttgcagtgtaggagccagtccttgttcttatgaggataaacactgaaatattgagagacaaaatgccatgatgtcaccaacttattggtgtagcaaagaggcttggcaataacatcatccccccaaatatatatagaaattggcaaagtaactaatggtgattctaagtatttgtattattctaacttttctttaggtataatttttttcaaaggagttgcggaggttaccgtagatgttgtaggctatttgtccatgtcaaattagctaccgatccactagaatgattataagcaaaaagaccgacaataccaagtgttggtgaggatgtggggaaattggaaccctcttacaatgtaaaatgtaaacaggttggtagttcctcaaaatgcagagtagagttaaccataatacccagcaatttcatttctggttctataacccaaagaaatgagaagatatgtccacacacaaaaacttgaatgtgaatgttcatagcagtgttattcataattgctagcagctagcaaatgtccatctactggtaaatgcatagacaaaatatgacgtatccatatgatggagtattattcagcagtaaaatgtaataaacaacttaaacatggcacagcatagatgaatctcaaacaccttattgctaagtgaaaagacaaaagattaagttgtagaattccatttatgtttggtgttaggtaaggtaaatctgttgaaacagagccgtgtttgcccggggccagcaggtggggagtgattgccagtgtgcacaaaggagctgtttaaggtgatgaaaatgttctactttaaagtgatgattgtacaactctgtaaatttactaaaaaaatcaccgaactgtgtatgtacatacattgagtgtgtttcatggtattgtaagcaaaatcttagtaattaaaaggctcttggtttagctctgggtaagatttgaagcagtattaagactccttctgcttttcggggtcctcttaggggcttacggtgagacatatcctgccattgaagatgacgtcctccctccaccatcacagttgccctctgcacgggagcgcaggaggaacaaatggaaaggactagacattgtatgtatgagacttttctcccccttttcaacttagaagaatgagaggtctgggttctgacctgtgctaaatctgtgtggcccaataaagagcacttgcttgaaattcagacatgggtctgaatctaggctctgccttgactggatgaccttgggtagctattgaattctgctgctttggcttcttccagataataatagtattttcttgtctcctggggtggctgtaagtagctcctcatcccaaccttccttcttctcctgcagaatatatggatttcagagaggcacaagaaggaactgatgtcatttattgaaaagcttcataataacctaattctgtgatataggcatcaccttcatttcggtcaaatgacttgccaaggtcacatgggcaagaaggctgagattcaaacccatgttctcctcactctgctccccagctttacaatatagccagtaaaaagtagaggctttggagtttatgtcccagcaatgtcacctccttgttgagtaggcagcttgggcaatttcttaaactctgtgtgtgtttccttatatatgacgtgaagatgcagttatatgtgaagcatttagcactgagccaagtatgcagagacctcaccaagtaacagatgttgctattagcgttattatatgtacagcattaccaggtgaaaatagctttgctttttgccttaggcaaccaccagtctactttggtttctatagatgtgccttttctggacatttcgtataaatgagatcatacactgtatgattatttgtgactggatttgtctttcttttgaaggtcattcatgttgtagcatgtgccagtactgaagcctctttagtgttgaataattttccactgtattagtatcccacattttgtttatccatttaacaatagatatttgggttgttttcactttttagctagtatggatactattaatgttcatgtagaagtttctgatgtttttattactctcgaatatatatacctagaaggaaattgttgggttatatggacactttgtatttagcattttgaggaagtaccagacttttccaaagtggctgtaccattttaccttcccatcatccactgagggttgtaatttctgtatatcctggccatcacttagtgtcttttgattttagccatctattgagtgtaaagtggtgtcatggtggttttgagttgcatttctgtaatgatattgaacatcttttcatggtttattagccagttgtatattttcttaggagatatgtctattcaaatcctttgctgatttgtttttttttttgttttttttttttgatacagagtcctgctctgtcacctaggctggattgcagtggcgtgatctcagtgcactgcaccctctgccccagtggggttcaagggattctcctgcctcagcctcccaagtagctgggattacaggtgcatgccaacacgcctggctaagttttgtatttttagtagagttggggtttcgccatgttggccaggctggtcttgaactcctaacctcgggtgatccacctgcctcggcctcccagagtgctaggattacaggcatgagccaccgcgcccagccctttgtccattttcaaattgaattgtctttttattgagttgtaagagttcttttacattctcactacaagtctagttatcaatgtgtgattttcagatcttttttcccattctgtatctttttaactttcttgatggtgttctttgaagcacagaagtttttaattttgatgaggtccaactcatcactctttcttgggcttttggtgtcttaattaagaaaccattgccaaccacaagatcatgaagatttacttgttttctttcagtttgttcttaattgtaggtccatgatacactttaatttttgcacagggtgtgaggtgcaggggtccaagtccattcttttgcatgtggccatccagttgttctagcagcatttgtttaaagactgttctcccactgcattttgttaactccgtccataaacgtaaggatttatttctatattcttcttaatcttccattgatctacatgtcttttcttatgtcagtaccacactgtcttgattatagctggactaagcccctgctgcttcagttttttccttttgtgtcctataattctcaagctttatcctgactggcagcatttctgtcatcacaaatgttactccttatccttgagagtcatctgagcttgcatggataagcataggagccataatatacgtgctctatattttcatgttttattttgttcatcacagtgtacatttgagggcaagaggatgttttgatttgctggtttttttctttttttttgagatagagtctctgtctcccaggctggagtccagtggcacaatctcagctcactgcagcctccacctcctgcctcagccacccaagtagccggggactacaggcgcctgccaccatgcccagctaatttgtatttttagtagagatggggtttcaccatgtttgccaggctggtcttgaactcctgacttcaggtgatctgcccacctcggcttcccaaagtgctgggatcacaggtgataggcaccatgcctggccctgattcactgatttgtgaacatattttgtgttaatgactttctgaagttctgttttctaactacaggatagcagtcgtcctaatgtagcaccagatggtctctctctaaaatctatatccagtgtaaatgttgatgagcttagagtgagaaatgaggaacgaatgcgaagactgaatgaatttcacaataaacctattaatacaggtaaatgaccaagtgtaatggcctatagtagaatcctgtatgaacttttaaactttcttactcaaggctttcactaacgtctgagggatagatggaatgagtttgaagacctttgagttgtatggcccaagacatagtaactattgagcaaaaccagacctcaggatgcagtttgcatcagattttctctatcagagagggtgcccattttagagtggagtctaaacaggtaaaatagtttttgcttattaaacatatccaggctttgctttcagcaaagaaaatgctatatgataatagtaatcactttactaaagtaaaacattattagaaattagcctaaagactttgagttctttaacacttatgctgtatatttgcagtactacaaagaaaatttttaccttcttctttggctttccacaccatggacaaagtctcagaagtcaaataaagctagtcgtctcctcattatgagtgcatttttgtgacttgcaggttaaagctagtcatagagcacaaggcaggatggttccttagacacctaacaagctaccctgccagccctacaccacccttttctataccagtgctattagtcaccgggataatgggacactttcatattggtaataataatagttttagcaaattactggagtggtctatttgggaaatactctttagtctgttaatctacattacaataatctgttaagatttttttagatcctacctttaatactgtgttaatttaaaactgtactcatatactatctatctagcagtcaaggtgtggtgtgttctaatggtggtaattccacaccaaacacaaagcagacatggttaattgatgggacagtaggaaaggatgtctttccagctataaggcattttcttttagacccaacaaactgaattaatatttaacaggaatatatttgagggaagatagcattttaagaatctttttcagaaggtttttaatgtctacactgttttttaacattgtcctttcaaacaggagctttttgttattatgtggattgactgcacataccaatccttcacagaccaggagaattaaaaaaaaaaaaaagaatatgatatcacagggtaggaagacagattttcctattattatacctaataataaataaaagtaaaatacagatagaagttgcgtacaatcaatcagattcaattaaagaatgaagcaagagctacctcttcattgactggacacggccttgttagattaggtgttttaagaatggaagtaatctcatgccaactagtgttttcccaaaataacttaataatttccttatagcagtgttgtaggttgaagagtattccccaaaccttgctttaaaaaaaataaaaagaaaaaagaaagaaattttatgtgtagccattaggcttctcctgaggtaacagttacaaaataagactacctacattcctcctgttgactttgttttatggagaggtgcctttgatatgcttagaatccctctggttgctagtgccatggagtcagcttactcagttgatcattttttgttttacaaaattggcctttgtgggcccactctcctccctctaaaatagggtggggtggggtgagtctaaccaaaacaaacaaacagtagagttcaggatatgagactgtggggaaatgctgagttgtaatgagttggactacaagagacctgcgcttatgtctcctgcctgccacctgtgttacctgagccacgtgtcccttgcctcctgtagatgatgagagttcactggttgaccctgatgacatcatgaaacacataggggatgacggatcaaactctgtagcaactgagccctggctccgccctggcacttcagaaacgctgaaacgtttcatggcagagcagctgaaccaggagcagcagcagattcctggaaaaccaggcactttcacttggcagggcctgtcgactgcacatggttaaaataaacctgtactggacccagtagtgccttttaaggtgaaaggaatggtaaatctgtacctttaatatgtcctacttttggcccctacctgaaagttactttttttccatcatctgtatataaaattatttttatcatgatgtatattatgtacataaataaaaggccatgattattgatttatataatagaattgtatagattatttttgcacagttttgtcataaattagggtggtaatgaactggattgaactactatatgtgcattatattgaattctgcttgtcattaagataaggtgaataagtgtcttaaacgtcctgtaaaaccggactcccctttgttacatgcacattttccattgttacctcgatgcaaaagaattcatttagtaggtacatctattgtagctgtgattattccagtttctgtgtgatgcaatcaaatgtcctattaattaattattatttcatgtcatttgtagctactgatacagcagaaatgaagggaactgtaattacttgtatttttgtaagccatacgttaaatgtttgttacatcatctttctgcttctatttttatgccaatgaaggcatttgtcttgttactaattacatgatgtaactacttcttgatataaataaatttttattttaattactaaaa

SEQ ID NO: 1161 - DNA, 6954 bp, Homo sapiens
ggggcgtgaagggagccgggatcagccaggggccagcatgagccggagggagggaagtctgggtaaggggctgagggaccggacgccgggtcgctgaggggcgcaggagtcagagggattgggagctgggggtctgggtttccgccacccccgggtccgggaggggagcggccttggcggggaagggcagggctccggtgtcaggtaacgagtgagcgggtgagttgtgagaaacagcaggcgctagggtttagaggaggcctggggctgaggtttcagggacctgggctcagggcttagatcaccggttcgagtacacccagggggaggactggggtcggggctggggcaggacccctgcgtccactgagtctcgggaaagaatcagagctggggggctgaaggaaggggtagagtaagggaaggcagtcttggagtcacaggaagtagtgagtgacaacaggagacgaaagtctgggctgctgaggatcgcgactggtgctgggaaacttcgggggtggggcgggggcggggcaccgggtcaggactacattccccagcacgcatcgggcgcgcgctgtgcgtttcgggaaatggagtccctcccggggcgccagacactggctcttgcggaccttgattcgctgactagccaggccagcgccttgcatggatggggcatcagggagagaaatggaaatggaagtcagtctccctatctgtaaaatgggccttcaaggcacattttgatatgaagttctgtacttcgatgatgttgaagtccactagcagtcactgaggtagaaatatgtaagccctgtcttcaaagggctctcaggctaaggcagatacacacagaaaagccgttaaaagagctaccctggaactcatgcaaatggccttaagtcaaaggaaggagttcgtttataaaggagaagtgattctggaggcttcactgaggaggcagtacagtcatgcactgcataacaacatttggtcaacaggtggaccgcacagacaatggaggtcccataagattctatgcatttttagcctgggcaacatggcgaaaccctgtctctacaaaaaaatacaaaaattaaccgggcatggtggcgcatgcctgtagtcccagctacacaggagacccaggcgggaggatcgcttgagcccaggaggtcgaggctgcagtgagccaagattgcaccactgcaccccatcctgggcgaaagagcaagactccgtctctctctctctctctctttctcttttgggatggagtctttctctgttgccaggctggagtgcagtggccttggctcactgcaacctctgcctcctgggttcaagcaattctcctgcctcagcctcccaagtagctgggactacaggcgtgtgccaccaagtccagctaatttttttttttttgtatttttagtagagatgaggtttcatcatgttggctaggatggtattgatctcttgacctcgtgatccacctgcctcagccctccaaagtgctaggattacaggcgtgagccactgcgcctggacaatttttttttttttttttgagacgaagtctcggtctgtcacccaggctggagtgcagtgacctgatctcagctcaatgcaacctcctcctcccaggttcaagcgattctcatgcctcaggccccctggtagctgggattacaggcacccaccatcatgcctgactaatttttgtatttttagtagagacagggtttcaccagatggtcccgaactcctgacttcaagtgatccgcccgcctcatcctcccaaagtgtgggattaaaggcgtgaaccactgagcccaatgcctggctaatttttgtatttttagtagaaacggggtttcaccatgttggccaggctggtctcaaactcctgacctcaagtgatctgcccatctcgggctcccaaagtgctgggattacaggcgtgagccaccacgcctaaccgatatatattatataataaaatacatacctatatatgtattttaactgtagcttttctatgtttttatttatttatttatttagagatagggtcttactctgttgcccaggctggagtgcagtggcacactcacagctcactgcagcctcgacctcccggggttcaagtgatcctctcatctcagcctctcaattagctgggactaccggcatgtgccactatgcctggcttatatttgtattttttgtaaagatggggtttcaccatatcgcccaggctggtcccaaactcctgggctcaaacaatccacctgccttggcctcccgaaatgctaagattacagacatcagcaatctcacctggcccttttctatgtttagatacacaaataccactgtgttccagttgcctgctgtactgtaacatgctgtccaggtctgcagcctaggaacaattgactaacaccacatagcctgggcgtgtagcaggctgtaccacctaggtttgtgtaaatacactctacgatgtatttacgtactctacgatgaaatcgcctaaggatgcatttctcagaatgtatccatgttgttaagcaaggcatgactgtctttgaatttgactttaataggatttcaacagtgatttggggacaggcaatacatttcaggtagaccacctgcttgacaaagttctggtgcctcattttccttcagttggaatgggacagaccctgatggggtcaggaacaaagagccagcgtgggagaggtgatcaatgagcaggaggttggccatcctcattcctcccccctttcccaccagaagacccccagactgattcctcagtctcacttcttccccacttggaggccaagatccgtcagacacacagccttgcgcacctcctcaccaaatacgctgagcagctgctccaggaatatgtgagtgggaatgggggtgggggtgccgggggcctggggaatgggagcagacatcacagaggtcctcgatcacccattctctcaacctcattttccaactgtggaaatcagggctcctgagagggacagcaacttgcccctggccacacagcaaattggaagaggaccctgtctgtgacccagatgccactctgtcctctccagcttagaggcaccctcctcagtgctttgtttttgagaggaggcctcgctctgtcgcccaggctggagtgcagtggtgccattatggctcattgcagcctcaacctcctgggcttaagcaatcctcctgccttagcctctcaagtaggtggggccacaggcacacaccatcatgcctgggtaattttttcattattttgtagaggcagggtcttgctgtattgcccaggctggtcttgaactcctgggctcaagtgaccttggtgctttaagtcagaggtagccaggtagcctggggcagtgaagagaactctgatctgtatctcaggaaaccgaggttctaggctctgcgtgaccttgacacctcccctccatgggccttggtctctccccaacagtaaaaggaggcagctaaatatgattaactctgaactctcccacctgggatattcagggaagccaagaagaggttccaatctggagcaacagttatcccaagagggcactttcacagaagacagggatctgctgacatctttagttgggcagaggaccctgcccaaggaaagaaaatatttccccaaattaccctcgtgtagtgaagggagggtatagctttgaatcagactgcaggcctgccaacttgttaactgtgagcttgggcagtaacaataacattaaaaataataatgtaacaattatggcagcggatagtgggagaatagtggcataatagaactagctttgggctgggtgcgttggctcatgcctgtaatcccattgcttttggaggctgaggcaggaggattgcttgagctcgggagttcgagaccagcctgggtaacacagtgagccctcatctcttaaaaaagaaaagaataaaagaaaagaaaataaaaaggaaaagaaaaaaatagccaggcgtggtggtgtatgcctgtggttccatctactcaggaggctgagtgtggaggattgcttgagccctggaggctgtgtgatcaaaccattgctctccacccttggcgacagtgtgagaccccatctatttaaaacaaacaaagaaaactagctttgtactgctatgaactttggttcaaattccagctctgccacttcctagggtaagtcactatagtcactgtatctccagcccaacattttttttttttttttgaaatggagtttcgctcttgtggcccaggttggagtgcaatggtgcgatctcagttcactgcaacctccgcctcccaggttcaagggattcttctgcctcagtctcctgagtagctgggattacagtcaccaccaccatatctggctaatttttgtatttttagtagagatagggtttcaccatgttggccaggtgggtcttgaactcctgacttcagctgatctgcctgccttggcctcccagagtgcctggattacaggcgtgagtcaccgtgcccagccccacatttatctttcatttgttcattcatatgatgttgattcattgagcccctgctcaatgcaggtacagaggttggggaggatagggaagggaatgaagcccccttggcccctggactatcttatatgatttccatgaagacaggacaggaagcttccccattcattgtacagatgagaaggctgaggctcagagaagggaagtggttttgccccaaactgcacagctagtaagtggtgaagataggatttgaactctggtctgtaaggtaactttaataaaagagctgacatttttactgaactcttcctgggaccaggccctgtcttgaacacttgacatggtcataactgctttatgaagttgctgctgttattaggtcctatttatttatttattgagacagggtctgactctcacccaggctggagggcagtggtgccatcatagctcattgaagccttgacctcctgggctcaagcaatcctcccacctcagcctcagcctccggaacagctggaactacagacatgcgccaccacactcgctatttttttttttttttttttttttagagctgtggtcttgctgtgttgcctaggctggtctcgaacccctgggctcaagtgattatctcaccttggcctcccaaagtgctgacctaaactggcccagtctgggtccagtttagggaggaagaaacaggcattggtgtcaagcgcatgccactttgttttgccttaaacagagcagctctgttaggagggattatcatctgcaagatgaggaaactgacacccccagagagcgggttggagagcccagttaacagccccctgcccgtgctccggggccccgctgacccgccggccgtgtctccgcaggtgcagctccagggagaccccttcgggctgcccagcttctcgccgccgcggctgccggtggccggcctgagcgccccggctccgagccacgcggggctgccagtgcacgagcggctgcggctggacgcggcggcgctggccgcgctgcccccgctgctggacgcagtgtgtcgccgccaggccgagctgaacccgcgcgcgccgcgcctgctgcgccgcctggaggacgcggcgcgccaggcccgggccctgggcgccgccgtggaggccttgctggccgcgctgggcgccgccaaccgcgggccccgggccgagccccccgccgccaccgcctcagccgcctccgccaccggggtcttccccgccaaggtgctggggctccgcgtttgcggcctctaccgcgagtggctgagccgcaccgagggcgacctgggccagctgctgcccgggggctcggcctgagcgccgcggggcagctcgccccgcctcctcccgctgggttccgtctctccttccgcttctttgtctttctctgccgctgtcggtgtctgtctgtctgctcttagctgtctccattgcctcggccttctttgctttttgtgggggagaggggaggggacgggcagggtctctgtcgcccaggctggggtgcagtggcgcgatcccagcactgcagcctcaacctcctgggctcaagccatccttccgcctcagcttccccagcagctgggactacaggcacgcgccaccacagccggctaattttttatttaattttttgtagagacgaggtttcgccatgttgcccaggctggtcttgaactccggggctcaagcgatcctcccgcttcagcctccctaagtgctgggattgcaggcgtgagccactttcccagcctctctttgctttgcctgccccgttctcttaactcttggaccctcctcgtctgcatggtaactccgtctgagtctaccattttcttgctctccctccttccttgggcctgcctcagttccctttggcctccccctttacccagctcttggggtgtctctgttttttccatccccacttcctgccttctcgtggccctgtgtgagcacatgtgtacatctcagccttatctcaaggaggtgacaccttctctccttgtccccatctggctgtctctctgtgcttccctggccaggggcgtgcctgctggtcctatggggggaaggctactctgcatctcagccaccttcctcaggctcactccacctacatccccagtctgccacaccccatccctttgggcctcagccctgtccctttgatgtcctcctttccttcagcccctctgccctgtccctgcacacctccactgcctcccagcagatctgtggagacaaaacaagcaacaccttaaaagagttttatttctgaaaataaattaattttttgtaaataaaatgtttaaaaataaaaaagaaactaaagtta

SEQ ID NO: 1162 - DNA, 28634 bp, Homo sapiens
tcgtgagactgcagacccgctaataaaatccaccccaacaatcgctgtgtgccgctttagtgcgctcgccgtcggctctacctgcgtgctttagctccttctcgcctgatccttctgtctctcccaaccccggacacccggcttcgactggttatatcttcggtgttcttttcctctcttcttctttcgcggttcagcatgcaggaaaaagacgcctcctcacaaggtttcctgccacacttccaacatttcgccacgcaggcgatccatgtgggccaggatccagagcaatggacctccagggctgtagtgccccccatctcactgtccaccacgttcaagcaaggggcgcctggccagcactcggtgagctgggtctgtctggggctgtccacagttgggcggtaaaagagatacggcttatgaatttgaaaggcatgtaagtaatttataatatgacttataaattaggaaggcaaccgaaagatgtttctacactgtaattcttgcagcacagctttgtatcggatggtccagtgatcgtatttcttttgataagcaggactggaaggagccgtttgtccagcttgccatttagatttggcctgaaattcaggtgattttgacaaatttgcaattaaaaatcgaaggtcataacttttttgagttacctttagcagcataaattttaaagatgtagtacggagtcagcttaaaaaatattaagggtctgataacttgactagaattaagattgtttccagtagctgtatgaatagttattgagtacctactatatgccaaatacgtgctcgtatatatcatgtgtattacatgtattgtctcatctaatcctaacaacaaccctagtctgaaccgaattctcattttttcccaataaagaagctgagatttagggagttaagtaactagccttagactagtaagtattggagatggaattcaaactttagaaacttgaggttgctttaggaaccaactcctaggcactcagctacactatgctatctctaataatgctagtaacaatttagcctattgcgtcatttaagcactgtggcttagtgattaagaacacaactcatgaccgggtgcagtggcttacgcctgtaatcccagcactttgggaggctgaggcgggtggatcacctgaggacaggagttcgagcccagcctggccaacatggtgaaaccccatctctactaaaaataaataaattagctgggcatggtggcgggtaatctcagctactcgggaagctgaggcaggagaatcgcttgaacccaggaggcagaggttgcagtgagccaagatctcaccattgtgctccagcctgggtgacaagagtgaaactccaactcaaacaacaacagaaaaagagaacacaaatcttatagtcaaaggctaggtttgcattctgacaccacttcttctgagctgggggaccttgggcaagttagttaacctatcaaaacctctgactgatcctgtataaatggggataataatagtatctaccacataagttgttgagatgtatttaaggctgtatagtacataataattactcgatggtaatttgttttttcatgatgttcacatttacactatttccatttgatcctcacaacaaccaggtcagaaggcaggacaggtattatgtactttttatagaaaaggaactgacacagagtcatacatgaatgatctgtaaagcctacgaaggagccctctttgttaatcacatagcttttttcccccttttggtggcatacttgatggatcttagagaatttaaaagttgctgagatttgtaagaattagttaaagtctgtaagtccaaagccttgattatgctttggaaaccacttcagtgtgttatataagttgaggaaaatccttacagacagtcccttgttttgtgagatacagttctaaggccatttctacaactggtttagaatactctttactgtattttagaatcaaaatatgtacacagcctctctttctttctttcttttttttttttttttatttttcagagagagtcttactctgtcacccaggctggagtgcagtggtgcgatctcggctcactgcaacctccgcctcccgggttcaagcgattctccggcctcagcctcctaagtagctgggattacaggcgcctgccactgcgcctgactcattttttattttttttagtagagacggggtttcaccatgttggccaggctgctcttgaactcctgacctcgtgattcacccgccttggcctcccaaagtgctgggattacaggtgtgagccacggcgcccggctcacagcctctctttcaaacatgcagttcgtttcttgtgtagggtttaatgaaagtgtagctgcccaagctttggaacttagtgcaaaagtttaccattcaggtgtgatattaataattaaatgtttccaggaagccagcagggatggttaaatccacaaaaactctgcttaatatcttttttttttttttttttttgagacagagtcttgctctcttgcccaggctggagtgcagtggtgcgatcttggcccactgcatcctccacctcctgggttcaagtaattctcctacctcagcttcccgagtagctgagattacagctgcccgccaccatgcccagctaatttatttatttttagtagagacggggtttcaccatgttggccaggctggtcttgaaatcctgacctcaggtgattcacctctgaaagtgctgggattacaggcatgagccaccgcgcccggccctttttaaaaatcagctaagaccactaaagggaatttgaagagctgaatgagaaacgggaggtacctttctgtggcagaagccacgtgaatccaaacttttttttttttaatctgcagggtacagctgcaggtcatggtaagaaggtgatggtggggaggggtaaggatatcctggagccctataaaatatgtctgctcaggttgggcgcggtggctcacgcctgtaatcccagcactttcggaggctgaggcgggtgggtcatgaggtcaggagatgaagaccaacctccccaacgtagtgaaaccccatctctactaaaaaagtacaaaaattagctgtgtgtggtggcgtgcctgtagtcccagctactctggaagctgaggcaggagaatcgcttgaacccgggaggtggaggttgcgccactgcactccagcctggcaacagagcgagactccctttcaaaaaaaaaaaagtctgctcaacttgtcataaacaagggcacatagcaacaaaacttttagaagttattgttgttaatactgggagcttctgaatcagaaacaaaggtgaaagagtggttgtgttttgttatgttatgtgaagcagagggagaaaattataggacttctaattaatgttcgaatccttggttcacaatccggttttgacactccctaggtactattgcatttggcttcactttcctcaaagccagtcataaggattagtagaatgactggatgaatatagctagcagggtgccatatatgtaaaaggagaataatgcaatttttttttttcccgagacagagtctcgctctgttggccagcctggagtgcagtggcactatctcggctcactgcaacctccgcatcctgggctcaagcaattctcctgcctcagcctcccgagtagctgggattataggaatgcaaatttttaaaaagtattgtgtggagctgttttgccaggaattgctccctatgctttgagccacttttgtagagccaagatgtgaatgaatgttgagcattggtaggatgtgatcataacttcctgttgtatgctaaatagaacttgaatcagcctgacagatggctcactcctgtaatctcagcactttgggagaccaatgtgggaagattgcttgaggtcaggagttcaagaccagcctgggcaacatagctagactgcctctacaaaaaataaaattaaaatatttgttaggcatggtgacatgcacctgtagtcttagctactcaggaggctgagatcggaggattgcttaagcccaggagtttgaggctgcagtgagctatgattgccccaccgtactctagcctgggcaacagagtgaggtcctatccttaaaaaaaaaaacttgtatcacttaatcatttatttcttaggaaatgaaatacaggttagaattaggtttattctgttggctcatgcaagtcccttttcctaatgtttccagattaatgaaaaaaggtgagtctaacataataaacatactaataataaaaactgtcatttatttagtgattagcatgtgccaggaaacatgtagtgaatttgtgcattatctcattttatcttcacaacaattttatgaaccagatatctgtattttattcccattttacagatattgagattgactcttggaaatgtgaagtaacttacctagtgtcatgcagctcataagtggcagatacagaattcacatagagtttgtttgacttcagagcatcttgactatagccacagcactgttctgcttctgtattaaagcaagacatatcatgactaaagaatagaaactaattatggtagggtgaaactatagttctctatgttaggactctgataataaactgaaatctcttaggatgaactcgaacttgtttttttcagggttttgaatatagccgttctggaaatcccactaggaattgccttgaaaaagcagtggcagcactggatggggctaagtactgtaagtaatttccatttcacagtctagaatctatttttaaatgtatagagaaaaccatagaggcacagaatgtggaactgaaaagaaacagatttgctagttcaaaattcctgttctactgcctttgaattctttgcccaaggtccctcagttggtataatatgcatatgtgtaatcatcaggtaaaaatacgtatgaatagaggacaaatgaataaaggaaaaaattcacacgaatactacatttattaatactacatttatcatgtagtattcatgtgaaaacaatcttcatctgaaactgtcagtataaataaataaatggaaattaaatttaataacaccacctattagaatataaaatctttttttgagacagggtctctcattctgttgctcaggctggagtgcagtggcacaatctctgctcattgcaacctcctcctccaggattcaagcgattctcctgcctcagcctcctgagtggctgggattgcaggtgtgcaccaccacaccctgctaatttttttttttttttttttttgagacagagtcttgctcttgtcgctcaggctggagtgcaatggcaggatctcggctcactgcaacctccgcctcctggattcaagcaattcttctccttcagcctcccaagtagctgggattacaggtgcctgccaccacgcccagctaattttttgtatttttagtagagatggggtttcaccatgttggccaggctggtctcgatctcctgacctcgtgatctcccgccttggactcccaaagtgctgggattacaggagtgggccaccacgcccagccttttttttgtatttttagtagagatggggctattttggccaggctggtctggaactcttgggctcaagtgatctgcccacctcggcctcccaaagtgctgggattatagatgtgagccaccacacttggcctaaacttgcttatcctctggtttattcacctaataatttgtgcctgagaatagcactaaagttattttcagtggtcaataactcctgataatgtgctgtcagagattagagattaactccctaaacttttttttttaatgaagagagtcttgtgtattcattgtgattacacttatcagacaaatctcaggtctgattgcgagttttgttaaaatatttactgaattgcatattcatataattaacgtatgaatcatatctttgctctattctttatgtttgaaatttctcttttctttcttttttttttgatatggagtctccctctgtcacccaagctggagtgcagtggtgcaatcttggctcactgcaacctccacctcctgggttcaagcgattctcctgcctcagtctccctcgtagctgggattacaggcatgtgccaccatgcctggctaatttttgtatttttagtaaacacagagtttcaccctgttggccaggctggtcacgaaatcttgacctcaaatgatccacctgccttgggctcccaaagtgctgggattataggcattagccaccacgcctgccctgaaattcctttagtttgctatttttaaactgtagtttaactggcaataggccttttatctcagatatttgtaaagaattattttcttgaagtgtttcagagaaatattattaccaaggcaaaattgacttaacacaaaagtatctgtccacattatatattttttattttaaagatatcttattcttgaaatagaaaaggagattttgtaatggtattaatcaggggcctctagcaactcagcagtgatggcttcctatctgcattaaagtaagtcaggtaaatacttggaggtgtgttgtaacctataggcctgacttttcagcttactctaacttgatttttattttaggtttggcctttgcttcaggtttagcagccactgtaactattacccatcttttaaaagcaggagaccaaattatttgtatggatgatgtgtatggaggtaggtgacccctctcatttatattctgtaaacttgtattttacagataataaagtgagccctgaattaatattaacaatgttgccagtatttttgattatttattatagtttacaggtgtgacaggtacctctatgctctctcagacttgggaaaagaggagcataaacacttagggtccatgttctggaactgcttataagagagattatttatttatttatttgtttatttttagataggatctcactctgtcacccgggttggagtggagtggtacgatctcagctcactgcagtctccgcctcctgggttcaaatggttctcatgccctagcctcctgaatagctgggaccccaggcgcatgccaccacacctgactaatttttgtattttttgtagagacggggtttcgttgtgttggtcaggctggtctggaactcctgagctcaagtgatcctccctctccagcctcccaaagttttggaattacgggcgcgagccgcctcacctggccagagattatttactaagaatagtatttaaggtgctagaatgaatacgtagcacttgatcaacttgcagacatattctgctctagagaagataaggtttagagagacagtgttctcctgtaacttaatttttacctgtaataaagatgaaatacaactcaggttactctcaagagttcaaccccacacatccccttttgctttttattttttgtttggcaccagggaaactttcaaaaatttgttgagagatatgggcctcttttcccaaaaaatgttcttaagactacactgagtgattagcattttaattttaggggtctcatggattgaaccgctgaagcccatctatggctctaaatttaagaacttcccattaactcttcatttagcattaggtatatctcctaatgctatccctcccccctccccccaccccacaacagtccctggtgtgtgatgttccccttcctgtgtccatgtgttctcattgttcaattcccacctatgagtaagaacatgtggtgtttggttttttgtccttgtgatagtttgctgagaatgatagtttccagcttcatccctgtccctacaaaggacatgaactcatccttttttatggctgcatagtattccatgtgtatatgtgccacattttcttaatccagtctatcactgttggacatttgggttggttccaagtctttgctattgcgaatagtgccgcaataaacatacatgtgcatgtgtctttatagcagcatgatttataatcctttgggtatatacccagtaatgggatggctgggtcaaatggtatttctagttctagatccctgaggaatcaccacactgacttctacaatggttgaactagtttacagtcccaccaacagtgtaaaagtgttcctatttctccacaacctctccagcacctgttgtttcctgactttttaatgatcgccattctaactggtgtgagatggtatctcactgtggttttgatttgcatttctctgatggccagtgatgataagcatatacctaacgctaaatgatgagttaatgggtgtagcacaccaacatggcacatgtatacatatgtaacaaacctgcatgttgtgcacatgtaccctaaaacttaaagtataataaaaaaaatttaagaacttccattccaaagaaattaaatgttagctatttaaagtggtgaatgtggagaagacaggcttgcccttgcctttaagcccactgatttttgtatttaaaacaaaagcaaggaattttgtgaatatacatatacatatattccagatgcttccaaataattaaaatgtgatttctagaatattatcattttatctatttcctatctgaacaaaaagttaaatcactaagtcctttaaaacagcagttcccaacctttttggcaccagggaccggcgtgtttttttttttttttttgaggtggagtcttgctctgttgccaggctggagtgcagtggcacgatctcggctcactgcaacctccgcttcccgggttcaagcgattctcctgtctcagcctcccgagtagctgggattacaggcatgtgccaccacgcctggctaactttgtgtttttagtagagccagggtttctccttgttggtcaggctggtctcaaactcccgaccttaggtgatccacctgcctcggcctcccaaagtgctaggattacagatgtgagtcactcgtgcccggcctcagggactggttttgtagaatacaatttttccagggacagggggatggttccaggatgaaactgttccacctcagatcatcaggcactatttagattctcataaggagcatgcaatctagatccctcgaaagttagattctcataaggagtgcacaacctagatccttcccatgagcaattcacagtaggtttcctcctgtgagaatctgatgctgccgctgatttgacaggagactgagctcagggagtcatattgcttacccgctgctcacctcctgctgtgtagctggattcctaacaggccacaaacctgtacctgtctgtggcctgggttggggacccctgctttaaaggaagggacttactcttagtaatcattttatccctcagaaatttgcacaatgtttcgtattttatcttagtttcttatattagcttgttgagttgaaattatagaaatctgaaacctttagatacttttataatgcaatataaaagtctcatggcaaacataggtataaaatcctgaaaattgttgattttaaagaactttttacattatttttcaattttatattacctagggtcagtctacataccatcaaaagtctagtttctcattaatgacagaatattcttttgttgttgttgttgttattgagtatcaatatcaattttttctttaagtttttatgtgtaaaaatcaaatctaggtgtatttataaaaaattattttaagtcaaatgatttaccttgtttcactgtaaaaatctggtagtttgatttatattgtctcattttatcgattaaaactttcagaactacataacaaaaagatcaaaaaagtacaaagaatagtaaccaattcttttccattacaaagtatattgaaatttattttgaacctttcattgacattgattcatttagtttagagttgagaactaggtagaaattgtttgaaaagatatgatgtttcaggaagcatgtcacttagtggagattggatgttttgaaaaacattatttgcttcatgctacttttggatctcaagtgtgttttatttgactcttgagcctttagagaacaaaccttattattctttactatatcagatagccaaactatttaaccaaactagaattgcttttagttgcattttccttggtgactgagagttccatatattttgtaagtgtttatacatagaaggaatgaatgtttcttaatgcaatgttcttttcattttatctgattcccttctgtctcaggtacaaacaggtacttcaggcaagtggcatctgaatttggattaaagatttcttttgttgattgttccaaaatcaaattactagaggcagcaattacaccagaaaccaaggtaactcagctcattttcagttttgcctgtttttccttcgatgttttgttttcatcatttctgtttactagaggatataatttaatgtgaataacaaattttattttatgccattggaaacatcaacaaaattaagatagactgtcatctccggggtgttatagcataatggtagtacatgatttctggagtagaattcaaattgtgattctgttatcttagttagtatattatcttgggcaaattatttaaccaaagtctcagtttcttcatttgcaaaatggagataattataccggttttatagaaacgggagtgtgagaatcaaatgagataatgaatatgaaatgcttagtatagttcctggatacatggtaattgttaaaaaaatttctatgcaggagcacctaatttttaactgcatagccaaaagagtattggtaacagaagtcatcacagagattggactatagaaaaagaagcctgccaaacccccaaactcgaagcacagtggctttgccgggctgtaagggatgctgcccagatactagttagatgtggagaataggccacaagcaatctttagcttccatcctgggaaatttgtatgccaccggaaggtgttttgtgtctgagtgaatggcatatgtgatattctttcttgggaccttatttaaattctgtgtggataaaagaaggaccagtgtcttttataagtcagctgtttacaactttttgctaatgattaaaaggttagaattgtacccaagattatgttgcaatgaatgctaaaaaataaatatcttttcatgtacaaataattactttgcacattaacatggttgagcttttggtaattaaggtttgtttccagaagaacttgttttttatcttgcttgggagaaaagtcacattaaaatagctggtctgagtcttttttttttttttttttttgagacggagtctcaccctgtcacccaggctgtagtgcaatggcgcaatcccagctcactgcaagctctgcctcttgggttcaaatgattctcctgcctcagcctaccgagtagctgggattacaggcgcccatcaccatgctcagctaatttttgtatttttagtagagatggggtttcaccttgttggccaggctgatcttgaactcctgaccttgtgatccgcctgcctcagcctcccaaagtgctgcgattacaggcatgagccaccgtgccgggccctggtctgaatctttctaagggaggaaagcaaattatgagtacagtaagtcttgtcaacagaattttatatagtgactctaccaacttgaattaataccttttccttcctaaaatatcaggtttttcacttgaagtagaatgtttaagtccatgtaaaacctactttttatttatttggtaatttttattttttttattatcagtaggaataataaattcttaccaggaataatttttatagattctttaaataattcaagatttttgtagaatatgtattatttaaccatcttatcttttccagagtaaaactctaaagtcagaagagtttaaaccagatctcttgcccatttaaataacaggtaataaaaaaagaatcagctgggcacagtggctcatgcctgtaataccagcactttgggaggctgaggcaggaggatcacttgaaccaggagttcaagatatatagcgagaccctttctctgcaaaaaaaaaaaaataataataataattggccgagcatggtggcacatgcctgtagttccaactactggagaggctgaggtaggaggatcacttgggcctgaaaggtcgaagctgccgttagctgtgatcatgccactgcactctagcctgggcaacaaagtgagaccctgctgcttaaaaaaaaaaaagaaagtaattcagtacaatggcatttcgttcaacaaatagaattcttttctttggtctttttgataactatcaagcatctaccatgtgtctgaattgtggtaggttttgagatataaaggtcattgttactttttaagtaggcggtaaccacgttttctgttgtgggtgtcacttttcttctttagtctaaagcccatgctcttcaagtcttagatacttattctatagtttctagagtttctggcattaagttcatattaaatatatttttggcatcatagggataattctctttcattaaaattctaggatgtattcttacacaatctatgttattcatctctgagacaaaatttccagacactgagctgtctttggaatacactttcttttttaagaaaagtacaataattaactttagtacttttctgtttacatgtacgttatctcacttgatctttacaaaaaattctgtaagataggtattaccaacccaattatacagatcaataggatacattacatacctacggcttcagaaatttgcaggtaaggctgggattcagatttgaacctcccaacatcatcatccatgtgtttccattatacaatgtagcttcccagattgttacaatatatgagatgtatgtttgtaaagtatatttttacaaactactgttatttgctgaattattttagcttgtttggatcgaaacccccacaaaccccacccagaaggtgattgacattgaaggctgtgcacatattgtccataagcatggagacattattttggtcgtggataacacttttatgtcaccatatttccaggtaaatgaaaataattttttttggcacaattagtagaccacatatatctgtaattaggaaagaaaggacttgcttaaattaaaatcatgatcaaattcatgaaatctaatcataattaattatttactggatcgagaattaaatttggacctcttctaccattagttaatatcttttcaaacctatgttaatatcctctatgttactttgtgttttttatttattaaagcttaccagttctcagggctgtgcgtggtggctcacgcctgtaatcccagcactttgggaggccgaggcgggcggatcaggagatcagggatcaagaccatggtgaaaccccgtctctactaaaaatacaaaaaattagctgggcgcagtggcgggtgcctgtagtcccagctactcgggaggctgaggcaggagaatggcatgaacccgggaggcggagcttgcagtgagctgagatgacgccagtgcactccagcctgggtgacagggtgagactctgtctcaaaaaaaaaaagcttacgagttctcttagagtgtgtaaactctgaagaaatggccttattatgtgattgtatctgctaataccttatgcatagtaaggacttgaatgtttatgcattgattacaaatcagtcatatttttcagtcaccttgaatatttttatatatattctaaaagaaaagtgatgctcaatgatttcagtatatattatacatattatttctcttcttctagtttttattccttcagcactccatatactatgcctagatctctttaacttattattattttgaacttttactttatttattttacattatagctgtaagtatttatagtgctcttatgttagtctctttgggtggccataacagaatactataaactgggtggcttacaaacagcaatttatttctcacagttctgaaggctgggaagtcctcaatcaaagtgccagcagattcagtaccggtgagggcccactttctggtccatagatggagccttctcgctgtgtcctcacatggtagaagagacaaggcagttatctggggcctcttttatcagggcactgtattagtccattctcacactgctataaagaaataatccgagactgcgtaatttataaagaaagaggtttaattggctcacagttctgcaggctgtacagaaagcatgatgctggcatctgcttggcttctggggaggcctcagaaaacttacaataatggcagaaggcaaaggggagcaggcacaacacatgaccagagtaggagcaagagagagaacgagggggaaggtgctacacacttttaaacaaccaaatctcacaagaactcactcacaattgtgaggacagtcccaaggggagatgactctaaaccattcatgatatatccaccctcatgaactaatcacctccctccaggccccacctccaacatttggggattacaactcaacatgagatttggtggcgacacagatccaaaccatatcaggcaaaaatcaccctaatcacctcccaaaggcccacctcctaatcatactagtgattagatttcaatctatgaattttggaggacacaaatgttcagaccatagcagctctctttaaagatttctttcgctacctagccccctctgcatttgtttcctccccagaccacccctcccatacatctatcctttccttttttctctgtcttgtgtctagtttcatcctcttttgtgtttcactttcttttgtagatcactttgggatctctttataattaacttgtttcctgccttttccacacaagttctccctctctttcctctgagtaacccaactctttcctttccttgttaggagataccttcttcctgctcttttcttcctgcctgtaccttgtcatacttagtacacttcctgtagttcatctctattctgcagagttcctgaaaaccagctcattttctctggctcttcaattgggcagatgtttacaggttttattgtttacatttccccccttctgttctgggtccctgaagttgatccaggttgctgcctccatgtgactggctgactccctgggcagttggtataaacctgcttttcaccttcctccattttattcgaaggcattgtcatggtttattttcctttcctgaagcacacttcctggctacattgcattcagacaccttcgtgggccatctgcctttggctcataatgtatctttgattgctgattttatcaggtaaagcagtctgtttcccagtgaaaaatcttctggcattgtctatttggcatcttctatttgtcccaggtggttttcagtgtaagattccttatcgcaactccttagcccatatgccacttacattaggccagttaatacagcataggatagctttagctgagacacagtgagtcctgtatattcccaaaaagattgcatacgttttgtagcctggacctgcccgggttactcatcaaacctggccctctttctcctattactgtcactaacataggtctagtttttctacctttttgaagcccacatcacattccgcatgccaatgattggaatttgcttcatttcaatttggatttattccagctgaaatactcagaatcgcatcatccctaagtagccacatgtgttgtttccatgaagcaaatcttcctgaaaaaaatcttctcattgtcttaccttaatgaaaatggaatatattctctttcttcccagtcttttgtcctctggatcttctgtaagtctcacgaaaggcaaaatagacctaccatcatcaagtttcagagtagcacctctggagtcaggcagtctgggtgtgagtcctggctctaccagctttttaatctgagggatctatctcatttttcttagtcccctttcctcacctgtatgatgagagccataaaggtactgattttattgagttaggtattttgtacactgcttccctgggttatataaagtacgtagcatgattctcagaagataatgagatcagaggtgttagtgatttggtttttatttttccttctcttttggctgtagagtttacagaatgttagcactagaaaagaccttaggcctcacctactttgaccccatccctttaggaaccctaaatgaaaagttcccatagccacctatactaatatcttccaaagactaaacagctctaatgagggtgaaataaaaacacacagttctatgtttaggaaaatgtaaagggaaagatgttgataatgtatgtttttgtttgtttgtttgttttgaaatggagtcttgctctgtcgcccaggctggagtgcagtggcgcgatctcagctcactgcaaccaccgcctccccggttcaagcaattctcctgtctcagcctcccgagtagctgggattacaggtttccaccaccaccccccgctaatttttgtatttttagtagagatggggtttcaccatgttggccaggctggtctcaaactcctgacctcaagtgatccacctgcctaggcctcccaaagtgctgggattacaggcgtgaaccaccactcccggcttgacagtgttttattaagtggaaagtctacacttttcactctggttgtaaacaaatacattttaagactacaggattaacctagaggacattatgttaagtgaaataagccaggcacagacagacatatatagcatgatctcattcatgtgtggaatgtaaaaaatgttgatctcatagaagtagtgaatagaacagcggttactagagtctggggaagggagggtggaggtggggaggacagaggatggtcaatgggtacaaagttacaattagaaggaggaatagaggaataagttttggtgttctactgcacaaaaggatgatcatagttacaataagatactgtatatatcaaaataggagagaggattttaaatgtttctactacaaagaaatgataaatatttgagatgatgggcatgctaattaccctgcttttgatcattacacaattacacatgtattgagcatcacattatactccatgacttaaaggattaatttacaggaaaattgggtgaaagaaaacacttttaaaaattccttttcatttttatttttcttaattctcccagtttcagacatatttatttatttatttatttatttatttgagacagaatcttgctctgtcacccaggctggagtgcagtggtgtcatgaaaagctcactgcaacctctgcctcctgggttcaagtgattctcctgcctcagcctcctgagtagctgggattacaggtgcgtgccaccatgctcagctaatttttttgtatttttagtagagatagggtttcaccatgttggccaggctgggctcaaactcatggcctcaagtgatccacccacctcagcctcccaaagtattgggattacaggtatgagcccccgcacccagcaaatttctttctttcttgttgttttttaagataaagtcttgctctgtcactcaggctgaagtgcagcggcttgatcatggtccactgcagcctgaaactcctgatctcaagtgatccttctgcctcagccccctaaattgctgggattacaggagtgagccattctccaactcccagccgtctagatttcttgtaatacctaatacaatgtacatgctttataaatggttgttacactatattgtttaggaactaatgacaagaaaaaagtctgtacatgttcaatacagacacaactgttcatctatttttccaagtatttttttacccatggttggttgaatccatggatgtgaaacccacacataggaagggctgagtaattaggaatcaagatcatgacaaaccccaaatgtaaataatcacagcatacgtcatgaggttttaatgattaaaaatctaagcagatgagtttatacttactctacataaaaattgctgaatgttcatttcaactattttatgtgtttaatgagtcataaaatactagagtctctactgtaggtaataaatttagagtcctgtcagcaattgctataaagaaacaggttcaagagaccagttgacctgggcttatctgcgctttccaagaaacttttgccttcagattcaatactggattcaatactttacatttttctttggtgggagggaggcaaaggagaaataatatcagagatcctggaaaattttaagatgcacatacttttgcaaagttagtattgattagaataagaatggaatttataattgcaaataggcaggtaatgaagcatattttcaaattgtttctcatttaaagtaaaaaacttgttctttcagcgccctttggctctgggagctgatatttctatgtattctgcaacaaaatacatgaatggtaagatgcatactttgaatgttctttttcatggataggtgaaaattgcatagggcttggcttttgatcccttttctttgattattttgtagattatttcctgtgactcatagagagagtaaaaaaaaaaatcctttgattaaatgtaggatttcattaacagtacacaaaactatgctcatgatttatgagaagaggattaaagttggccataaaaagttatgcttttatcttgctgacaccttaaagaaacattttgtttttatataatttttattttcttgttttagacatagcttttgctactgtccagttgaataaaggttacttaaacttattttatagagctttttccctgagagttttttcaagtgaaaatcacattttgaaaattataaaataaagagtaaacataaattgtttctaactgaaatttttgtttgtttgtttgttttttgtttttaggccacagtgatgttgtaatgggcctggtgtctgttaattgtgaaagccttcataatagacttcgtttcttgcaaaactgtaagtattaaaaagtgcaggttccctatgacactctcagtgactacatttgatatttgtatttccactaagtgatgtgaagtgatggcattctaataatttatgaagaaatgaaaaatagaggagaaaaattctgattttttttatttattaatttttttttttgagatggagtttcactctgttgcccaggcgggagtgaagtggcgtgatctcagctcactgcaacctccacctcctgggttcaagcgattctcctgcctcagcctcctgagtagctgggattacaggtgcccaccaccatgcccagctaattttttatatttttagtagagacggggtttcaccgtgttgaccaggctggtctcaaactcctgacctcaggtgatccacctgccttggcctcccaaagtgttgggattacaggcatgagccaccgtgcctggccaaaaaaattttttctgattttagaggaaagtgttataaaaatagttattgcaggctgggcacggtggctcatgcctgtaatcccagcacattgggaggctgaggcaggtggatcacttgagcttaggagtttgagatcggcctgagcaacatggcaaaaccctgtctttaccaaaaatacaaaccaattagccaggtgcagtggcatgtgcctgtggtcccagatactcagaggctgaggcaggaggattacctgagcctgggaggcgaaggttgcagtgagctgacatcgtgccactgcaatccagcctgggcaacagagtgagatcctgtctcaaaaaacaaaaaacaaaaacggttatagcatagcaaggctttatgatatgatataagaaatgagtttttttattttcatgtccatcttaattataatcataatttgataaagccctagtgaatttttagtttcaagacttaatggtttttttttcttttttaaaattacatttgaaatgagggctttcatatactataccttttatatcacgaatgatggttaattttaaatagcacttacagtataaacttacatttttcaatagatgtctaaacaccatttcctatttacattgcttagtttatctccagtatagttaaagattaagccattgtaacttgacaggtaaaatataaacatgattaggaataaaaatgtcctccacaagggaaactgaaacttattgcttgataagtgtcctttggtttataaaaagtagaaatgaagtatatatcctggaggcatgtgaaatcattgaccgctttgcacaaaggctaaatagaatattagtagaatattcagtaataataggacttgaactgctgtttttctctgtatgttaaaataatttttcaaagaaatacaaggttaggctatgaacaatttatgattttattaaaatcatagaaaggactacttatcttcatatttgagaagtttatatcattgtgcttttacttagttttcagcatatttgcttcccctcattttaaagtaaatttctctaagcatattctatgctttgttcttctgcttctgatttgatatattattttcctcctagaactcaaacattgagctttacacctagcttctgagagtcactgtaatggaaaagagaagccagataatttcttggccataccctgccttcaaacttatccaggatgtgttcattttgcagctcttggagcagttccatctcctattgattgttacctctgcaatcgaggtctgaagactctacatgtccgaatggaaaagcatttcaaaaacggaatggcagttgcccagttcctggaatctaatccttgggtagaaaaggttatttatcctggtatgttaatttgatttctaagcagatctactaggatttcagcagttatcctgagcatcgtgtttatgtaacatttatttgtaagttaggtgctttcacgtattgtttttgttcatttattattgagcactgccatgtgtcaggctctgtggtgggtcaggtggaaagaagatagacctggtctctactgttgtattgcctctagtttagtggatgcttggatagtagaaaatcagttttatgcattagttgttcctgtggtggtctgtgatttgaaggcttgtgtatacctattcaaagattttaacattagacttttcagttgatttgcttataatcttgtctgtctgctattcagcattagctgtcactttaatctgatagaggtttgtcccagttgagacttgatattaggtgctaaaattcccctgaggttctctctctctctttttttttttttttttttttgagacggagtttcactcttgcccaggctggagtgcaatgatgcaatttcagctcactgcaacctctgcctcccgggttcaagtgattctcttgcctcagcctcccgagtagctgggattacaggtgcccgccaccacgcccagctattttttgtatttttagtaaagacggggtttcaccatgttggccagtctggtctcgaactcctgacctcaggtgatctgcctgccttggcctctcaaagtgctgggattacaggcgtgagccactacgcccagccccctgaggttctctcctgtatttctctcctgtatttttattccttcacctcttccagcatctagaaagtcttctgtggagttggctgacttacatcttactttttgaatttatttttaccagtcttttaagctgtggtggtcctaagtagttcttttctttttagatccttttgagggttctagcatctagaatatatagaaaaattaagactggaatttcactaggaaattcacaaggaatttagagaaaccaaagcgaaatacatatgaaactaaatgccctaaaggtactttaggtaaagagctgttgattgatatatattttggatggagggagagagaagagttttgagctatgccatgaagaatgggcagcattggttaaaagggcatagacaaggtattggagatttattcaagaaatttttattaaacgccagctatgagccaggctttgcactaggaactgggatccaattagtaacaaaagaaatggatttgccctcatggagcaactctggtggctaagacagatactaagcaagaaattacaggatataattaacaagggaagtccaggttgaagggacagcatgtgcaaaggtcctgagatgaaagggagtgcagtggtgctggcataaagaaagctgaagagggtagaaaagatgaggcaacatgaagctggagagataggggcccaagcaagtagtcagatgtgagcatggcataatcctcgtcttaggcttatttgcagttaagtagacagtgaaaaataccaccctccccccccaaaaattacatgtttaattctaaaataagacttatgataccttatgattacagggctgccctctcatccacagcatgagttggtgaagcgtcagtgtacaggttgtacagggatggtcaccttttatattaagggcactcttcagcatgctgagattttcctcaagaacctaaaggtaaacttacaaaataggtttaaaattgtaggaggtaaggccttacagcagttcactatctctcacttctactcaagccagataatgtttttgtatctgcaggttacactcataaacctctttatcatgaaatgcattgggttgaaaacaacttaaacaacaatgtagcagacatctaaatatgttcacttacttaactctccacatactacaatcagtttggagacacagagtattctaatgcatttatttaaaagtgaaccccttttttcagatgaaataggtaaaacctcgaagtagtgtgcagttagtgcactgcacaagggctgttctaaaatccatcctgtgaatggctttccaaaccctgtgcctcctaagctgcatctgactggggtgaggcctttgtctaattttcaaaaagccaggaggaggctctcaggggccttgagcaagaggcctgtccaactccatacactgggcttaaccttgagctcatgcagtttatatactacagaatagattaacagaaagctgccagattagtcaaagtgttcctggtgtcaccttaatttaatacatttaccaaagtaacttttaaaacatttgtaaagttttatgacactatcacactcaacataaaaacagtggttttttttttttcccctattccagcagggatttaaaggatgtatttcataagtgatatatattaacaaggaagtatgtataacttgggaagcatttagagatttttttatttaagtggtaaccacagagcaaagtctcaaatgcaataatttttttttttttttttttttttttaggcagagtttcactcttttgcccagactggagttcagtggcatgatctcggctcactgcaacctccacctcctgggttgaagtgatactcctgcttcagccttccaggtagctgggattacaggtgcgtgccaccatgctcagctaatttttgtatttttagtagagatggggtttcactagttggccaggctggtctcgaactcctgacctcggtgatccgcctgacttggcctcccaaagtgctgggattacaggcatgagccactgtgcctggcctaaaaacatttatttttagattttagtatttttattttactagaaaatctaaattcatgttttctttgctatagctatttactctggccgagagcttgggaggattcgaaagccttgctgagcttccgtaagtatagttctgtttttctcagtattttaaatttgatgtcagctttaatgattgggaaagaaatatgataaggtcagggataattcaagatatttaacaataagaatagcaggacattaatcagaatggactctaaccctgtcaagatggagaccctgataaaatctcatggagggcttcttgttagtgagcggtgtcctcccaaatgttgcttccttccctgctctgtcaaaaagagattccagcagtaactgtattctaggatctctgatctctgacctctaagcaagggccacatgttctaccctactcagccttagaggggattggagactttgtactagaaaagctgttttcaaggctctttgggaaacagaaaatgtgtctctgatgaaactcctccatgcccttgattgttggagaacagccctactagatactgtcaaatcttttgttttctgttctctgtaggataaacctttaatgtcttcatgttgtgtacaagataaatccaaaccctaacttggtaccaggcccttcagtatctaacccaatcaattcatctagttttttcaaagcatcagaggatattggtacaagaagcagtctaagatcatacagtccagcagcttattttacaggcaaggaaacaaagatccagaaagttgagctgattgactcaagtgtcacacaggaacgtgttcgcagcttcactcttggatttgcatcagaaacagtgaggggaggtaaaaggtgcttggatctagatttgagatctgcttccaccaattagttaacctttaaacttccattttttaacacataaaatgagattaataattaatgattttcggcctggtgcaatggctgacgcctgcaattccagtactttgggaggccgaggtgggccacttgaggtcaggagttcaagaccagcctggccaacatggtgaaaccctgtctctcctaaaaaaaaaaaaaattatccgagtgtggtggtgtacacctataatcccagttacttgggtggctaaggcacgagaatcgcttgaacccaagtgatggaggttgcagtgagccgaggttgcagcaagccaagatcgcaccactgcactccagcctgggtgatgcagcgagactctgtctcaaaaaagaaccaaaacaacaacaaaaaattaatgattatcatttattgattacctgtccccccaagcattcctgatatatatattacctttattatatgctactatgaccatatgttgtaattactgcagggttaagtcaacatcataacctaactatttttaactgtactaaatgtatacggtgtatttctgtgtcttcatttttataaacatttatggaataacttgttttgcaagcattgtgtggagaaatgtcaggtcccaccaaagtttaggcctattttctgtctttgtataggagtttacagttagaccaaaagtcaggcagtctcaccaagttaaaaaaaaaaaaaagatgtctaaataatgacttgaaataattcatgtaacgcagatttttgttagtctttccggaagatgcctgctagtaagtttggatgcacaagagggcacactcagcatgtgaaatgggtttgtttttcacagtaatgaaatgtgtattacgttaagactctcttgtttaaaaaattgtcttaaaataaatctctcctgatttatttagggatttttgtttaaagttgcttggcccccagacactctggtttaggctataaccccgatgccagaggatgagtggatttaggtcagggcttgtctgttctatcacccttcattctgtgtctcccaactctgctgctactagtgcagcattgcaatatgggaggaaggaagtgaagctaatgtgtattagcttagtctcccagcctcacaacacatgtaactctgtgaccttagaaaagttactcatcctccctaaatctcaatttcctcaattttaaaatgtggacaacactctacatagctcttaggtttgttgcgagaacatggggaaaaaaatccctaagctaatgccttcgttcatactaagtacccaataaacgttagcacctactatgaactattatcttttattagacatctctactacattccaagtgcttagaagtgctttatacatgttccttcaaattaatgtctgtgacaaacctttaagacaggtgttatatccaatttttattcattaaaaaaatgaattaatgcacacaaaccacctagtagagtatctgtctcatggtaagcacacagtagatgcatctattattatttcagataaggaaataggcactgaggatgagtaacttttataaggccacataggcagtatgtggaagggctaagattcatacccaagtttgttggtctctgagacctgagttcttatttctacatgtacacactcttttaaggaattacgagtctcccagggcagaacattttaagatggatgtttgtatctaaacaacactttagtaaagtgacaaaggaagatatccatcactcagaccacagctgagatttttttttccccatggctctcatgtaagagaggagaaagcagcttaggtattgattttgctggtggtgtgcagggaaaggaagagtgttggttgtaatacacatactggggttaagtaagatgctaaacctctcctccattattcttcacagaaatttctccttccctggaacttggcagtctttttgtctatacttgtttggcattgtttatatagactattttgttttgtgaattgtcatcgcttttacctcctgctttgttatttaggttaaagaaaatatctcattcttcttggtttcccaatttttactgcagtgcttgacatattatgggtggttttcctttacatctgttgatgatggtaatgggctgctagatcgtttgaaaaatccttccaggcctctatgccaggagttatattgtggaattctgaatgcttactggttgctactagtgattcttggtcatctttctccgatgtgcctcagaaggtctagctctggattgattcagaggaaactaattatgacaggctcttggtccaagagacctcttataagtagcaatccagtaggttggtcatggagtacatgatttctggccaaacttcatttaggcaggtattaaaatatacacattggggaggctatgccttaccctactgcatgggggtacttgacacacactttcagtatttggattgagcatatcttaccaatggtataaacaggataaaaacaatcttgcttttcatttaaaatcatagctagaagagataagtttcgtaattttctctttttttgcctgtgaattataggggtatgcaaaatttgatatttggaccagaaaaatgttgagggtaattgcagtttatgagacagaaacatgcctccactgacacaatatagtgatcaaaaatttgctcatgtcttctttcagggcaatcatgactcatgcatcagttcttaagaatgacagagatgtccttggaattagtgacacactgattcgactttctgtgggcttagaggatgaggaagacctactggaagatctagatcaagctttgaaggcagcagtaagtcttattattgtgtgtgtgtgtgtgtgtgtgtgtgtgtctgctttatcttgggcatggggggtcactatatttacaaagtgtggtctcactgtgaactctaaagcttttctgttcctgtaatagaccaggtgtataaataaacgtatagggagctcagtcaaagtgcatatttaaaggatggtagtattcagaaaaaggacttcttgaggagttgaagctatggcctatatgtttaataacatatttttcttgtgcactgttattatagcaccctccaagtggaagtcacagctagtattccagagctgctattagaagctgcttcctgtgaagatcaaatcttcctgagtaattaaatggaccaacaatgagcctttgcaaaattttcaagcggaaattttaaggcacctcattatctttcataactgtaattttcttagggatcatctctgttaaaaagttttctgtatgtcatgttataattacaggtcaattctgttaatatctttttgttaattttgctctatgtttgcctctgaaggaggtgagatttgtgctactttgggagattatgttcttttttcatgtctaagatttattttgatcatgtttataatataatggtaattcatttttgatgttttgtgaagaatttaaatttaaacgaatgttcttaaatcaagtgtgatttttttgcatatcattgaaaagaacattaaaagcaatggtttacacttagttaccataagccgaaaatcaaatacttgaaaagtttactgtgaaattctactgatttaagactatacttaatatttttaaaaaaataaatcagctgggcgcggtggctcacgcatgtaatgccagcacttttggaggataaggcgggcggatcacgaggtcaggagattgagaccatcctggctagcgcagtgaaacccccatctctactaaaaatgcaaaaaaaattagacggacgtggtggcgggtgcctgtagtcccagctacttgggaggctgagg

SEQ ID NO: 1163 - DNA, 31805 bp, Homo sapiens
ctgctgtgcagggcagggaagctccaggcaaacagcccagcaaacagcagcactcagctaaaaggaagactcacagaacacagttgaagaaggaaagtggcgatggacctcatcccaaatttggcggtggaaacctggcttctcctggctgtcagcctggtgctcctctatctgtgagtaactgtccaaactcctctctttgtttccttggacttggggtgctaatcgggccccttttcccttatctgttttgaagatcaaaagagatgttcaaggagaagtagctgaagtgttggacgctacaaacgcatagaagttattattatcttatgcagatctatgaatgaataaataagcatttctcccatccaccttctaattttggtgactaggagggtttagggacagcatttggtagtgggaatgatttgattagcttagatctgacgaagactaatcaatgaaaacatggcagcggcagattacaaactgctgatcatgatggacagtgtgatcctcatccccttcccaggctctggggattctgggtacaggaaggagtggcttgcatttttgtctcattaattcgctttctgggttctgtgtctgctggaagggatgtgtagctgtattgcccctgtagacctggttcctgctcccccgccttccaacccaggatatcatttacataacgcaccaggggacaccaagacttcatgggaagctgtcccctggctcttccctctttcctgtgccatgcccctgaaaatcccctccctcctatgagtcactcctccaccctgtcatacacaggatggtttatcttgcaatgattaacctctagagcaaaggagacctggaggaagtttcgaggatttattctttgctttaatctttttcctcccgtctctgggaggctaggattaatatagagctttgtttctcacctaatgggaatctactagcagcctgaaaaggcaggagccatgaaagccaatttggattttacatatttttcccctttatgttacagtacaggagggcaaaccctctcactggtgggattcctggcatcctagagcaggtggagagaagagttactttccactgtgggtagtggaggctccacctgtcccattaacttctacctcaatttgacttttattaagagcagggaaccacaatgacatgaaaatagacactataaacctcattttaattctttcacagaaagcttaggaattcagtgagttgtggcaacatggtttccattgtctaacatttttaaatgaattgatatggtttaaattcattcatttttaaaccagaattttttggagatagactatttccagcatgttccttctggatggtaaaacagggctgttagttcagtatttgtgacaataagtgtgtgtaaaataatgtcacctttcctgaatgtcaggaatatgagtctaatgcacaaatgtatacctctaagacaagactgcacgtcttttcaaatatacctgtccggccatttattttaataactccttttcgaatatacctgcttagcagattgtcttaaactctcaggacaggggagtaagcaagactgtgagccagtgacgatagcaaaggcttccaggtaggatccatatgaagtgagaaaatattcctcagctctcagggtagaactccaaagagatattcatgggtcctggccccaccgtggaggtcactcaaagggcaaacaggttggcatctcatctgcttcaagcctggacacaggggcaccatctgtgtcactctgtgtgtggtctgccatgttgtgggccggtcactacagactcgggcagccaggcagacaatgccttagccttagacaatgctggtgcagcccaggagtcagaaaatgcagtgtagaccaggccctccttaggccaacacaattacatgcaatagatgactggcttttctgttagtctcttcactggacccaaaggctgcattactctaccagaggggagctggaaagaaactaaagagttcgcccagcacagcatctgccttgacatggtaccatgtgaatctagacactcaccaagatctttccttgggggccaatgctgctgacacattaactcaatagcttgtcctcacctgagaggtcaggtaatgtgtttaaagttcaggagcagagattagtgtcattgatttgacatggctgtgacaacaaaggagggaactgaagtgggaatacccaaggccaccctggctttggcaggtggtgcacgcacttccactaactgttctggggcagggaaccaaatgtatgactgggcctgctcatgctgcccctgctgagtcctccaaaccctgcccttcatgtaatttctcagttttattttatcacattttataagtcactggatgtttacaaaatgtttggaacctatactgccttgaaggctaacctctaaagaggagtaaacaaggtcttaatacaactctccgggacgttttatcattacttatcttatatgccatactgcaccatttgctatcaacaggaaagtacctggactttggaaggtccctctgtgtcttttagctgaaagtacatatgaggcatgtggattcttttatgcacatcatctttttcagccacatttttgtagtttgcctctctggagccaactgtgtggggctagcagcttcacagctgaatcagtgtctggcaacctcttccttcagcctctcttcttcctccagttttccatccctcagtcacaccggagggggaaggtctgcaaggatccagaaccatcagttggaggagtttgcacatgactcatgaaagatgagttccaggcaggcctgccatagtgaacaccaggcttaatgggtttttcctcagagatacttcacgtacagaggcagtgaactgactgctttctggttgaccaccttgaaaaagatgagtgtgcctggcactgtgcttctcaggtgagtatgacctgagaagtattagttgctggttcttctgcacacaatcattcaaggacatatggatcaaccatcctcctcaacagctcaaatcaaccagatcatctgaccacagagactgaggtgtacctgaaagctgcccacatttctataaggccaatagaagccatgaacacagttgtcaatctgtagaaataaggactccatgactcctccaaggcctctctgtgaatgaacgtttaagaagggctagatcctaaaacagggtcagagcttagagggaagaaaaagcataaacatttctgagcaaattgtaagggcagtgtcaccataggctcccagtgaccctctgtgattgagtgcatacagtgatgcaaaatctcatcatcagtgcaaaagacaaaaaaaatcttactctttctacctaggatgagagtccccaaatcagcgaagagtccacttactaaacagacataaggaaatgaagtgtcctggaagaattcctgcctgaacctctcaggagcatttgaggacatttatcaagtattcactccaggattgggactatgaagacttcagctgctttcagctaatcattgagacttttcaggggtctcagaatagtcaggaaaggacctgatgagtgaatgcaattactgatgttggagttgctgttattatttatcgtgtacatattacctccctctcttgaccattccagttcctgagtaactcaccagccctctgatctataaagtcacaatccctgtgacctgatttctgtttcactttgtagatatgggacccgtacacatggactttttaagagactgggaattccagggcccacacctctgcctttgttgggaaatgttttgtcctatcgtcaggtgagttgcttgagcttcctcttttgcttcttatggttgcaaacatcagcttagttccatcagtaaaaatgcccctccttgggagggagttctgaggtttcacattttcagaaatggtgggactgggtgcagtggatcatgcctgtaatctcagcctctgtgaggccaagactggcaaattgcttgagcccaggagtttgagaacagcctgggcaacacagtgagacacctgtctctagaaagaaaaaattacctgtgcatgatatggtagcccatgcctgtagtcccagctactctgaatgttaaggtgggaggattgtatgaacccaggaagtcaaggctgtattgagctgtgatcgcaccactgcactccagcttggtcaacagaacaagacagaaaggaagaaagaaagagagagagagaaagaaagagagaggaaggagaggggaggggaggggaggggaggggggaggagaggagaggagagaaaaggagaggagagaggagaggagaggaaaaggtgtgtaggctccacccaaagcatggccaggtttacccctggagggaaagtcacaagctcatgtccagaaggccagtagcagcaagctgctctccagcccagatttcctatcctgtgtacctggagcttgtttctcagattctaactctcacaactgaagcctctgttgtctgattactatctgagaattctacacaattttaccctcgataaaagcagtaatttcttcttcatctttcccagatcaactcttgtagtagatcaacatttctgggaccttcttttgcatggttaaaacatcacagctgaatcttagcaacaggaaggtttgtttttatgtttcagaagtgaaagctcagagcacgcattgtaatttgctgggtgtgatgtgtagaggtggcatttctccatcttttctgtgttaagctagaaaactggaaaggaagtctactttctcattcactcactcactttctcactcaacaacatgccttagacttatctaaatctgcaagactaaaagaggttcctggtttctttaactttctaattctgctagagttctagagagagcacatgagataaatgaaaaggatactgatggaggagattaaaaaattgtgcattccctgcagacactcacttttcctcacctcagtttcacccctgcccttgcaggtgatcattcacggggttaggagactttagagagaataaaagaaaaagcaaaaatacatcagaaagacaaggaattacttactggtcatagacaagggtgagtccttcagtacttagagaaaattcaagagtgactttaaattccccacttcaaatatattctctgttttcttgtctttcccttaagacatctctgaatagcttccttcaactgccagtgaaagatagcaggcctgatttcattggacgcaactgttttcagccccaattagaggtagggtttattctatttaaaataataatcaacttgtattttgtttcctctcccagggtctctggaaatttgacacagagtgctataaaaagtatggaaaaatgtgggggtgagtattctgaaaacctccattggatagacctgctactgtgaggaggttaccccactgcaggatagtctctgcccaggtcttcatgggatgaagctcttgtcaacctaaatacaaacagagagaggttctctgaaagaagaggataattacttgggagtagaatattgcaatgggaatctgcttgccgttataaactatgtgcaaattcagggaggtaaacaagacaaagatgctccatagaaaatatgagaagaatctcataactgttttgagataattattgttagctacaaagatcaataacaagggtgatgccacaccaaggttggacaggcagttgctggacaggtgtccttgcagaaatatttttgtgtaaagttgaaatagcctttgtgcaaagttgtggtttttgtagacacttttgtaatagttttgtttccaggaacacaagcataagaatcctctcttcatagccttcttgggatttatttgtcagggttaaaaaacaattagtgacatcactttggttctgataaagttcacactcgctattgtaaaacttttcgaggcttgtcctaccaaggatcccatgtgtcaccaggtatcgaggtcttcagtctgaactaggctaggagcattgtggttaccacttttctgcaggttttggtggcccagggactcccagcatcgccttctgtccagtgtctgcctattcccctcttctttttttcttccttaggtgcccttttatcacatgcattgtctcagacccttctaatatgtgctcataaatgcatggcatcatctccttcccacattgattcactttcaattaaaagccaaaactccttcatttagactgaatttaacatgtgcttttgaaagaagggttgagagataatagagaaacagattgggaaaccacttatgctccacttttttaaactttctctgcaagtatggaattttttgttctgctttgttgtttaaatttaagccaaaacttcttaatagaaggatatacaaatatttattggtttataccattgcacttactttgaagaagagatgctgaatattattaaaccattgtgttccctggtgggctgatggactgtgattttataaggtggtctcagccaattgcagcagctgttccctgtcagaggggctagaggtttggtgagagcagtggatgaggtgcagtggtgtgtttgttcactagaagcaagtgggagaaagctttgcctctttgtacttcttcatcttctcccctcaagtcctcagaatccacagcgctgactgtggagtgctgtggagctggcatggcccatacaggcaacatgacttagtagacagatgacacagctctagatgtccatgggccccacaccaactgcccttgcagcatttagtccttgtgagcacttgatgatttacctgccttcaatttttcactgacctaatattctttttgataatgaagtattttaaacatataaaacattatggagagtggcataggagatacccacgtatgtaccacccagcttaacgaatgctctactgtcatttctaaccataatctctttaaagagctcttttgtctttcaatatctcttccctgtttggaccacattacccttcatcatatgaagccttgggtggctcctgtgtgagactcttgctgtgtgtcacaccctaatgaactagaacctaaggttgctgtgtgtcgtacaactaggggtatggattacataacataatgatcaaagtctggcttcctgggtgtggctccagctgcagaatcgggctagtgaagtttaatcagctccgttgtccccacacagaacgtatgaaggtcaactccctgtgctggccatcacagatcccgacgtgatcagaacagtgctagtgaaagaatgttattctgtcttcacaaatcgaagggtaagcatccattttttgaaatttaaataatgattgatccactgattaaatttttattttgaaaaaaacatatattcacagaaggttacctaaaaaatgtacaggaaggttccatgtactcttcatcctgtcccgcccagtggtaacatcttgcaatcttgtatattgcaatatatatctagtatattcatattatcaggttggcacaaaagttaaaatggcaaactacaggctgggcataatggctcatgcctgtaatcccagcactttgggaggccgaggcaggtggatcacgaggtcaggagttcgagatcagcctgaccaacatggtgaaaccccatctctactaaaaatacaaaaattagctgcgtgtggtggcatgcgcctgtagtcccagctactcagtagtctgagacaggagaatcgcttgaacctgggaggcggaggttgcagtgagccgagatcacgccattatactccagtctgggcaacccaatgagactccatctcaaacaacaacaacaacaacaacaacaaaaaccggcaaactgcaataacttttgcaccaacctaatactatagtacaggaaattgactttgatatagtttacagagcttttcagatttcaccagttttacatgcccttgtttgtgtgtgtttatgtgtgtgggtagttctaagcaatttttcacattcgtagatttgtgcaacgaccagcaccatcaagatgcagacccattccgtcaccatgtggctccctcctgctgtcctacagtcacaacatggagtttgtctttttctctgacaggttctatatcagagcaaacttttatttatttgaggaggccaatgtattaatatttccttttatggattgttcttttggtgttaagtctgaaaatcctttgcttagccctccttcctacattgctttttctaagagttatatagtttaacactttacaaaatgtaactctattacccattttgtgttaatatttgcataagttatgagatttagatcaaggttcattttctgtggactatggctgtccaaatgttccaacaccattttggaaaggtaggcatattgtcaaaactcagctgagtatattttgtgaatctatttcttattgtttactcctccactaataccacactgtggtgactctagtagctgtacagtaactcttaacatcatatagggcaattctttccactttattgatttatattttcagaatggctttagcttttcttgtcccttgcctttccataaaaattcagaataagcttgtaagtgtctacaaacaaacctgccataattttgataagaattaaagcagaggtgtccaatcttttggcttccctgggccacagtggaagaagaagtgtcgtgggccacacataaaatacacacacacacacacacacacacacacacacacacacacacacacaaatggtctgtgtatagttttcattatatatctaccaccacagataagcaaaaatgtccttgcataataatcctaattatgcactgccccattcagagggtctttcaaaatcattgaacaggttccaagtttgcaatcactgatacagaaaatgtacatatctagctaaacttcactacttttttgatattttttattataaaagaaaagagaacaacataaaactagtggggtacttgacattgtttttgagaaactaatccatcagtatctggcttgatggaagtagttgcaattctcagtgagttctcaaggtgctcatcagatattttggttctaattttactcttcgtgttcttcatccttgaaaatagtagctcacaaatgtaagtgctgccaaaaagcaatgacatgaacaaggtgtgattgtgaagcaagggatatttgtcattgggaagacaggtcttacaaaagtccagtaaagaggcaaaatcaaatttttctataagttgaacatcagattgcagctctaggcattccatttcaaaattgccaggtaacatatatatgtcgactgaaaatggagttgcaaatataccaaaatattgatgattttttcagaaatcttgaaatacctgttttcaaattcctgtatcaaattgaaaagcaaggctgcgtatttttggctgttcacaggaccatgtttagccaacatgtcgaaatgcataaaattgtttgccttaatttgagcttgccataatttcagtttcatatggaatgctgttatggtttgaaacattgtattgttaagttggttttcaacttgaagacacaggtttaactcacttaaatgggccgtcaaacccactaaaaatgctaaatctgtaagccagttttcattgtcaagttctggcaccaattttgtttgataccataaacagcttgatttcacatcacaaagcataaaatctttacattttgccttgacttaaccatcttacttctaaaaagtgaatgacttgctagagtcagcatccatacttttaaggaattcctgaaactagcgatgattcaattcctgggcccttgtgaaatttacagccttgatgacaatttgcatgacgttatctacttttaaagcttgtgcacatggattttcttgatgtattatgcaataatacttcatcaaatgtgagttttgtgtggcaactgcatcatctattaattgtacaagtccctctcttttacctaccatcgccagggcagcatctgtagctatatcacatatgtttacaaaggacaaagaaaattgctttaacatatttttcactgcttcatataaatctcttgatttagttgtgtcttttaatagcatggtgacatttcgatttcttcagtgacattatattcatcatcaatacctctaataaaaatagcaagttgtgccgtatctgtagtgtcagtgccttcatccatcaccaaagcataaaattttaaattagcagttttactctccaaacgtctttcaatagatttcccaatttctccaattctcctggctatagtctggtgagacaaactgattttagaaatatcagtttctcaaggcaaataatatctaccacatcttccagacattgcttaataaactcaccatcagtaaatggttttgatttttttgctattaaatttgctaccacataactaggttttaccttacgattgagtccgagttgtaactttttaaaaaatcttttttgttgaaaagacagactttttttcagttctgctattttgtccttacaacacatacacaccaaatttgtcagcacgtttttgcatataatgcctcttcaaattgtagtctttgaaaactggcacaaattccgtggaaattaagcagagtgcttcgctatttgcctcaacaagaaaaagtcatttgtccacttttcattgaacaatcttccttcatccataatttttgttttttagggttttctttttaagacattgtggaagccattctggaattaaaagcattataatagataagcaactatatttacttttattatggaaattaacagataggaaaatagaacagaaagcaaggtttaataatcaaataagaatacttacatgtcttctaaataatattaaacacctatcatctacaaaggtaggttgaaatattattgataattgctgggttttacttgccaaattgccacaaacacacctaatacctgacagtgtcaattcaactgtccgtgattagaagataacacactggaagtcgcacaccaccataaaactgaagccacacatgcgtacaaatggcgacagtgtctggtgtacagcagcgctctgccttgtccagaatacacacttgaattctttgtcacaattcacttcacgtggcactgcaatagcgtcctctcgctctttgttagttaattttaatggcttttaatttcttcttgctgaactgtttgcaattataatgcaaattatggatactagtccattatttgtggatgtgacatactctgattacccctttccattccattgttgtctacgaagttcacacttgagaatcacatagtcaaattacaaaattacaaaaaaaattgcaaaaaaactcaaaatgttttaagaaagtttccacatttgtattgggatacattcaaagccatcctggactgcatgaggcctgcaggccacaagttggacaagcttgaattaaaccaatagaacaatttgggtataatctatatctttactatgttcagcctttcatcccgtgaatatagtatgcctctccatttctttagcttttattactttcctcaacattttatagttttcagcatagaggtcctgtacatcttttgttagatttacaccagaaatatttcatttttgttggagtaactgtaaatgatactgtttttcttgtattttcagatattgattattgttacatagaaatgtgaataattttgtttgttgatcttgtatcctatagccttgcagaacttacctattcgttctagaaatttttttgtatattccttgacattttatacattgacaattatgtcacctgaaaatagagacaattctattatttcctttccaatctgtatgccttttatttctttttcttgtctagtgtattaagacatcaggtatgctctttagtaagaatgttgagagtgggcattttttagttcttcttgatcttggaaaaaccattcagtccttcatcattaaatgtgatttaactgaatgatttttttacagattgtctttatcaaatgaaggaactgtctctctcttcctagtttattgagattttatcatgacagctggaagtacacattttaaaacaaaacatagttgtggaagataagagaaagttccaagcatgctggcttgatagtccagccccaagttgggaaaagtaattatccctttctttttccttctatttatggaataaaaaattaagagaaaagaattttcaaggaaattgcattattccttcaaaacaggtttctagtctttaagtattacctacttttcaaaaaaaaatcaccacatcatggcatccctttttcaagttgcccatgctgtaggtgtattaaagacagagctggtctgaggcaacatacagtctgcccatctgtcaccaatccttttctactctgcacactcctggggaagggctaggtcttgttcctgtctattccactggaagaacagttccctaccacgtggagcatttgcaattaaaaggagactgagatatagaggcaggagaccacaccagatggctgggtctccccactcccacccccgccccacatacactcagaagaggctaggcatctaggatctccattgagcatcttgaatatggcttgccataatatcatatacagtcaataaatatttgttaaataaggatgcctcttcaatatattttgtgcaaccatgaagatcaccacaactaatgtgagaaaaaatgtttctgttgaactctagtctttaggcccagtgggatttatgaaaagtgccatctctttagctgaggatgaagaatggaagagaatacggtcattgctgtctccaaccttcaccagcggaaaactcaaggaggtatgaaaataagatgagtcttaattagaaatgtaaagaatgaatctggggacaggtagaaagtaagatcacagtccgtttccaaggggtagtccactgagttcgagcttcctaaaaatggtcttttatctttatgtacagaaaagacatcacaaaattcattacaaaatgtcacttactgctccatgctggagaaagccatatccttctgggacttgagtctgcacatttaactacaggtactgatctgttttgtgcttagatgttccccatcattgcccagtatggagatgtattggtgagaaacttgaggcgggaagcagagaaaggcaagcctgtcaccttgaaagagtaagtaggagcacagccatggggttctgagctgtcatgagcccttccagctgcctgccatggagtcgacagtcgcactgttgggttactccagtgaccagacaaaagcagggcagcgctgcaactccaaagagccacctaagagggagtggctcccatgaggcggcaagtcagcaagggaaaagggccttctctcctgtgcacaggagccaggatttacttatctgttaacttgtcaccataaatattctgggagattaaatacatactttagaaattaaaaaaacatgattgtatcaaagttttgagtgtagtggatatggaactgtgggtaagcaagcatttggtacttgttgccttgcattgggtaagatgggaaagttacaatggggaacttggaacaatttcaatcccttcatggtttttctgagaatatcagcaaactatgaactattaaaccttcccactacttccttttcctccaatctcaaaaaagaaagggtgctagaaatgctatgtgtagagcaagcctattatttgctgtctacaatggtatgtgcttcaattatgcaggaacgacaggtgtaatctgagcctgtcctgttcagacttgggacatgtggtcactcagttttgggttctccaaatcaatgttggagagatctattttttttaaccagaacattcttgattgtcacatcttacaaaaatgactctgctctcagcgcaacttcaggtcagaggagctggggatagtggggttttccagagcattagcagggagtgtagagaataaaggatgatatttctaggaactcagaacagggtgttactgttttgtaaagtgttgaagaggaattggctctgggcatagagtctgtagtcagacaacgccacctttcttgaatccactaggaagagttaattattctactcttgttctgctgaagcacagagcttacatatcttatatcatccacactcaacacatgctactgtagttgtctgataatgggtctctgtcttcctatgactgggctccttgacctcagaggtgagtctaactcagcttggtgtctccatcacccccagcatagggccagctccatcactggcaccagataaccaccttctgagggagtagatggaagatgattcagcagatagttctgaaagtctgtggctctttatgtgtcttgactggatatgtgggtttcttgctgcatgtatagtggaaggacggtaagaggtgctgattttaattttccatatctttctccactcagcatctttggggcctacagcatggatgtgattactggcacatcatttggagtgaacatcgactctctcaacaatccacaagacccctttgtggagagcactaagaagttcctaaaatttggtttcttagatccattatttctctcaataagtatgtgggctattatttctttctctctttttaaaaataactgctttcttgacatataattcacatatcgtataattcatccacttaaaaggtacaattccattgtttttaagataatcaaaaatatgtatgaccattactattgtaaactaaaatgtttttgtcaatctagagccctcacacactttagctgtcaacaccccaccacaaaccccactgccctaagcatccaataatcaactttctgcctctatagatttgcctattctggacacttcatagaaataatatcattgatttttctctgttgttttttattctctatttcatgagtttattttagtctgttattttctttcttttgctggctttaggtttcatttgctcttcttcttttagtgttttgtggtgtaaataattataatcaatttgagatattttcttcttttaaatttagatattacagctataaatttccctctgagcactggtttggctacatcctgtgttttggtacatcatgccttctttttgttcatctcaaaacaatttcttgttgcccttttgatttctgctttgactcactggtcacttaaaactgtattgtttaacttccacaaatgtatgagtttcccaaatttctttcccttattgatttctagttttattccatggaagttgatgtacatatgctgtgttaattctatcttgactatcatttcctgaacagcatgattaagttaagcagcagattatggtctacattaatccaaaaactctagtccaatagataaaggctaagaggtcagggaatttaattctattactttggtcactccaaagactcagaaggtgccattgatctcactgctgtagtggtgtttcctatgtatagacctgcccttgctcagtcgccggcctgaaagaagggcaaacatgataaaaggaatgggttccagttgagaatcatgatgttcttattcttattactggtagagaaaattataattgctccaggtaaagtttgcattttcaatgatttccttttgtttgttttgtttttcccacagtactctttccattccttaccccagtttttgaagcattaaatgtctctctgtttccaaaagataccataaattttttaagtaaatctgtaaacagaatgaagaaaagtcgcctcaacgacaaacaaaaggtaaaatctgatggtggttaaatgacgatgtttaggttttgataaatttagattttatacacatgatagagcatgtatctgtatttttaaaaataaagacagagaacttatgtttagaacaagagaagccatttggtagaaataaagaaggagattggggaaggagatgagaatgagtcagagagatagcatttaaaacttgaaatcaggcacaacaattagtatgtcatgatataaacagtattgagataaaattttaccacttctcttccctttaataaattgtcaaaggataaagtttcctgtttgaaaatatattttactggtattgtgctttcctcatatcacagattggtaaagaatcattttaagtccaagactcttattttacatattctgcaattaaaggtcctatgaggctacctgccgactgctgacatgtagtgtgtggtaaatgtgagtgtttcacagcctggagtgaacaggggtcttctctgagaattgaggttgcaaggctggctaactcagctttgccttcacgagccctagaggccagccgaaggatgtctgcaggtcagggagacaggaccaggtaacccagctgtcactgaagattatatagagtttgagaatgttggaatatttgaaaatgctcccccaaaaaagctgctgatgagttctggaaatgtcaggagattaatctatacggacactgctgaagaaaaaggtagaagaataaaagatccagtacttcttcctgggtaagcagttatgaccagagatggaaccggcaactctttggccagaaagctgtatccaaaagacagagaagatgagaaacagggagggcaaaggcgaaaaagcaattggacatgatagctagatttgtttcaggaaaacatcctgctttccaaggatttagatgaatgtttttgttcactggtgactcaggtaacacgtcttcaagaagccatagggaggttgagggagggaagtcaagaagggaggttgaggactgcacttttgatttacttctgacttcacgagtcactttctgccaaagaaatctctccttttgcttctagcaccgactagatttccttcagctgatgattgactcccagaattcgaaagaaactgagtcccacaaaggtaaccaaggagtgcttctgagggctactggcggggacactaagagggagggccttgttctgaaaatgtgcaggaagtattccaggaagatgagaatttttgccacatagcagaacaacacacatttagatgttataaatggtagctggaggcactttccagaagcccacaggtatagccatgttccaggctgaaagggcaaccctaagcaaacctagaatgcttggaggacagtcagtggtttgtggatcacctacatgagatcaaatgccagttctcagcctcctccagatccaccaagtgagaacctctacttggaaatttatatcaaacataccgatcaggaagcacactatcccagtaagggtgattttaactggcagtacttgaaagtgtgttcgcaaggttaatctactgcaaagttttatttttccctttgaaatgcataagtaactaatgggggacacctctgataccatgtaaatctacttcaatcttcagtcttgtatctactagttttatgacccatggatggttttaaccaaaaccattattactaagacagtggcaaaatgataaccatggtcaatttcaagctaccaagatttggcaaccatctcacaaaatttttgaatatttaacaattggttctagagagcaggactcagcagactccagtataccactttaaacatgtccatgtctacatctacttctgtctgtctatctatctgtcaatcatctatctgcctataatttatcaattaatcatctatctatctcaacaaaacttgctgtgataaagaaaatagtctatcatttcactgtttcatatagaaatcactagacacatatggctattgagtactggacatgtggccaatgccactgaagaacaatttttaagagtatttatttttaattgaataaaatttgaatttaaatagccacatgtggatagtggctaccagattggacagcagagctcccaactttaaaattacagttcaatttcaactcagtataatggggttcaatgtaactgagtaaaataattggatggttgaatttacccacagcagcatacagaaatattcactgataaatcagaactctgtagacctttctcacactcattttatattgtgtttggttgtgagttacatgattgctgcaggcaccatatttatttctgtgctccaggtctctaaaggtcctaatccagtcctgaccaaacagactagtgatggaccatcgtgagcttctctcaggagaaatatcaagagggaggccaacctgtaatcataagaacttctgctattttaatgccattcatcagactacagtcaatcaccatgcttctggctttttgtctatctctgctgtcttgtacatcctgagatagtccattctgagaactgtaccctagatcttgtattgcctgatgcctgtcaaagatgtaatccatgctgcttaagtgaggttgtgcacacaaatcaccatatctcctgcaagtttggattttgattcagtagttcgatggtggggtttgagattctgcatttctaataagctcccagatgtggctggtgctgctggtccatgaaacacactttgagtagcaagaggtgatctgtagctcagtattggtcctttaagttccctcaaacatatatagagaaaaggtcctaaatattgcaaattctctcaaagtttgtcaagctatattggaattctctcaaagtctgtcaagctctattgtagaaaatcaaatttttattgggaaaaagcctaccccatatttacttacagataaagtacttttaggatcattcaaggcacacacccataacactgagtatgtaagacagaaatgctctctctggaaattacagcagtgctggtgctgggatgccatgatgaggagtgtgtggcccacaatcatgtagaccttgggaaaacctggattaaaatgattttgcgtcatcctggccctgtataagatacatatcagaatgaaaaccactcccagtgtgactttgaattgcttttccattttttcttcttgggattagagagcttcacttagatttcatctaagctgtgatgttgtacgttgacctgatttacctaaaatgtctttcctctcctttcagctctgtctgatctggagctcgcagcccagtcaataatcttcatttttgctggctatgaaaccaccagcagtgttctttccttcactttatatgaactggccactcaccctgatgtccagcagaaactgcaaaaggagattgatgcagttttgcccaataaggtgaggggatgacccctggagatgaagggaagaggtgaagccttagcaaaaatgcctcctcaccactccccaggagaatttttataaaaagcataatcactgattccttcactgacataatgtaggaagcctctgaggagaaaaacaaagggagaaacatagagaacggttgctactggcagaagcataagatctttgtacaatattgctggccctggttcacctgtttactgttatcacaataatgctaagtaaaaaaaaaaaaaaaaaaaaaaaaaaaaaaaggagtgtggcgagaagatggccaaacaggaacagctccagtctacagctcccagcgtgagcaacacagaagacgaatgatttctgcatttccaactgaggtaccgggtgcatctcaatggggattgttggagagtgggtgcaggacagtgggtgcagtgcacccagcctgagccaaagcagggcgaggcatcacctcacctgggaagtgcaaggggtcagggaattccctttcctaggggtgacggacagcacctggaaaatcaggtcactcccaccctaatactgcgcttttctgatggtcttagcaaacggcacaccaggagattatatcccgcgcatggctcggagggtcctacgcccatggagcctcgctcattgctagcacagcagtctgagatcgaactgcaaggcagcagcaaggctgggggaggggcgcccgccattgctaaggcttgagtaggtaaacaaagctgccaggaagctcaaactgggtgaagcccaccgcagctcaaggaggtctgcctgcctctgtagactccacctctaggggcagagcatagccaaccaaaaggcagcagaaacctctgcagacttaaatgtccctgtctgacagctttgaagagagtagtggttctcccagcacacagctggagatctgagaacagacagactgcctcctcaagtgggtccctgacccccgagcagcctaactgggaggcaccccccagtaggggcagactgacacctcacacggccgggtactcctctgagacaaaacttccagaggaatgatcaggcagcagcatttgcgggtcaccaataccgctgttctgcagcctccactcctgatacccaggcaaacagggtctggagtggacctccggcaaactccaacagacctgcagctgaggatcctgactgtcagaaggaaaactaacaaacagaaaggacatccacaccaaaacccatctgtacatcaccatcatcaaagatcaaaggtagataaaaacacaaagatgggggaaaaacagcagaaaaactgaaaaatctaaaaatcagagcacctctcctcctccaaaggaacgcagctccgcaccagcaacggaaagctggatggagaatgactttgacgagttgagagaagaaggcttcagacgatcaaactactccgagctaaaggaggaagttcgaacccatggcaaagaagttaaaaaccttgaaaaaagattagacaaatggctaactagaataatcaatgcagagaagtccttaaaggacctgatggagctgaagaccatggcacgagaactacgtgatgaatgcacaagcctcagtagccaattcaatcaactggaagaaagggtatcagtgatggaagatcaaatgaatgaaatgaagaaagaagagaagtttagaagaaaaagaataaaaagaaaggaacaaagcctccaagaaatatgggactatgtgaaaagaccaaatctacgtctgattggtgtacctgaaagtgacggggagaatagaacgaagttggaaaacactctgcaggatattatccaggagaacttccccaatctagcaaggcaggccaacattcaaattcaggaaatacagagaacgccacaaagatactcctcgagaagagcaactccaagacacataattgtcagattcaccaaagttgaaatgaaggaaaaaatgttaagggcagccagagagaaaggtcgggttacccacaaacacaaacccatcagactaacagtggatctctcggcagaaactctacaagccagtagagagtgggggccaatattcaacattcttaaagaaaagaattttcaacccagaatttcatttccagccaaactaagcttcataagtgaaggagaaataaaatactttacagacaagcaaatgctgagagattttgtcaccaccaggcctgccctaaaagagctcttgaaggaagcactaaacatggaaaggaacaactggtaccagccactgcaaaaacatgccaaattgtaaagaccatcgaggctaaggagaaactgcatcaactaacgagcaaaataatcagctaacatcataatgacaggatcaaattcacatataaaaatattaaccttaaatgtaaacgggctaaatgctccaattaaaagacacagactggcaaactggatagagtcaagacccatcggtgtgctgtattcaggaaacccatctcacgtgcaaagtaacacataggctcaaaataaagggatggaggaagatctaccaagcaaatggacaacaaaaaaaggcaggggttgcaatcctactctctgataaaacaggctttaaaccaacaaagatcaaaagagacaaagaaggccattacataatggtaaagggatcaattcaacaagaagagctaactatcctaaatatatatgcacccaatacaggagcacccagattcatgaagcaagtctttagagacttacaaagagagttagactcccacacaataataatggaagactttaacaccacactgtcaacactagacagatcaacaggacagaaagttaagaaggatatccaggaattgaactcagctctgcacaaagtggacataatagacatctacagaactctccaccccaaatcaacagaatatacattcttttcagcaccacaccacacctattccaaaattaaccacatagttggaagtaaagcactcctcagcaaatgtaaaagaacagacattataacaaactgtctctcagaccacagtgcaatcaaactagaactcaggattcagaaactcactcaaaaccgctcaactacatggaaactgaacaacctgctcctgaatgactactgggtacataacgaaatgaaggcagaaataaagatgttctttgaaaccaacaagaacaaagacacaacataccagaatctctgggccacattcaaagcaatgtgtagagggaaatttatagcactaaatgcctacaagagaaagcaggaaagatctaacattgacaccctaacatcacaatgaaaagaactagagaagcaggagcaaacacattcaaaagatagcagaaggcaagaaataactaagatcagagcagaactgaaggaaacagagacacaaaaaaacccttcaaaaaaatcaatgaatccaggagctggttttttgaaaagatcaacaaaattgatagaatgctagcaagactaataaagaagaaaagagagaagaatcaaatagatgcaataaaaatgataaaggggatatcaccacccatcccacagaaatacaaactaccatcagagaatactataaacacctctatgcaaataaactagaaaatctagaagaaatggataaattcctcgacacatacactctcccaagactaaaccaggaagaagttgaaactctgaatagaccaataacaggttctgaaattgaggcaataattaatagcttaccaaccaaaaaaagtccaggaccagatggattcaccgccgaattctaccagaggtacaaggaggacctggtaccattctttctgaaactattccaatcaatagaaaaagagggaatcctccctaactcattttatgaggccagcatcatcctgataccaaagcctggcagagacacaaccaaaaaagagaattttagaccaatatccctgatgaacagtgatacaaaaatcctcaataaaatactggcaaaccgaatccagcagcacatcaaaaagcttatccaccatgatcaagtgggcttcatccctgggatgcaaggctggttcaacatacgcaaatcaataaacataatccagcatataaacagaaccaacgacaaaacccacatgattatctcaatagatgcagaaaaggcctttaacaaaattcaacagcccttcatgctaaaaactctgaataaattaggtattgatggaacctatctcaaaataataagagcaaatttatgacaaacccacagccaatatcatactgaatggacaaaaactggaatcattccctttgaaaactggcacaagacagggatgccctctctcaccactcctattcaacatagtgttggaagttctggccagggcaatcaggcaagagaaagaaataaagggtattcaattaggaaaagaggaagtcaaattgtccctgtttgcagatgacatgattgtatatctagaaaaccccatcgtctcagcccaaaatctccttaagctgataaacaacttcagcaaagtatcaggatacaaaatcaatgtgcaaaaatcacaaatattcttatacaccaataacagacaaacagagagccaaatcatgagtgaactcccattcacaattgcttcaaagacaataaaatacctaggaattcaacttacaagggatgtgaaggacctcttcaaggagaattacaaaccactgctcaatgaaataaaagaagatacaaacaaatggaacaacattccatgctcatgggtaggaagaatcaatatcatgaaaatggccatactgcccaaggtaatttatagattcagtgccatcgccatcaagctaccaatgactttcttcacagaactggaaaaaactactttaaagttcatatggaaccaaaaaagagcccgcattgccaagtcaatcctaagccaaaagaacaaagccggaggcatcatgctacctgacttcaaactatactacaaggctacagtaaccaaaacagcatggtactggtaccaaaacagagatattgatcaatggagcagaacagagccctgagaaagaatgccacatatctacaaccatctgatctttgacaaacctgacaaaaacaagcagtggggaaaggattccctatttaataaatggtgctgggaaaactggctagccatatatagaaagctgaaactggatcccttccttacaccttatacaaaaattaattcaagatggattaaagacttacatgttagacctaaaaccataaaaaccctagaagaaaacctaggcaatatcattcaatacagaggcatgggcaaggacttcatgtctaaaacaccaaaagcaatggcaacaaaagccaaaattgacaaatgggatctaatgaaactaaagagcttctgcacagcaaaagaaactaccatcagagtgaacaggcaaccgacagaatgggagaaaatttttgcaacctactcatctgacaaagggctaatatccagaatctacaatgatctcaaacaaatttacaagaaaaaaacacaaccccatcaacaagtgggggaaggatatgaacagacacttctcaaaagacatttatgcagccaatagacacatgaaaaaatgttcatcatcactggccatcaaagaaatgcaaatcaaaaccacaatgagataccatctcacgccagttagaatggcgatcattaaaaagtcaggaaacaacaggtgctggagaggatgtggagaaaacaggaacacttttacactgttggtgggactgtaaactagttcaaccattgtggaagtcagtgtggtgattcctcagggatctagaactagaaataccatttgacccagccatcccattactgggtatatacccaaaggattataaatcatcctgctataaacacacatgcacacttatgtttattgcagcactattcacaatagcaaagacttggaaccaacccaaatgtccaataatgatagactggattaagaaaatgtggcacatatacaccatggaatgctatgcagccataaaaaatgatgagttcatgtcctttgtagagacatggatgaagctggaaaccatcattctcagcaaactatggcaaggacaaaaaaccaaacactgtatgttctcactcgtaggtgggaattgaacaatgagaacacatggacacaggaaggggaatatcacacactggggcctgttttggggtgggaggagtggggagggatagcattaggagatataccgaatgttaaatgacgagttaatgggtgcagcacaccaacatggcataggtatacatatgtaacaaacctgcacgttgtgtacatgtaccctaaaacttaaagtataaaaaaaaaaattcaaaaacctcagtggcatctaatgagaagcatttattgctcacaagactggatagtgagttctgctgatactgactggactcactctggtctggctatggtctgaggtagcctggccctgggggcgcgatggaggctgactcagctctccccacacctgtctcatgttccagtcaggtagccactggccaagaagccaagctaggaaccagggtatctgactcctgagctaaactctaaccctctacaatactgcctcccaaatataacaccaagtgctaggtacatatcatccacagttttcagacttctgcccaaactgggattctttttagtgtgaagagacctggcctgtggggctgaccctggtgtggctgtgaggcagacacaaagggacatttacatccagtcctgaagattacagtccagccctgaagcaacaactaggaaactattccaaaaggaggggatggggctgagtgtggggttctattctcttcataactttaactagaactcaaattgtgtaccttggtagcatccaatcataaatttattttgtcgtatttgtgatagaaaggaacaagtttatccacaaatttatttatttatttatttatttatttatttatttgagacagggtctgactctacgacccaagctggagggcagtggtgcaatctcagctcactgcaaactctgcctcccaggctcaagccatcctcccgcctctgtctcctgagtagctggaactacaggcacacgccaccacacccagctagtttttgtattttttgtagagatgggttttcaccatgtttcccaagctggtctcaaactcctcaaaagagttaccaagcaggactctgcaaccaataatccttgtgtgaagaggatatttgctcttttccctgtttttctttcttggtacagatgtgtgacctctttttgaaaggtgatagtgactttggtgtattttatttggtggtaatggtcatagccccattaatcacatttcttcccatgagaaagaaaaaccactacatggtcatgctaaggatttcagtccctggggtgaggatggtcttgaatatctcctacattcataactcctccacacatctcagtaggtcactgagcacatcaatggacatgccagttattaaaatacttcacgaatactatgatcatttaccagtatgagttattctctggagcttctaatacttcaatagtactgcatggactcagttgagagttaattcaaaatctcagattatccaattctgtttctttccttccaggcaccacctacctatgatgccgtggtacagatggagtaccttgacatggtggtgaatgaaacactcagattattcccagttgctattagacttgagaggacttgcaagaaagatgttgaaatcaatggggtattcattcccaaagggtcaatggtggtgattccaacttatgctcttcaccatgacccaaagtactggacagagcctgaggagttccgccctgaaaggtacaagtctccagggaaatggagctcaccctgacccaggctggttcaagcatattctgcctctcttaatctacatgacaatcgtgtggttgtacaatcatttgcttgtaagtctttttatcacaaaaaagtgataattatcaaactttacaaaccacagactagaaaaaacgaaactacatccatccacagtcccagcacaagacaaagataatcaattatgtccctgtgggcatttttctacgcctatatagatttttaaaaattagaatggtatcactttttatttggtttgaattgctgcttacttgatttaacaggaaactatccactgacctatattactataaatatacatatatatgtatatatataaatatatatatatgtatatattgcatatgccataaaccatttaaccatgatgttatttcaggtgtataggctttttattcctttctgttttttctatgctgtgccctttagctctctgaatttaacagaaactttaaaacatgcttccacattccatttgctttcaacgttacttgctatttcctctgtagtaattataagagtgcaggctgaggtcctgagaagtcctcatccctaatggtttaagccacttcactgaagacacaagacagcacaggtcctcctggtcctatctgtggctgcagtcctgtgccagctcccttatactctcagtagacatctcacacactcctccttggaggtgtcttgagcatgctcttctgggaattcagggacaaggtcaggccttaggcacagttcgcactctggatatagttggtgttttcccattactgtattattaagcaaaatttagaatgaaatttttagggtactggctggtgattcaggatgcttgggatctagactttcattagcccctacctgcaagtttgctgatgggaggaaccttgtcttgttggtcatggtgtccctagtgctagcatggagtctgcacataatacttgttcacagagtaagtcagagctgaccaagttctctgttttctggagtagaggacttctatgtttcctgcaagctcagcacttccacctcctgtggctgcactaatacgaaatcagagaccactcgctgtacttcactttgaatcactcagtcaccaaaaagatagtgcttgccatgtgtcaggaacttggctaggcagggagaaattcatatgatttatataaatccataaatccatatgatttacataaatccataaattcatgtgatatatacgtatatgtgtgtgtatatatatattagagaatgtttgacatatacacaagtacatgttaccgacaccagcctatagaatagttttcgtgcatctccatatatctatcactggttccaacagccatcaatccatgttagctgccccatccaaatgccaccatcaccctcctcctgactatcatgttattttgaagcaatagcctgtaaatatttcagaatgctctccaaaatataaagactcctgtaaaaacatatgacaacaatgccattattactttctttgaatcaacattttttccttaatataatcaaatatttagaaatcaaatttgaataaaacatgggtcaatcttcaaagaatttatagcttaatggaacagatcaaggaaagcagggatgacactacagtagggtagcatcatatgcccatgtaacttatgtgacttaaactatcctgtaagggtgtgggggagaaagagaggaagagatggagagaagaaaaaggaagagaaggaggaggagaaggaggcagaggagaaggtggacggggaaggtagagaggaggaggaggggaattagaaaaaaagagatgacaggagaaggaaagggaaaaataacaacttgaaatagcacaagacgttttctccttctcctttctcaatgagcatgtgaccaacacaagtgtgagttgaggcaggaatccacttttccatccatcagtcttatcatttatgtgccttttatagtgtgaacacatcaccaccctgaatataattttagtgtttagagataaatattatttgcaacaatattcatctcatctcaagaaacgctcctatagggtatggagaatttaaaggacctgtaggttatgatgattataacgaaataaccaaagcaggatttcaatgaccagcccacaaaagtatcctgtgtactactggttgggaggtggaggggggttgttcttaagtaagaacccctaacatgtaactctgtggtttttatgtttcattaactatttaatctaccaatatggaactaggttcagtaagaagaaggacagcatagatccttacatatacacaccctttggaactggacccagaaactgcattggcatgaggtttgctctcatgaacatgaaacttgctctaatcagagtccttcagaacttctccttcaaaccttgtaaagaaacacaggtcagtacactttctgtatgttttattaagaatttttttaactgaagggtatatattttttaaaagaatatgcatgtttatcttttaataattcattctatgggccaaagaacctacttggatccatctttgatcattaaggatgcttcagttctggacttcaaaacctgtagcattaagaacatcatgtaaagtccacacagattagcatgacatgattatgtgtagtctctttgaacctgagtaagtttaaattcagtttcaagtcaattggaaagaagtgttttgcacaatcatgaagtgcaatgattacctggctgtgacttaaatggtgttctccatcaccagaacctgcagaagctctctcatgacagtggttctcaaccactagctgtatattggaatcaccagggagcttcaaaaattcatgatgcctgtgacatctcagaaattctaaactaattaacccagagcgtgactaggttctgtcatgctgtcgggtgaacccctgattagttctcacgtgaagccaaggtggagaatgactaatttcaggcatttctggtggatatgaaggactaccatagagcagggctatccttactccttgaccttatgttccaggtgatacatttaaagaaagatttagaatcttttctctgaagaagttaaagaacagatgtcattgattcatattaagcaatagcctataagtcttatttccaggaccggtgtatttaatatgcaactctaccccttaagtacactttgtgcttgggagaggaggaggatggagatggttgccatcttatctatggcttcagggcagctgtgtagctttcctatgtgtgtattcaggcagggggctcagccctgagagaaagtgggcctctggcacacctgggacagggaagatattccctggcaagctctcaggcatctcaggctggcacttctttgtatccatggcaatttgctttcccctcactgaactgagatcagaatgttactctgttggtggctcccccaacagtgaaggggtgactcagtgacaatagtgctagaagtatgagtcaaaacactgtacaacttgagaaattccccgtttgcactacgcttggaagccaagaggagatgttaaaaagaaaagaataattctttctgaagacatttcccatcattgcacttgatgggttcaactgggaagggttactagactctggaagttgaaaactgcccacataattaaactgtacaacagctactcaggattaccttgcaagttttaacctataaaaatttaactttatatagcacttccaaaatagtttgccataatacctactaatctggatttaatttttaaaactcatccttttaacttaagatttaaataaaaaaaaaaaaacacgagtccacaagaatttgtctcaggcctggcacagagtcagtgctccataaatattttgttaaacgatggatggtgagtgcttttactatccagtatttacccagcttatagattaagtatgaagagttcaagatacatggtgttaagagtcgtttttatatgcttgcaaagcatttttgtcatattttttctactttgcttccatcttttcttctttcacttcatttattaattctccatatgcttgtttaactattgtagatccccttgaaattagacacgcaaggacttcttcaaccagaaaaacccattgttctaaaggtggattcaagagatggaaccctaagtggagaatgagttattctaaggatttctactttggtcttcaagaaagctgtgccccagaacaccagagatttcaacttagtcaataaaaccttgaaataaagatgggcttaatctaatgta

SEQ ID NO: 1164 - DNA, 218474 bp, Homo sapiens
tgcttgcaggaatacccagtcatctagttggaaaagccgccagatggaatacaaaaggaggaacccagacgctcatggagacagcctcggttcataaatcaggtggggccaggggctgggggcccacacgccatggagcccgactcccttctggaccaagacgactcctacggtaagacggtgccagcaaagtgcagagttgggggtttcagcctctctgctcaacagacttttctctgctataggaatctgagttgaagcagggaggcagtcaggcatctgggcactgtctggtcttgggacccatgggtgggcatgggtgcgttgggctatgagactcagggctggagggtccctggagcgggcagcccctcagactccaggcattgacaaggtccaggggagggagagagagtttctcagctgcttctgttttgctcctggccaagaaggaaaggaaggaagttttgcagcccccctgcctgtctgcctacctcgctgttcgccaggcctgccctgtgctgtggggaattcaattagtgcgatcctgcggataaatatagatggaagaggcaacaggaacataccttgtaattaaaggccagggctcatgctgaaagcactccccgtgtgacagggccccagtggctgccaccggagagctgcccaggccactggaagctctgcatgcattattgggggaaaagttgctcgggacagagcccatgcagagtctggaagagggatttataagactcggaagggttccttcgtggtggtttctgcaggcctggggctccagcgacgcagtaactcagctcctgcactactcagcctggccagagagctcacatttggctgggatgcccggcacagcctggctgtctctggacaaccaaggagggacgcaagagtgcaagagtgtggccgaggcaccgaggctgggcatgggggggtggggcagcaggttttgggactcagcagggagaagtcctgttggcctcggaagaggtggtaattgcagggcgacctcatcccagcttgggtcaggtcagccttccaggggttcaggtcctcctgagaccacagttctactaagaaaaccaagtgcttgtttctccggactttcccccaccccatccaggcctggctgcctggcacagattcaaggccaaatttccttcctcctgcaggagctcagccctttccaaggagaggggccctttgccacgtttggagctgcagccctcagggaagcttggcaaggcccagcccacagacctggcatctttgggcccaggggacggggggtcagttgatgcatgcagagtgacctccatgtgccaagccctgtgtcagggtcagggatgtgtaggaatgaggaactcagtcctaacaaatagttggtgcttagtgaatggaaggaggaggagaatacaaagggaggagagagggaaaaaaatagggagagcagcccttggcctggaagagctcccagtctggaatgggagacagacaaacgatcccagactaaattcagagtgatgcggtccttggggaggccaggggcagacagcctgagggtgtgggacaggcctgcctgcctccagagctgttcactggaagcttggcattgggatgcgtatggactcattggatgtctggatgctcccctagggagggcactgacctttgaagaggcaggcgagggggtgggaaggaccagccccagccagggatatctcaggaacccacagtccccacttgctgtcctccagatttgctagtagcagcctctgggctgggcaaggctggaaactgaggctgcctccaccctcatggaaaggccccatgcacaatcagctccttgtcctggcctgtcacgaggccggttgctgatctcctggaagctggccaggcagggaggtaagggattcaagaggaagaggaaagggacagagggggccttaggaaagggacaggcaggcatggagtggagcccaggctctctctgggagcaatcccaggcccagctggagaggggtctggcttttccagccaaggtctcccacccagccagcctcaggggtccagggctgaaggaggccatcctgggtcagggcagcacaggaaaactgcggtctcagtgagtcacttccccagtctgagccccggttctacattcatcaatttaacaattactttcaggttctggactgggctttggtgttcaagaacaaatcaaactttgtgactttcctaggctaatctgagagagatgcaggtgcactgatgggggaagtcaaggcgtgtggaagccctaaccctatacttggaatccagaaaggcttcctggcagaggtgactcctccactgaagaagtcaatgattccctctatattgatcagctcaggctgctgtaacgaaatagacaaggtgactcacacaacaaagatttcagaaacagaaattaaaacagaaggctgggcgcagtggctcatgcctgaaatcccagcactttgggaggctgaggcaggtggatcacttgaagtcaggagtttgaggccagcctggccaacatggtgaaaccccatctctactaaaaacacaaaaaattagccaggcatggtggtgcatgcctttaatcccagctacttgggaggctgaggcataagaaccacttgaactcgggaggcaaaagctacagtgagccaagatcacgctgctgcactccagcctgggcgacagagagcgagatgccatctcagaagtaataataacattttgcagtgatgtgatcaaaggtcactgcagccttgaactcctaggctcaagggatccttctgtcttagcctcctgaatagctgtgactacaaacatacaccaccacacctcactaattaaaatttttgtgtgtgtgtggagatggggtcttgctgtgttgcccaggctggtctagaactctcgggctcaagcaattccaatgcctcagggtcccaagtgttgggattctaggcgtgagccacagcagtcagcccttttctctttctcttttttttttttttttttttttgagatggggtcttactctgtcatccaggctggagtgcagtggtgcgatctcagctcaattgcaacctccacttcccaggctcaatccatcctcccacctcagcctcccgagtagctgggaccacaggtgcacaacaccatgcccagctaattttttgtatttttggtagagacaggttttcgccatgttgcccaggctggtctcgaactcctgagctcaagtgatccacctgcctcagcctcccaaagtgctgtgatccttttgtctcttcttataaggacactaatcctactagggccccatccttatgacctcatttaaccttaattactccttagaggccccatttccagacagagccacgctgggagttcaacatatgacttgaggatgggagggatacacatgttcagtccacaacaccctccttttttattgagacagggtctcactctgtcacccaggctagagtgcaatggcatgatcacagcttactgcagcttcgaactcctgggtgtaagcaatcctcctgcttcagccttcagaatagctggactacaggcatgcaccaccatgcctggctaatttttgtattttttgtagagacagggtttgcccacgttgcccaggctggtctcaaactcctgggctctctcaatctgcccgcctcggcttcccaaagtgctgggattacaggcatgagccacagtgccggcctggcttctgggacaggctgctctcggggtttcctcccattatctctggctggccccttctcctggggctctctctcctgctgctgcccacagggtcccttcgccagtgcctgcctcctctgctccttcatgattgaactcttcctccttcacccctcactccctcgcttcccgccatcagatctgaccttcctcacgcccccaagctgtctccccccagggcctttgagcatccttcctctttctcttccctgagctaattcctcctcctcttcccagtatcaactgaaaagtcacctcctcagagaagccctccttaaaccatgttcccccaatgcatcactctcataggccctcttttcctttatggacgtgttcatatgtgcactacacattattgcatgctgatgtgtttcacctgcatctcccgtgagtctctaagcaatctggatccccagagcatagttctccacctggcaggagtaagcatccaacaaatgcttgttgaatgagtgagtgaacaaatgcagttggtgcaggcaaaaaggcaaggaaaggcattccagggcagaagaaacagcaggtgcaaaggcatggagactggtgatgctttggagcattctctgatacttacaatcttggtcaggggttggcaagctgagctcctttagggggctcaggaacattgatggggatggggaagggttgggagctgcaaagctgggggtgaggctctggacatctctccctgcttcaagctgagcaaagcgcctttcgtctagtgaagaccccagttctgattgcatccatcaggtgttcagaggctgaaagggttcagccatggcatggtgggggatccgcagccactggcactgaagttctggaggcctaagcctcttagcaggcaggactgagcagagccctattgggtggtctggcggtgggagccccttagagcatggccaagaagggctcagacacagctgcagcgaggagcagacataggtgcagaggtttcttttacaggacagtcagaggcaggaaggtgaggagaaggggagagctcggaaactcggcactaacccctgcagagcccttgtgattggccttagtttccctaggtgtaaattggggtgacggccagacaagatgtgactgtcccctctggtgccagccccttggagctgtgtgaaaagtccagctcagagaagcatgtcctttccgtctgccttgtgatttccaaagaagggggcaagacagaggcctggcagcggccagcataagagaaaaagtcctgccctgcaaaatatgctttctccgggttcttttggagtcctgctatttctccacttcgtgggtaccgtcctcctaccaggacagctcctggtgcttcctccgcctgggtgtgttttcattgtctgctcaccagcctgactcccacatgagactataaggcccttgagggcaggggctgtatcttgtctgccactgggttcccagggtgctgcacagcactggtcctgagaaggcactcaatacatactcagtggatgaatgaatgaatgaatgaatgaatgaataagtgagcgagagtgagtgaattaatgagtggcatgagctggatcctgcccttaacttgctccgcatccttaggcatcctccccgactctggacttctggttccttagctgtcagctgagggtgctgggccccatgccccaagagagcaggcctgcatctcatcccagctctctcggttattgggtggcctggaccaagtccctgccctgacttagcctcagcttcctcatctgacaaatgggcagactcagccctgccctgcctgtttttcaggcggtcttggagctctggaggagtaaggaggcaaaacagtgtgaggctggacacctgtcaggggagtctgtgactcgtacaggagcgggggttgggctcagacagcccgctgggataaaccctccagaagcgggtggttgctttcgatatcatggaggtggagcaggcagctcaaaagctcagaactttccatttcttcctgatgacaaccagcatgggcatctacctcagggttgttggcagatcccagcagagaagcaggtggatgtgagtttgtaaacttcccaatgctactgctgtaataactgtttggtaagcacctactccatgccaggatccaaagacactttatctacactgtcttctgttttggtttgtttgtttgtttgtttttgagatggagtttcgctcttgttgcccaggctggagtgcaatggcgcaatctcggctcactccaacctctgcctcctgggtttaagcgattctcctgcctcaacctcccaagtagctgggattacaggcatgcgtcaccaagcctggctaattttgaattttttggtagaggcggggtttcgccatgttggtcaagctggtctcgaacttctgacctcaggtgatccacccgccttggcctcccaaactgctaggattacaggcgtgagccaccgtgcccagcatttttttgttttgttttttgttttttgagatagagtctcactctgtcgcccagtttagagtgcagtagcatgatcttggctcactgcaacctccacctcctgggttcaagcaattctcctgcctcagcctcctgagtagctgggactacaggcgcgcaacaccaggcccggctaatttttctgtttttgtagagatggggttttgccatgtgagcaggctggtcttgaactcctgacctcaggtaatctgcccaccttggcctcccaaaatgctgggattagaggtgtgagccactgcatctggcctacattgtcttctgaatccttgcaatacacctggtgggttgcagttagccttattttccagatgagaaaattgaggcccaaggaggttacgtgactggccctgatcacgcagtgagtgcactgatttgaacccagctttctccagctacaaagcctgatatctttattttgctgcagtcctgaaagccattgtgtgccaaagctgccacctggaggcccctccctgtgcctgtggaaaatcctctctcccggggagcgttcactgaagcagctcagagatgtggcaggagccatgtcagctcagctggccaaggcgagaggcagactcagctgtgggacagggatggtctaaagagaagacaatttgaggccaaaatagcctaatgtcatcagggggcctgatatcatgactccctgggccttcctttgagaggcagagggattagcttcaactggtgacagatagataataattgtaaaaaataacagctatgtgtccagccactggcctcccatccatcgtctcgcttcccctgcttaggcctgccctccctctgaggcctcctcctggctctgccactcagctcactcagcaggtgccagccaaagacctgggctctcatcgagcctccatttccccatctgtgaaactgacaccagcctagcctgcctggaatggggaagggacgccagaatctagatcccttccatcttgttcgagggctctgtcctagaccaggctgcctgggcctcagaaaaatgaaggaagagaagccacattcatacctggagcccttctataagtgaaaaaattaggccaaggatgcagagctggggtcctatttatgagcatttactgtgtgcctggctcactgctaaatgttctccactgactcctcacagaggaaggaacaaccccacagctcagaggagaaaatcaaggcttagaagggccctgccacacagcgagtgaggaacacttgtgattcaaacccaggactcccaagatcctgtgagctttctccactttgggctgctcccaccaccccactgggtctcctggcccccaatccagggccctttcccatgcccaggggggcctcggttctgctggccagccatgcggggggcttctgaacttgcccagctgggcagctggatgagtggtagagccacacgccccctccccttgccctgagactctgggaagaggcgcaatcaggaggaacagacaataaagaacaaagaggccagctcgggaggggcttaggtcatttccacacacaagcctgagcagctggcctcataacaaggtcaggggctgaggctgcagtgggggttggctggtgaggagggagcccctgtgcctggagcagggcggggaagagccaggataaagctcaagagagaagagttggtttccccagagagagggacagggaaagggagggagcacctatgtgcataggacgcggacatttcacttcccataggctcctggagagcccctcctgaactgtacttaacacccccaggcctgggcttctatctgctgcgcctccgtgtgacctgtgagccaggccagttgattctcagagcctcggagggatggggacagcagcagccaccgcgcagggctcctctcttgtgaggaccaagcaggatagatccttccttcttctgtggtcctggacagccactgcctcaggctggctcctccgccacgggacctggtgcagagtcaaagatctttaagtcaatctgtagcatgatccgggtcccctaagctttcctaccaccgaatgtgtttcttggtatattgttcaattcccgttttacagaggaagaaactgacacactcgcttgagtatcggtccttcaagtaatgtggcctgactcatgctcaggttgctggatggctgccacagccctccttattccaaagaggcaggtggaccccacacatcaggcccagtgtgtccccagcttcccctcactggcctccctgggctgactgcaggatatccagagtctagccttctgctcccactgccccgtctgttccttctgctgggtggatacgccctgggctgcttagcccaccctgggccttccaaagccagagctgtggtcctcccagctgggattcctcccaaggtctcaactctggaagcccagggaggctggaacaaatagcaaatggccaaggtgtagggagacccaaggggaagggtctcttgaggtcctcctgtccattctctgttacatcatgggaagatggaggtcagagaagatgaaaccaggcccacttacggtccatgctacctcctaagaggtccagagatccaccccgactctccgtctccagcccccacttcaggccaggcctcaccttggacacctgcacagctgccttgcctcttcctggggctgtccatctctacctgccccccaactcatccttcgtgcacagccagaaggggccactcataggcattcaaaaaacttcacagggcccaccgctgcagcaggataaaatccaaactcattaacagagcttaatgccgttcatggtctgaccctgcagatacacttctgctctcatctccaagccacaccccactttcttgccactcccatcatcatgaattaatttctgccttgaatctgcctctctctctcccttacctttgcacttgctcttaccgctgcctgaaacactctttcatcttagccttccctactacccctccagcccggtcaatcctgcccatcctgaagtctcagctcaggtcacctcctccaggaagccttccctgactagcttgtttgggctgcctaggctccctgggctttctgctatcccactgcactttgatgagtaaagtccatttgctttactgtttgtccccatctctgggctgtgagctgcttggtgagccacagtgaaaacttggaggggaggctgggtgggtaaagaaagaagtcaggataaccctgatctctggcctgtgtggcaggagatgttggtgtccacactgacatggggacctgggtggaagggcagattctggggggggaggggaaacgatgttctgggcttgctgtgtctgaagggcctgcagggccatccagtggctatctctagagaagttggtgacggtcacctttgagagaggcctggattccagaagggagggaggggagctgctggggccttcccagcgtgtgtcagaaccactccctttcccaggcttgcagaagccctcactcaactgcccaaccagggtcctgtcacctcccccaggaagccagcctggccctgacaaagcagtgctctgttctcccccttgaccattactcgcctctggtctgaggacatctctcgggctctgccttagaactcttcaaggtgggagccacatccctccatgtcttgtagactccgcatcgcccagcacagggacagacacagagaagaagctgcatggacaaggagccctgccccttcccctggacacagccccagccagtgggattctggggaaaagaaaacacaagcctgaggagctttgggtcagattgtctcgggagagtgggggaagaggcgggtggagtgggggtggatttctgtccaatctggaagcctgtgctggatggccggatcgccagcaccccaggctcgaagcgttccagccggtgacctacattcccagggcgcctctgtgtgtgcgcacacgggcaggcgtgcgtgagtgcaggagctccacggtgtgtctgccagtgggcctctgtctcggcaggctgtctcctcaggagcccgtgagtgagcacgtgagggcgtggggggcccacactcctgctctggggttccacagactgcaccagaaagagttggtctgtgccctagaaaagccacagccagggactgcagggactgacatggctgggggtggctgtcccacccgcagccctgcccaagaccctctctctctcctcccatgctctctctgtgacaaatggcctcacactgctctttgctaatggtggggtgttaggcatggaaaatggagggcacagctcttaggtggcggtggagggcggggacctcaaacaacagcccgaggcagccagatggcaaccagaggtcagtagggtgggtggctcagcagagggagcaggcaccaggctctaggccctgcagcctgaggtcagggcgtcactcaggggtccttgggggctgtcccgggtcaggatcctcctgcctccaggcgggggtagaggtggagatctctccctcctgggaaggcctgtgcttgactgagaagctaagctgactctatggccctgaagccagggcaccagggaatctggggggtgggtgccctgctcagagaccctttagtctctcctttgccagttctgtggcgggtggggtaggggtggctgtcccccaaacccttctgagcctcttctttcagacttggtccctgacagcagggaggggatgggtagtcctttcagagactctctctgggtctatctctgtctctttctgtctctctatctctgttcctatctctctcagtccttctgtctcagtcatctctatatatctctctgtatctctgcctctctctctctctttctccctcctgctgggctccccctgctcccctcttccctcctctccccctagtgactcctgcaaagctccccttccccagcagaatggggaacacagacttggctgagggcctaccgtgcccggcagcaagagaaaagtgaggctcgagcccccgacagcttctccgtggcccttccaagccccgggggatttttgcttcagttctcctctccctccgtcaattccccagctgaggccaaccttggtccctgggctctgcacctcctgcccaccctcctgcctgtatgaggacccccccatcgacctcccttgctggccctttctccggccctgcaacgggcccaagtctctcccatcccatcctcactgcctcatcctctccggcctatgtcttttttttttttttttttttttttttttttttttttgagacgaagtcttgctctgtcacccaggctggagtgcagaggcacgatcttggctcactgcaacctccacctcccaggttcaagctattctcctgcctcagcctcccgagtagctgggattcccagcccatgtccttctgatctctgcttccccactggcattgtgcaactcaacaccactccctgccccaaagctgctctgaacgggcccaccagtggaataccaactgcagaatccagggctttctcttggggcaccatcttaccagtcctctcgggtgaggctctggttgggggtaggtcagggcagggtccctggagccccgcaccatcagatctctgccccttaccaggggaaatgatgtaacttctctgaatctcagttttcccacctgtgagatgggatggttaccctggtactcctgtcacaggttattgagaggagtaacactgttcatgcttatttaaaaaattctgagaactgatctagcagagaatgaggcctcagttgatcttggctgtagttataatcatttgtgtttgccattgcttgaatctctctcctacccccccaccctgaggaccccacagtctcctctcctgggtttcctctcgcctgtctcttcatcccctctcggtctttcctgtaggctcccagctaagccaccaggtgaccaggccaggccctctgcagtccccaccatccctcctcacatctgtgtgtcctcacacccctgcccactgcaggaccaagtccacctctgccacccacacctttgccagcccctacctggaccttctgccttgccggtaccacccagaccaggggacctccctaacataggctcaataccctcctcctctgtgcacctgaccggttctgctcagggctctgggggcagccctgtcacaccttatggccttgtccatcgatctgtcagtccacatgcctgtctctgccacacaccttggagcttcatctctgtggccctggcactttctgctgcatatttgttgaatgaataatgaatgaacgaatgacttgatgcaaatcaaagtactttgcaagctataaagcgctcctccaatcaatgccacacacagtggggtattaaggagcactcaaagcctcctgcaggacttggcctcaccttgcccactgcacctgggtcgggggaaggaaacctcaatcttccagaaagttctaatccttcatctgcctcaggatcattctgggtaggaacgatgcccagcctcgccctagagatttggattcagtttagtctaaaggaggcctgggcaatggaatgtataaacccctcctccttttttccctcctcccctgccccaccaggtgactctaaggggcagctgctggaattggaggaggattgttggagccctggtctttgctccctgcccaggttcacttcttttaatttgtgccttctctgtgctagctccatgctgggtgctagaggggaagcacgcacccagggaagcatgaggctgggtctctgctttagggaagagcttagaacaggcactcaaggctacagtgacatcccagggtggagagacctctaggggtaggtgggaaggagaagatgctgaccttaaagataaccagagacctaaggccaggtacagtggctcgtgcctgctattctagcacttttgagaggccaaaggaggaggatcgcttgagattaggagaccagcctgggcaacacagggagagcccatctctaaaaacaaagccaaacaaaatacggaggttggcctggtggatggaggtagtgaacaggcagagggaaccacaggggaaaggcctggagttgagaactacagagtagcccatctaagaactttttttttttttctgagatggagtctcgctctgttgcccaggctggagtccagtggcgcaatctcagctcactgcaagctccgcctctcaggttcacgccattctcctgcctcagcctcctgagtagctgggactacaggcgccaaccaccacgcccagctaatttttttgtatttttagtagagacggggtttcaccgtgttagccaggatggtctcaatctcctgacctcgtgatccacccaccttggcctccccaagtgctgggattacaggcgtgagccaccgcgcctggccgcccatctaagaactttgagtgattcagtgaggctgtaccccaaaatccaggtgcgcaggcctggagaggtcagctgggctggggtagcggcctcaaatgccgggatcaggagattgggctttaccttgcactgggaggagccatgaatagtttcaggcaggggaggaacagggttgtgctgggtcttcctggaattgctaagacccaaaccacccctgaggcagctcaggtgaggctgggtggctgcccacctctgggagctcacaatcccagcaggagaagcctagcccaaggagggaggccaagaagacccagagccaagggggtagtggggttcctggactggctaccttcgccagacctgctcagcctccagttccctgtttagtggcattaaaggtttccgtcccccaatgtccttggcagcccagtgcatgctcaacttgtgggggagcaggaggagggcagctctgactatcttccttgcaccttgcatcttcaggaggggagctagtcagactcttagggaacaagagaaagagaagggaaggtgcatgagcattttgtgccagagctcatagaactctggctggaaaacgtagccccattttacaggggaggaaactgaggcacacagagatttgtgatttgtccctggttgtactaccaggaagtgacagagtcaggatttgaactctggtcctgctggcttcaaagcctgcgtgcttcccactgtgtgcatccctgctctgagtctgcactgagcagcccacgtgcctagtcctgctccagggagaggcaggagaggctgtgtgagagctacaaggaggctggggtctctgctcacctcagcagtcccagtaaagtaggcaggaaccatgggagagattcgagcagaggagggacaggtccaaagctgcagccagaaatcgcctgtgctccagcccctgtccccagcccctcaatgccaactccccatccttcagctgaccccgggctcattaagtgctaggaaacgccaccagcagcgggtgcagggctgagggccaagctgccggctggaacaaaagagcttgtgtttggggataggacctccccctccttcaccacggttgggggccgtggggggaagtgaggacagtcatctggggccaagaggggctgcagggctggggaaggggcttgtcagagcccggattcagatagaaagggctgaaagggggttggaagctaatgtgcctgagcgtctcagcacaaacgggccattttcagcgggcccagaaatcaaaacatcccggctgggggagagcaagctttgaacttttcctgactcgtggtcctgggggtgaagaggtcagggactgccttgaggtgggggccaggccagggtgggatgagcagccggcagcccaaagcccccttccttctgtccccatgctgagtctcagagggaaccagggctgctcagagcattcagaggagggtgcgggctgtggggggtgagaaggaagggaagccccattttcactgtctcctcactcccaactgtgggcagccaggtgtgcttctacattgcaggtctggccccacatcccctgctgcagacctccactggcgcccccgtgactctcaggatctgttcccagctctggaacaggctctccggacccctggccactggcaccctgggcagcttacctcgtcccactcctgatagccccccaatgaccactttatgcttcagccaaatctagctgttgacagctcctcaaacgcttgggctggctaagcctctacagtttccatgactctcttctgagccggaaacacctgcctcctccctacgtgcattcattcccacccccgaaacgggacaaactcctactcacatgctagtgcccttttgctcaccactgcctccagaagccttcccagcccctgtgaatgagttcttagtgcaatggtggccacagtcactgcaggatgcagctgtctccaggtgaaggctctgccctgcgggcagccctcatgtgtgtctcattcccctgtagccttaggcttgggacagaaagcttgagaccagtaaccagcgagcatttgttgaaagaaggagaaggggaaggagaaggagccacgaaaacagaacaaaacaaaacataattttagaaaacggagaagctggccggccgcggtggctcaccccttaatcccaacactttgggaggccaaggtgggtggatcacttaaggtcagcagttcaaaaccagcctggccaacatggcgaaaccccgtctttacataaaatacaaaaaaattagtcgagcgtggtggcaggcgtctgtggtgtcccagcaacttgggaggctgaggcaagagaattgcttgaacctgggaaatggattttgcagtgagttgagatcacaccgctgcactccagcctgggcaactgagtgagactctgtttaaaaaacaaaaaagaaaagggagaggccaagaaagagaaaacaaatgggtaacaggggtaggggaggagccggctcttctggccactgaggaacgtgccagaacagacagactgcacaccctgagcatcagagcaatactatttctctgtggtgagacccctggacagctcagtgccccagaggcagggtcctgggcacaggctggctttgctggcaggcccctctacagtttagccaacaaggcggggcagctgttgggggggatgggtggggggtcccaggtgggcatttagctgcccgcatagcacttcggcatcacctgccatccgtggatcccagattcctgtctctaagagccccaagagcctataggctctgtctaggccagtggttttcccgttgtgtccaaggagaagctcagaagttggcgtgtaggagacacttccttccttgaacccagcttggactagagcagctcaccagatccaatagaatacaaacattgacgtcaggcgtggtggctcatgcctgtaatcccagcactttgggaggctgaggtgggaggatcacaaggtcaagagtttgagaccagcctggccaacatggtgaaaccctgtctctactaaaaatacaaaaaatagccaggcgtggtggtgcacgcctgtaatcccagctactcgggaggctgagacaggagaatcacttgaacctggtcctgtggaggttgcagtgagttgagatcgtgccattgcactccagcctgggcgacggagtgagactctgttcaaaataaataaataaataaaaacttttttgagatagattacaggtgtgagccaccacgcccagcctcaaaataataatcataataataatacaaatgttgggcttgcctgaaaattttcatttaaatgacggttctggatcacttgagcccaggaatttgaggctgcagtgaattataatgtgatcacgccactgcactctagacagggcaacagagcaagaccctgtctctacaaaaaaaaaaaagtaaataaaatgggagttccatggctcaagtagtttaaagaacactggtctaacctcttccccttgtaaagactagaagacaaggcctagggacaaacaggtttcatcccaagtgcccagggaggacagggtgacagagctacctctagctcctggcccctcctgctggaccacacagccctctgttgaaagtataaacatatgacggaatgatcaggaatctgaaagtaggttttgttgggtaacagggaatagcaacaaaggacacttagtttctggggcaaagggtgggaagtagagaagaggaccaaagtgggaagcggggcgcagagtggctggagggggatttgtgggaggacaatcaccgtgcacttagttaattaatgatagctaggctgctgccaaagccattcaaaaccatgccgtaaatttcccagctttggacaaggcagcactaggtttatttttatttatttttacttacttttagaggtggggtctttctgcatttccccagctggagtgcagtagctattcacaggcacgatcctagccaactacagccttcaactccaggcctcaagctgtcctcctgcctcagtctgctgagtagcttggactacaggcgcgtgccactgtgcccagcagcactaggtttagaatcagaatctcagggttcaagtcccaactcctccatttatctactcactgcattgaacttggccaaatcaatgacctcttgagactcagtttcttcctcaataaaatgcggccaacaacacctctgtcccagaatggcgaggggtcaatgagagcacagagtcgaggctgaacaattcctggtgggttcaggattcttccttgcataggaacttggggaaggttcaaatcccagctctgtcccttactagatagatttgtgatttgaggcaagtttcttaacctctctgcctcagttttctcatctgcaaaatgaggataatagtagcatccacctccctcacaggatgtaatgagttgatacggattaaagcacttagaacagggctgcacgagggtttgttatcattatttggactctattaataactgcaaagattaggtcttgccaaggagagatggtagaaatggaataaaagagtgcacaagattggctgggcgcggtggctcacgcctataatcccagcactttgggaggccaaggcagacagatcgctttgagctcaggagttcgagaccagccagggcagcaagatccctgtctctacaaaaaaatacaaaaattagccagacatgtggtgcatacctgatgtcccagctactcaggaagctgaggctggaggatcacatgagaccaggaagcagaggttgcagtgagctgagatcgtgccactggactccagcctgggtgagggttagggatttaaaaaaaaaaatagaatgggttaatgaatgaatgtaagaaaaattagggttctaccaggaaccctaattacggatctaacttgacccgatcctaacccatcagtggcttccagtcattcctctgggctgggagcccaccctggctccctgtcgctgggcctctccctgcatttttctgcacacacgtagaggtaggctaccatttcgcccctagatgactttgggtgataaagaagtaacttcagcctccttgaattgaatcttctatccagaacatgtaacaaacctggaaattggaattgccctaaagctgattattctgggagggcacctcctggcattaaaactaaattagatcaaggtacctctgttattagcaaaataattccctatgattaccgaacacagccatgaatcctgatggcagatgaacttcaggtgacttacttgagacaaataactgtgcgaaaatcacaggctcatcgaatcacttctctatagcgttgcagttgggtaattatgctaatagttataagaaatcatcctttgtggtctaggattgggagggcttgagacggaaacgtaagtggcagatattacctgcttccagttggagagactgggtccaaaatgggccccttgcagggagctgcaagggagctggtttgtcccctgtctacaggggagaaacctgttatgcagcctgaattgcagtggcctggcaccttgggaggctgaggcaggcagattacttgagcccaggagttcgagaccagcttgggcaacacagcaagactcccttctttacaaaaaaataccaaaattagccaggcaaggtggtgtataccttcagtcccagctacttgggagtctgaggtgggaggatcgctttagcctgggaggtggaggctgtagtgagccatgattgtaccactgcactccagcctgggtgacaaagtaaaaaaaaaaaaaattgcagtgacctcattaagcatcccttttcagatcatcttaatacaggaaattgaatttgtccaagttccactgttgggcatggtaattccaagaagcaagttaaactgtaaaagctcaggacctctgagtcaatttgattcagcaaacatgactctgtgcccactgggtgccaggcagtgatctaggcacaggcagcgggggtgtcagcattcaagggtgtttctgatgctttcttaacagtctcttgtcccctcagtaacctgacgaaaaagacaatattgtgcccattttagagacaaggaaatgaaggctcggagaagcgaactggtgctactgctgataatcagtggagatgactacttccatccacccacagggaatgtagatctgggaggcttcctggaagagcggatttgggaaagtgcagtgtaggcagaggaaacagcttgaggaaaaaacccggaggcaggggattaaagtaggggttcaagaatggggttgaggccaggtgcagtggctcatgcctataaatcccagcactctgggaggctgaggcgggcagattgcttgagcccaggagttcaagaccagcctgaccaacatgatgaaatcctgactctactgaagagacaaaaattagccaggcgtagtggcacatgcctgtagttccagctacttgggaggctgaggtgagagaatcacctgagcctgggaggttgaggttgcagtgagccaagatctcattactgcactccagtctgagcaatcagagtgagatcctgtctcgaaaagaaaaaaaaaaaaaaaagaatagggttgagagggtagccgaaggtcaagaaacagagggcctcaaatgaccaattgagggtttggacaatggggagccaccagaggtggttgagtaaaggaggagtaagatggaacctgagaatgcctgggtgagagtgtgggagacccactggtagataaggctgcttacagggagggggccaaaaggggataaaaaatgggtagttttttcagtataagtgtgtcccaaatattgcataggatatacttacactaaaaaaaattcattgtttatatacaatttacatttacctggcatcttgtatttcatctggcaatcctacccccatctcctcacatcagtgcctagctgggttctctgcccatgatgactttcccttgtgggcacacagcctggtaaactcctatccatgcgttgaagccctgaactccttaccactgctgtggcaataattatcatgcactacggtgattactttcttaggtaattgttttactatctacccatccccttagcggcaaaccttacttctggctgcatagggaaaaaaaggtcaagaccgtgagtccttccatttcctgacctcctccccaccccaagttgcttccaacttctgcttctgtctcaagaagagccggcctctccatccctcctgtgaccttgcctgatcccttcagatcaggcacctcttgagatcagtacacctctctcactggcagccccaaaatcagacattctgctgggtcattcccaccagctgggcacctagcgagtgcttcccgtcctcctcatcccaactggggttccccaggagcaggctctgagaggtattcatgcataggagatccatcaagggctgctctctggctcaacacctgtggaagggaagggaagggaagggggaaaggggaagggtgaagggggaagggggaagggtgaagggggaagggaagggggaagggggaatggggaagagggaagggaagggaagggaagggaagggaaggaaagagaagggagcaggactgggcaggaggaggaactgagcttccatgcagtcagtgcaagcctcagcccaccctacacctggagctgggatgccccttcagagtcatcctgagctgtgccaaacttttatgaccctgggttggtcagtcactggatgtaggacaccccaggaaggaggtgtcacctctggggaggtggctgtcttcagcagaggcaacccccaagagctaagcactgagggactacttctagcagcctccccatacctaggggagtgagacctttactcctgaagaggagatccgggttgcacatcacaccccctaccccccaccaaacccaaggcattcccctccagcaaccatccaatctcttatcttccttctgacctaacccttcctgtcctcccttccctgcctcctactcactccccagatttttgtaaaactcaagagttggctctgtcccacccccggcgtgatatgatcggatctgtgctttgaaaacctgatagggagaactagtagacatggatccacatggagaggggccagtaaggtcgctcagtagccccctcaaggtctctcagtagctccctaaggccaagttgctgagcatggcatgtagggtccctcatggtgcagccctgcctcttctcctgccccctctcatggctgctcccctcacttgaggctccaataatacttgactgtaattccctgagcacgctggctgtttcatggtgccatgtttttttatgggctatttcctctttgcctggctaacttttctgtctcgcttccttaaagacacactcagaggtcatctccttggaagcctttcctggagccattcctgccccgctcccaaggctggtagcagagccgcatagctgcccacctgtgtctcagccattaccagcagtgctcagcagcatatgggagtgtcctgcttggggaccacctgatgacattgttacctgtctcttccccctgcatctgtgtctccagcacccagcccagagcctggcacaaaaggagccgaatgacattgacttaggcacgtggagaatccatggacagccgcctccccagaggtgacagctccttcctacactggtgctctacatccagtgactgaccaacccagggtcataaaagcttggcattgctcaggatgactctgaagggccatcccagctcccgatgtagggtaggctgaggcttgcactgactgcatggaagctcaattcctccttctgcccagtcctgctcccttcccttcccttcccttcccttcccttcccttcccttcccttcccttcccttcccttcccttcccttcctggggtatgagagaaactgcggaggtggaatcaaagcatctgagaatgattagactcagacagggatgtgtcccctcagaacaggtcttccctggaaacagctgttctcctgttcagtatcacctggtccttcctccatgcatagtgtctgacatcatctcattctctctgggtattgaattctcaatgcctcagaggcagaagtgaggtctgtgcatttccactacttatgctccgtgaccgtcatgccccacacgcacactagatcggagctgctttctccttctggcccctccttcccactcctcccctgtcattcatactatccctgctccagggtcttgtgggcctgggtcttcatcctatgatgcttcagtcactgcagttttgagtttcacttccatcatcaggtaaggacccaccaccccagcctatctgtgaaaagggtgttgtggttacaaaacccaggatctggaatcaaacagatggggcttgagaacaggctctgtcatctacatgctgtgtgatcttgtgcaagttgcttaaaatctgagcctcagtttcctcatctgtcaaaagggaatagatactagaaccttttcagaggcggtcgtaagaattaaatgagagagcatctggcaaagcactcaaacttgcattcatagcaacgggcagaaatgtagacatttctggcaacaaacagtatccaacaacaataaacagagcctattgatggaggtgggaaagcagacgtgccttcactcattcattcaacaaacattcattgagcacctactacatgcccttgctgagggtaggaggggatacaacaatgaagaaaaccaggcatgatccctgtgtttagggatgcccagcccgggagcatgacacatccatccagtgatcacacattgaagatgccatcaccaactgcaacggacaccataaaggaaagtgacttgagccatgggtgtgtcatgtgggaggccagggaagccttccctgaggaaatgacattaggcttccattgggagaagttaactgggccaaggaatggagaaaagtgttctgaagaggggaaactggtatgcaaaggctgtgtcgtgggaagaagcgttgtatatttgaggatctggaagttggctggagtggctggaggcagagagggatggggaagatggcaagaaatgaggctagggccaggcatggtagcttatgcctgtaatcccagcactttgagaggctaaggcgggtggatcacttgaggccaggagttcaataccagcctggccaacatagtgaaaccctgtctctaccaaaaatacaaaaattagttggttgcagtgatgcatgcctgtaattccagctactcaggaggctgaggcacaagaatcgcttgaagccaggaggtggaggttgcaatgagccgagatcgtgccactgcactccagccttgggcaacagagtgagactctgttctcctgccaagaaaaaagaaatgaggctggggagatgggtaggacctgaccacccaggatcttggaggccacatgatggcaacaagaaaccattgaagctttgaacagaagtgagggtgatatgattggatctgtgctttgaaaacctaatgaggagaactagtagatagggacccacatggagaggggccaggtggatgcatggaacaagttcagttcttagcgaagtccaggcaagagaccacagtgtctgcactgggctggagataaacatttgggaatcatctgcataaggacagtggttgaagccatggcctgggtgtagttcaagttgcctgtgcagagagtctagaaaaataagagggactcagacagtctcaaactccaagttttacagcccaggggagtcagatgaggtagccaaggaggagaagtgaccagagaactaggggacaaactgggagagtatggtaagatggaagggaacagaagtttctgtggggttaagtattgccaagagatcaggagagatggaggtggaaatgtatcctatggtgttaccaacaaggaggtcattggtgaccttcccgagagccattaggaaatactgcagatctggccaggcgccagtggctcacgcctataatcccagcactttgggaggccgaggtaggcagatcacttgagatcaggggtttgagaccagcatggccaacatggtgaaaccccatctctactgaatacaaaaattatctgggcatggtggtacgcacctgtaaccccagctacttgggaagctgaggcaggagaatcacttgaaccctggaggtggaggctgcagtgagccaagatagtgccactgcactccagcctaggtgacagagcaagactccatctcaaaaaaaaaaaagaaaaaagaaaaatggcagatcttaagctgggtcagcttcctgtctggctaggccgtttgcatgggacaaagtgccccagtggctaatgtccatgtcaccaggataatattacattgtccagagagatctgaaccaaagaagattggcacattagctcagaaaatctcattggaacccttgaagtacatgttgttcttttccagtgaccatatagccctgtcaactttatatatttgttagcttgtacaacatgtaacattagccaattcatcgtctagagtctgaaccataagcaatttgctatcctgtgtgttgccttgatggaagaactcgacaagtggacatacgtggattttgcagatatagtgcagacgatgcctttggcaaatcactccagacacatcccttggggaaggtgctgcaggctctgtcgcccctacagatggaagctgacaaggaaaagacgggtccagattggaatccctgggctacatgtgagaacagactggagggtgccagagcggatgggcagacagagaggagggtctttagttctacagtgttgtacagcgcctcactcagggggtggcacaaaggacaggaggaaagagccccagaagcactaacttcatgcatatttttgaccttctcatctcctgggccagcctccctgggtgtggttttgttcagaactggagaacgcgcctgaattttttaaataattgagacagggtcttgtctgctgcccaggctggagtgcaacggcatgatcatagcttagtgcagcatcaaactgctgggctcaagagatcatcctgcctcagccttccaagtagctgggaccacaggcatgctcaccactgtgcttggcttctcttggaattttgttgttgttgttgtatttcttgagacggagtctcactttgttgtccaggctagagtgcaatggcgtggacatgactcactatagccttgacctcctgggctcaagtgattttcccaactcagcctccctagaagctgggatcacagatgcatgctaccgtgctcggctaattgtcttttcaattttttgtagagatggggtcttgccatgttgcccaggctggtcttgaactcttgggctcaagcgatcctcctgtcctggcctcccaaagtgctgggattacagacatgagccactgtgctcagccccctggaatttttgatcagcctcccactttctttctttctttctttctttattagttttattttattttctttttcttttttttcttttttctttttttttcttttttttttttgtgacggagtctcactctgttgcccaggctggagtgcagtggcataatctcggctcactgcaacctccaccttccaggttcaagcgattctcctgcctcagcctcccgagtagctaggactacaggcatgcaccaccacacccaggtaatttttgtatatttattagagatggggtttcactattttgaccaggctggtcttaaactcctgacctcaggtgatctgcctgccttggcctcccaaagtgctgggtttacagacgtgagccaccatgcccagccctcccactttcatagtaacctgatcaagttctttccatcctcccctgtaaacaacttcctcttgaccatagtcatataattgctacctgtaccaagaaaggagccatgcattttgccactatgatctcattgaatctttataataacccttgtgataatctctagtcaatgttggctgtgtaaacccagcaacaggctcagagggatgtagtagcatgctctaggtcacacagctggcaagtgggtcagcttggatatgaatgcagcattttttttttttttttttggagatggagtcttgctctgtcgccgaggctggagggcaaatggtgcgatcttggctcactgcaaccttcacttcccaggttcaaggggttctcctgtctcagcctccctagtagctgggattacaggtgtgtgccaccatgcccacctaatttttgtattttagtagagatgaggtttcaccatgttgaccaggctggtctcgaactcctgacctcaggtgatctacccgcctcggcctcccaaagtgctgggattataggccccgagcactctttgactttgaagttcacattcccatcaagaacactcaatgaagaccaagcagtcagtccagcaggtggtggggttgctttttccttttgacagtttggaatgatcccttttggtttctgagtttttgggtcactcagtccttttcttcattcaataaaccttcctgaggccaggcctcttgcaggtggtggggctgcaaggtttgcgacctggaagagctcacagtctgctccaggacacagacccatagcaaggtgcaacaatctacaatatgataaatatagatggtggagtgggtgggttctgtgggaaccctctgctttccatgggctggaatgcctgagctggattataataggagaagtaggcactgactgggtagagatagggaggacagacattctaggaagagtaaacagtgtgtgcaaattcctggggcatgatagagcttggtggacttgggagacctggttgtatggtggtgcttgggcgggggcagtctcagctgactgggactagggtgtgaaggaccccagtgaagattgcagactgggctattcatgttcttaagatttactgagcacttcctcatgagccagtctttgtgctaggtatttcccagaaaggatgaccaggttattaaaatacggaaactgaagttcagagtaggactgggttttatgtggcctcccaccatgactctctgcaccttaaaaaaaaaaagtgatgaagaataaaacaaacactgtgtgtctcctatcctggtcaagaaataaaaccaagcatgagcatggtggcttatacctgtaatcccagcactttaggaggccgaagcaggaggatcgtttgggcccaggagtttgagaccagtgtgggcaacatagtgagaccttatctctacaacaaacaaacaaacaaacaaaaattagcccgccatggtggcgtgtgcctgtagtcctagctactcaggatgctgaggtgggagaatcccttgatcctgggaggttgaggctgcagtgagttatcattatgctactgcactccagcctggttgaaagagagaggtgctgtctcaaaaaaaaaaaaagaaaagaagaagaagaaagaaagaaagaaaaccttactaagatgtgtgaatgtgtgaagctccttcctattaaacatctccctctatccagaggtaaaaactttgcagaatggtgtatttatcattcctctgaatgtctttatacttttaccatatctgtgcattcctatggaatatatggtattctgttcggcatgtttaaagaatctatatgaaggctgggcatagcggctcatgccaccagtcacgtagtttgtggaattacaggaatagaacttgaagccagggtaggcacagtggctcacatctgtaatcccaacactttgtttgggaggctggggcgggaggatcgcttgagtccaggagtttgagaccagcctggccaacatagagagacccctctctctacaaataaaaatattaggccaggcgcggtggctcatgcctgtaatcccagcactttaggaggccgaggcaggtggatcacctgaggcggggagttcgagaccagtctgaccaacatggagaaaccctgtctctattaaaaaatacaaaataatacaaaattagctgggcatggtggcgcatgcctgtaatctcagctactcgggagactgagacaggagaatctcttgaacccaggagacagaggttgcggtgaactgagatcgtgccattgcactccagcctgggcaataagagtgaaactccatctcaaaaaaataaaaaacaaacaaacaaacaaaaaactagctgcatgtggtgccactgcacctgtggtcccagctactcagaaggctgtggtggtagtattacctgagcacaggagttcgaggccgcagtgagctatgatagcgccactgcactccatcctgggtgacagagcaagcctctgtctcaaaacaaaacaaaactatatgaatgatattatagaaatttgatgttctgcaacatgttctccctccccttatttgagatttgagattcataatgaatttctaatcatttatttttgctgcagtatagaattttgctgactaccccacaatttgtttatgcattcttcctctgatagggatggaggctgtttcaaattccttactagtattatcattattgcaatgagcaagaggttctctatgtcaagactctgggtcactggggtatgtgcacttcgacatttctagatgctgccaaattgtttcccagagtggctctacccatttccactcctgcctgcagcacaggacagttctccagactccaggtccctactgtcccacttctttgtttttgcaccaatctgacaggcatgaagtggcactttactgggattttgttttatatttctctgattactagtgagactgaccatctttgcatatgtttattggccattcatgtttctttttctgtgaattgcctgttcatatattttgcccaatctcctattgcctctttagcacattggtttgtggaaggcctttgtatattttggatattatattgtaaatatcatcttttgataaacagaagttttgaattttaattaaatgtattgatgtttttcttgatgatttatgcttttgaggtcttctttaagacatccttgactattatgagttttttttgtgtgtgtaagttttcagtacacctggaactgatcttttatgcatggtgtgaggtagggattcagctcatcttttactaatatggacattctattgctctagcaccatttatagaaaagtccacccttctcccactgacctgcagggccatctctgctacatatcaagtttccatacctgtatgggtcaatttttgcagcctctattctagtccactggccaatttatctacccttgggctaataccagatgctgtgattgtacattttggggtccttagcacctcctctctcgaattagaggagtgctagtgacttcctgagagtagaaacttgtgttcacctttgcagctctctcatcacgttttacatgaacatctacataatgcttttgtttacaaaaggatttcttgcatactatctcttggagttctaaaactccctttttgcagaagataaaactgaggcagaaggtaaaactgagaagataaaacagaggtaagatgatttgccaaggtcgcacagccagaaagtgttggattaggggttctataagatttcaaagccaccctgtgcatccatcgcatatgctccgaagacttccactgaccctggtatcggatttcactccttcctgccttcattcaacaagtagctcctgagtgatgaccgtgccagcttctggtgggtgctggggctgagaccccatttctgggaggctcttcccagtgctggagaccggtgggaagggtgagacagtagatggacattttatgggacatcgtctgcggcttggcatcagcatcaagtcgcgccaggtttcagagccaatttaaagagccccatttttggcgtgcagttgggcccaggcgctgtcttcagagaggacgctggcttccccctggaattacaggcgtcctcccgccctcccgcctcgagaggcaggaatgcgaaggatcagctttcagcagagctccggctgccgttcggggagttcaccgtgcaggcccgtccccagcggccgaattaactggttctgtctgtacgactgggagagcagctctcgctaaaaatagcgccctgcccagctcgacctgcgagccgccgttggattctgagccgggacggctcaaggagccgggagccctgcacacccctcaccccgggcctggcccgggaccgaccacggaggcggaggccgcgggcaccgcgctggccccacaggtgccgcggagggtggcaggcccgctggccgaggcactgccgaggccgtccgagatgggagctggcggtgcctccttccgcgccctcgcctgggcctccctgcccctgctggggcctccagcctgcgcgctctgcgaggacacgctctgctgcggaggtaaggccgtgcgcctccaggcgcgccctcgccctacgcgggcacttgcccggggcctgtttctcctccttggccccagatccgcgactggcggcaaggtgaggacgaacacaggcatccgcgtagggctgggaaaaggaggcaggagctctcagcaaacccacctttagctggaaaacgtcgctgtcccgccaccacggtccgaaaagcgttcgccccgctctggcctcagtgtgcctatctgggaaatgggtcaataagatagtcacgctttaatattcagtcacgcttgctgaagcgggtcgcagacgttcgcgggacgttccctccagccagctggagtcctcgggagtttctgttggtgggagtgctggggtgccttccctgtgacaccccgcactgtccccttcccaagctctagttccccccattagtccccggctcctgaggttggagatccacgcagggcgcacataaaagtttaaggggtcagcggatgcgggaagattctagcgggaaggggagctgtagggtggaagagggataagtaaagcaaagtcgcggcccactcctcggtcccgtaccctcatagcgccgaaacggaagcagaggttatctctggactcctggaggcctggggactccgggaggggagggggcgtgtggtcccgccggcatctcgggccggcaccaggctggggagcgtgtgctcggagcggagggcctcggctctgcccagtccggcctgggcggggcggtggtggggaggtcgattgaccaaacaggtgcgcccccgcccctctgctccccgcccgcgctgggtcccgggcctggcgggcggagctgtgggcggctgggcctgcgattggcagggctgggcaggccgggtggccgcgggagcccgggagccgtagagcggcggcgccgggggaggcgcggagccggccgtagcgcgctcctgcctggccagccgcctactccgcccgccccgctccactcggcccagctggcgcgaaggaaactttcctgcagccgcccggcgacaccgcgactccgccgcttcgcaaccctggccctgggccgctcaggctccggagcctttgggatggcagcgcccagcggcccggcccgcgcgtagaggtaaaagctgggggccgcggctcaggtggaggggggctcggtggtttgccgggatccgagcggcatcccgggttcgagaggatccgggggctccgatgcgaggtgttggggtaggggactgaggaatgggcggcgactttgctttatttaccccgcttttcccctacagtcccctctcccgcaaggaaatctgcgcgatgcattgagcctttaaactttcctgtgcgccctgcccagatctcgaccgccgggacccagggctggcgctgggttcttgggagagtacaatacaggggatcgcgaggaaggcgcccccagctggggcccgcgggcggcgggagttgggggtggggggtgccagcctaccgatccccaaggcttccagcggtctcccaaacttcagaccttcctcagctcaccctgggaattggtgatagggcagccaaccaaacctctttatccagagccaggcaccccctggggcacccaagttttgggtgtttttgttcaatcctggccaatcctaaattatcagggaggcgattggcagggctgggtcgttgaagtgaggtctcttttccgtttcctgggctgctctggaccccaccttccgtgaaaacaccttgggctaagcagagtgggaacagggaccaacgccacctgcttccagtgctcagcctggtgggaatgactgcagggtgttctggtctcaggatggtccactcttgagctatctggtgtgagccatatggaaactcctctccctctggccccttctgctattaaggagggaaattttaccttaattttgattgtgagtgggtgagtaggtagcttgtcaccaataaggaccaatctttaacattagtcctccttaatgttaactcctttccgtgttttactgacccaggacagaatacctaagagtaaaaaaatggaaccaaacacctagctctggagcccagggaatctgggttccaacatcagcccctgctgctcactagctgtgtatctgtgggcaggtttcctaacctctcagagctcaagggtcccgtccaagggggatatagggaggttttttcgaggtgaggcgtagaaggcgcctggctcgtaggacagccatcttaagcagccgatctataccctggagcctgtgccctcttgctgtctgagagagccagcatccttgtgcctcagtttcctctcccccagaaagttggtaaggaccagcccctcttaatcagcccttttgagaaaagtgcacagatgcacacacccacaatttcagtgggtttgtaggctcaggtttaaacagcctcacacattcttatccctgcaatgaactattcagaatgtacaaggcttctgtctatcttgatctttccccctttccccaccccttttagacacctggaggtaactattgtaaatggcaaggaagagcaaatgaactaaataaccagcatgatggggaaaagggctgacctgcagaacctggcccaaagtcaccttcaagatcacctggccctcctatccccgcattcttccttccctggtgctgtgtccccacttggtgaacatctagtcttttttgctaggatcctctagtgacggtgagttcactagacagttggtttcatgattgggaaactcttggtttcatgattgagcaacattcttcctgtttgggacagaaatctttgtctctatgacttctatccactggttctggaacaacccttggggcatttcttactgtctcaattattcactgtggtcccctggtgcctggcattctgttccgtcccttcagcattcaacacacaggcactgaggttggtaatgatcatagcactatttattgagtgtttattatatgccagaccctgccctgaggactttacacatattattttcttgcacccataaaacaaacccatgaggttgattattttcttatccttattttgcatataagaaacaggtttagagaggttaagggacttacccaagatcctacaactggtaaggggctggctgggctgtgcaccaaactcagcatctgtatctgtctttagagcacatgcttcgcttttgatccttgcttgcatacatgcctttgtgtgtgtgtgtgtgtgtgcgcgtgcgtgtgtgctcctgggactggtgtgtgccagcaatgcttttatcacaagcacctagagcacctgttaaaatgcagatccctcatctctactccaggcctgggatctccactttaaaccacccgccactcccactcccccccaacccaggccattttcctgcaggtcacagttcgaggaccatagcactaaggtactcttaggaagagaacgtggaatatagttttcaacagatctgaatttagtcttggcttcactctctggagctggttactcttcctttctagggctttctcccaacttaagatgggtatgctgttccacccactggtgggtggaatggagcaggcccttggctgacgggagccctggtgaagtttctcctgccacaagtggatgtacttgcgggcagacctgtggcacccccaagatcactggcctctgctttctaggattggtgtgccttagacgaggccctcgtgctcaggttattatattttggagacagggtctcactctgtcatccaggctggagtgtagtggtactatcatagctcactaaggcctcaaactcctgtgctccagtgatcctcccacctcagcctctttagtaactgcgactacaggcacatgccaccatgctcagccaatttttaaatttgttttgttttgttttgttttttgagatggagtctccctctgtcacccaggctggagtgcagtggcgtgatctcggctcactgcaagctccacctcctgggttcacgccattctcctgcctcagcctcccaagtagctgggactacaggcgcccgccaccacgcccggctaattttttgtatttttagtggagacagggtttcactgtgttagccaggatggccttgatctcctgacctcgtgatccgcccacctcggcctcccaaagtactgggattacaggcgtgagccaccgcgcctggccaattttttaatttttagtagagatgaagtcttgctatgttgctcaggatggtcttgatctcctaagttcctgatgctcctgcctcagcctcccaaagtgctgggattgtaggcatgagccactgtacccagcctctgctcagttttttcacccagagtggtgaggaccctggaggggttggcagaaacctctccctcccctcaacaccttcttcctccatcctcctactgtggcctctggccctcccagccagaaggtgctgggcctgcatctcgcggggagaggagcggggtggttctgttgtgcgtctatctatgttttcaatctccatcccttcccttggaagaccgctctgtgggccattgggcagctttggggaaatgtctggcccgaggctgcctggcctgggctgactcactaggagagatacagggtggaggaatcgcctgcatagaccccagctgtatcacaattctggcctaccagctgtgctgcagacagggtgcttgttctgccttggacctatttgatcctgctgaaagcacaaattattaaacacccattttatgaaagaggtcactggagtccaggaaactgcagtgacgtgtccaaagccctaatgtgtgtatgtgggcaggggagggagcggtgataagagtcaggacctaaatccaggtgccttgacaataaggcactctggccttttttgcagtcttgttcatgcctcactatttttctgccctatctggttgtggctttggtgccagagccctcacctggaagcttgaagacctgggccacgatcaggctgtgtgatcttgggcagggctggtcatctcttaaaacgttaggtttcttttctgtaaaggggctgaaggtggggctttttgtccagatctctgaggttctttcccaccttgacatttacaagttgggctctgtctgcatttcctgtctgggtttctagggagaggtattcatgatgggctcagggcatgggtgaggggttgagttgggctggagggcagagtgctccatgggaattactatgaaaggggccagaaaggctcttatgggaatggtggccagtggggccaggacacctgggggcagtccagagggggacaggtagtggaggaagcccagggaagggggaggtcacttaccttagaattacacagtgttttgcaccctgatccttgcaagaaggtgatggtgggaatgactgggggtcaagggcaggagccaagggggagcgtgggggcactagggccaaccccactgcaggccctctcagccctgggtagtcttgaccaggagacaagggggacatgtaagagccttgtctcccttccaagccatcacatgtctctcctctgggcttcctcagcctttcctgaatctgacctgaacggttctaacctctccctggggcgagcagctggctgagggggtccagctgcctgtttcccatcccaggtgggcctccagcaacccagcttcctacagtagcccttagtaaccacagcctctgctggccacttactgtcatgtgagtgacttcctgttaaccacgagatcaaagccaagctccctggcctggcaaacacggccccatgtctggctccagttttcctccctgcctcttctttctctgctcttcaggttttatgttgcctggacttggcctgtgacttccagaatgcccttttctctctgccactgcttactgcccaaattcttcctgcccctctgggtgtagcaccaatttcacctccatttgttctcattgcccccctaagggtgagccgttcctccgggcttgtagctctttcttactaactgccctgctttgcctgtcgttgtccgctgcctgtcccccgtgatgggctctgggctttagaaattgctctagtgaatgccctagtgaatgcttggaaagctttgtagagttggactagctttgaatcaggcatgatttttccactcctgctccaactgccgtgcctgcacccccctcctcaacagagtcaagtggagagcctcgcagtctgctctgggcagggctggctctagcaagggacagaagagagatgcctttggtttgcagagaacttctctgcctcatttggatttttgttttgttttgttttgtttttaattgagacacggtctccttctgtcgcccaggctggagtgcagtggcgcgatcttgactcactgcaacctccgccttccaggctcaaatgatcctcccacctcagcctcccaagtagttgggactacaggtgctcgccaccatgcccagctaatttttgtatttttttgtagagacagggtttccccatgtttcccaagctggtctcgaactcctgagctcaagtgatccacccgcctcaggctcccaaagtgttgattacaggcatgagccaccatgcccggtcccatcatttggattgttcttgatctgcttcttaaaaaaaactttattctggctgtgtggcatcaagggggaccggcctaaaagcaggttagggaaagccacctgtcagtgtcagtccccacctgcaggctgaatttcaggtctcaaatgagaatagccaaattcacctgcttctttagaattattgttggttttttttgagacagggtctcactctgtcactcatgctggagtgcagtggcatgatcttggctgactgcaacctccacctcctgggctcaagtgatcctcccaccttagcctccctagagtatctgggactacaggcgcttgccgtcatgcctggctaatttaaaaatttttcttcttgtagagatgaggtctcactatattgcgcaggctggtcttgaactcctaggctcaagcaatcctcccaccttggcctcccaaagtgctggggttgtatgcatgagccaccgcacctggcttctttagcattttcttaagagtgtttaaaaagtacttgtgaagggcctgtgggggttattgggattgtgtcgggggcccacagacatggtccccacagacatgaacatcgaggagtcacataactgttctggggttgcacagttatttgtggccagaaagtccacagaaacatctgtccctgagttcagagagggctgttgagtctcagaggccaaaagggaaagaaaaaaatgaggaccaaaaatatatactaaggttgggtgtgctggctcacgcctgtgatcccagcagtttgggaagccaaggcgggggatcacctgaggtcaggagttcaagaccagcctggtcaacatggtgaaaccccgtctgtaataaaaatacaaaaagaaaaaaaaataaagaaagaaattagccaggtgtggtggtgcatgcctgtaatcccagctactcaggaggctgaggcaggagaattgcttgaacccaagaggtggaggttgcagtgacctgagatggcaccactgcactccagcctgggtgacagagtgagattctgtctcaataataataataataataatgtatgctacagcacaaagcatttatatcacactttctggtgtgcaaggtgctttctgcagagggtcccctcccagtccccctgtgactttctgctgaggaaaccaaggctctgagaaacacagctcagctcccatggctggaaggatgcagctcaggacttccctgactcccctcactccaggtccagtgctcacgggcagggctcagagtggctgttggaaggaggctctccttattgacggctcccaattcagagtgaggatttttttttctttgacattcttgtgttgggatcattttccctgttaccatcattggatgagtgtgaactcaggcagtggggggtgagggaggtgggaccagggagaatggcagcgttctttgttttttgtttttttttttttcttgagatggagtctcgctctgttgcccaggctggagtgcagtagcgtgatctcagctcactgcaacctctgcctcctgggttcatgcagttctcctgtctcagcctcccgagtagttgggactacaggtgcatgccaccatgcctggctaattttcatatttttagtagagacagggtttcaccatattggtcaggctggtctcaaactcctgaccttaagtgatccacccacctgggcctcccaaagtgctgggattataggcatgagccaccatgcctggccggcagtgttcttatgaacgtagagaacacctgcgcagatgggtcaggtgaccaggtcagagatctctgtcctgaagtaggaagccccctgtccttgtaggtgacagtggctgatacctagtaaagactcatcttggagtgaggtctgatggatgctagggtactggagggagaggagagagattgatgatggtctggttttatgttcacatactcctatcattcctttgggtttttcttatttttttgagatggtgtcttgctctgttacccaggctggagtgcagtgccacaatcatggctcactgtagcttgaactcctgggctcaagcaatcctcccatctgagcctccaaagtagctgggactgcaggcaagcaccaccatgcccagctaatttttttattttttgtagagatggggtcttgctgtgttgtccaggctggcgaactcctggcctcaagcaatcctcccacttaagcaatcttcccactttggcctcccaaagtgctgagattacagacatgagtcaccaccccatcgttcctttgttgcttcctgtcctacttactattgccttatcagtttatctgtctctgcccctgcccctgtccttagacagaggcatcctagcacaggtgcctcatggttttcccctctgggtgaccctggagcaagaccaacctcttaagaggggaggggagggaatgtgaataagtaaataaataagcagatgaatgagggactcttctcagcatctttggtgaccctgtctgactatcactggctgtagaatgtgtgacaactgagtctaccaggcaacggctgtttgccgggagcagcaggacccagccagaagacataatggaagcaggccctggccagagcagggacctcagagcctttcccggcagagggaacgcaatcaaagctggcgctgcttccgggaggagagaattcccaaaaggctctgtcagcccctctgatagggatctgcagggtgtgtgagagatttgtttttcagccaggatgtggggagttaaaaatagacaccctaatcccttgagttcgtgtcacacttgacgctgtgcagagccctatggctccattatctcacttgagtggctcggcagcctttgacgtggggagaggttgcactgcccgctttataaatgagcgtgtggaggtgcgtgcccaatttcttacttgagactgtaccccaaattcagtggcagaacctgtctgatcctcagcccctgaggtctgtgttttatattcttaggagaagccagatgagagtcaacaggctccaggagggaagcgggttggtggaaacaataggggtagatttttaagcaaagcagcaaggatggcagggagactgagaatgaattgaggtcccagggagcaaaggctcatgatgggcttggggagcagccgaggactgtaactggttggagcaggagttgggggggtaaggtagtgatgggaataaagcagaaaagtaccatcaggaccccaaatcgaggacctagaatgctatgataaggatagtgaacataaagctgtaggcaatagggagccattgaggattacagagcacagtagcttcctgctgtaacaaccatgcattgcaatgatgtgctaactggctttgctgtaggtattactttatggtgtttgacagaatatatattttttaaaccctcagaagacacctgtccatcctgacctctccttatggaaccttgcatcgtgctagggggagcaccccgttttctgctgcctcttggtttggggaggagccccctctggggcaaagtctgtaactaggtttctcggctttttctagtttttgtttgtttgtttgtttgtttgtttgtttttgagacagcgtctcgctctgtcgcccaggctagagtgcagtggcgcaatctcggctcactgcaacctctgcatcccaggttcaagcgattctcctgcctcagcctccctggtagctgggactacaggtgtgtgccatcacggccagctatttttttgtgtgtttttagtagagacggggttttgccatgttggccgggctggtcttgaactcccgacctcaggtgctccgtccgcctcgaactcccaaagtgctgtgattacaggtgtgaggcactgcgcccagccttctagtttttaatctaggtgctcctggttgtccatctgtctgtcttccccatggtgggaggaattaagtgacagggaggaggtagtggctgaagttctagcccgacctgactcattgaaacttttacaggctgtctagtgcatctgacaccctgccactgacaagctcccagaccaccaggatcagttttctccacttctcacttccatccctcccgctttgggacccccattcggctcccaacttctccaggcatcctgcactgattgttccagcaacactgaccttttctgtacattttagtgcccatggccctctaacttgtatgtttattaactctttgctccttccctagctaggccaaggcccctggtgggcaggacaggagctaagcaagatgtaagctggacagaccattggaaatcttctggtgcgatctatccattttagaattagggggatagaggcctgggtttgcctaaaacttcatgacaagttcctggcagagctgggattcaaacctggatctccagggctatcttggtccttggctgcaacatcacccacttctcagagccaccctgcttctcagctccaagagccaagaattcccagctctgcaagaatcccagttttgcagccttggctcctcctggggctgggagccagcaacgccaagcctgcaggttcccagagagggctcctggcgtcggtgtggcttagtcacagggatgagatcactactcacctctggataggggaggatgccaaggtttgggaactttcactctgagctacttgattttgtgtatgtgtgtgtgtgtgtgtgtgtgtataagaaaaacaaaccttttggttgggactttgtacttggctcatgaactgtgggcttggggaagctgctgagccatgataagcacttgtactgtgccatctcacagcttcccaggatagtggctctgtgttaggaaggagcttggaccagagccagaacctggtgttagcatttgctctgcctcacattggctgtgtgaccctgagtacggtgcatggcctctctgggctgtaatgataatacctagcagctcacactttctgagtacttcccatggaccagccactcggctcatcagcccatttagttctcacaatagacctgtgagatcctgttttcacctctgttttgcagatgaggaaactgagtcccagagaggaggagtgacttgcctaaggtcacccagctgggaagggcagagccagggttggaatgcaggtcttcccaactccaaagcctctcgtgtcaggcactctgctgccctgccctctagctgcagggctacctcctaagggattgtggaagtgtaagtatggagaaaccaggtgtaattcagcacgtgaggggtgggaaggtgatggatgaagggtctttttctacgctgatatcgttctccatctccccactgtccttgagtagtgctgtccttgaatagtcagaggggggcgcagaggagagcaggtacagcggtatgcaggctccatgagaggaagggcgtatttgaagatggtttcacggaccgccagtcctgggcccatctctttccaccccctgtaggtcactggctttgtgaatgttgattgtaattcctttcccatcctcccctagaaggtatcttcaaggcaggggctcgctaagggatttccttttgagtggagtgaccataagatttgtttgtttgtttgtttgtttttgagacagagtctcactccatcacccatgctggagtgagtggtgcaatcttggctcactgcaacctctgcttcctgggttcaagcaattctcctgcctgagccccctgagtagctgggattacaggtgcctgccaccacgcccggctaattgtaatttttagtagaaactagattttgccatgttggccaggctggtctcgaactcctgacttcaagtgatctggctgcctcagcctcccaaagtgttgggattacaggcatgagctgccatgcctggccttgaccataggttttgattcagatttggaacagaaatctgttgatggccactgaatcctgggcttggagtaggagctaggggaagcaccaagtaactcgttcccaccccaaggaagctgagtacagcagacaggctaagggtgtgtgtgtggtctaaggtccatcagacagacctggctttgggttctggctgctctacctaccagctgtttgaccttggacaaagttatcttatttctctgatcctcagtattcttaactataaattgcggataataatacctattttttagggctgttattatattattattattttttaattttttgagacagggtctcactttgttgcccaggctggagtgcagtggtgtgatttcggctcactgcaacctctgcctcctgggttcaagtgattctcctgcctcaacctcctgagtagctaggattataggtgtgtgccaccacagtcagctaatttttgtatttttagtagagacagggtttcaccatgtttgccagggtggtctcaaactcctggcctcaagtgatccacctgcctcggcctcccaaagtgctgggattacaggcatgagccactgtgcccagcctagattaaaattatacgtgcaaagaaagaacacagtacagtgtctgcacatcataaacatttaataaatgctgcagttttgttattacttattatttgcattattattactgatggtcttcttaatgcactttatagcagtcttgggatcctctggccatacccctttccagaacttactgcctttggtgaaggtagttctgggtaggggaagatctgaattaaagagtcaatctaccagcctgggaaacatagcaaaaccctgtctctacaaaaaaaaaaaaattacctggggctggtggtgtgtgcctgtagtcccagctactctggaggctgaggtgggaggatcgcttaagtccgggaggaggttgaggctgcagcgagccggagccgtgatcgtaccactgcactcccactttggtagcagagtgagaccctgcctcaaaaaaaaattattatttttaatgtgaatgatttttctcttggagatacacagggtctcaaattggccaaaaaaggtgtctgaacatgggtttttaagggagctgctttgatgaatagagaaaggggataatagagaaaaagatttctttaaggtgcttgaaatttatcttttgcatggtatccacagtccccgtgagcttgtttctgctgtgtaagtcaccggggtgagtgtctgttgaagcaggcatgcggggtaaaggtggggcagggcggaactccaacaagtctcagctgctgctcctccctctctcccttccgagaaccgccagggtcctccttagagagagagcctgctcagcctttggggaagccacaaattggtgaagttgctgtagacagcagtgtgtgtgtgtttgtgtgttgtgtgtacgtgttggtggggggaggtaagaggtcaagtgggtttcccagaggaagaaaggctagagccaggcccaggaggacaactgctcaggtttctgcaaacaggattgcaaaatcacttttcccgagcttacccagttctccatcggagtcttgcagccaggtcagctgggagcccccaagcttggcagttaggacacttggggaggtgtggggaggggggatgtcaaatcctgcctcagtttccccatttgtcctggctattcctagagccccatttatctaggctatgctttcggacaggaaacagagggatgtggaaggagaagatgcaggtttgggataagagttgagtctgtcacttcccactgtgtgccctcaggcaggtccttctgcagctgcctgggctcctcagtgttttgaggcttcggtgaggtaatgtgtgtaaagtgcttagcacagagctggcatgaagtagtgtctgtaattataaaccaccttggccactgttgtttttagcttgggacccaccttaccccgacctgactgcccttgcctcttgccttccctggagttcctgtttgttgttgacatcctcctcaccaactagtgcagggatttttaaagtatttatatccttgctggaatttctctttgcattgtttagttaattaccaaattgaattgcggcaaataatttcacttcctttccagtgctagggcaggaagtggcccggtgccttttttttactgtgattgagatgattattgagatatttgatgatgatgatgtctccttcccctgagaggttcgcttcctcttagatcagctccactggccccataaatcaaggcagcagccacgtgcttggaacataaatcttgtcgaggatgttgatgtgtttggccacatgtggtttttggtgtttgggcaacttctcgcaaactcgcggagggatagttgaaaaggctccctttaaatacagaacaaatgacctgtgcacttattggagaagtgctgggatagttgaaaagactccttttaaatattcagaacaaatgacctatgcacttgttggagaaattctgtccaatggcatacaaattaaaaatcaaggcacagggagaagtcttcagatggcaagaaatcagtggctcttctccgcagcttgatagtgttgatggtgttggcttctgccctgtccctcatggctctagggtggagaagcagattggataaagacatggggttgaaactgatgtgctggggggcttcagatccctgccctgccacttagtagctgcaggaattaactgcggccacttaattttcctgggttctaaaacaaaggatacaagataaccggcttcataggtctatgttgtaatagttttgcttcacacaatgcctggcacatggtaagcactggtaagtaagccattacttttaactcagggatcctcatcgtgttctttacccaaagacccttcccatcctacctttctagccttgacctccttcttgcaagatgataaccaggacctaatgtgtccaggactctcccacctttgcacttctttcttttctttttttttttttttttttttgagagggagtctcgctctgttgccgaggctggagtgcaatggcatggtttcggctcactgcaacctctgcctcctaggttcaagtgattctcctgcctcagcctcccaagtagctgggattacaggcatgtgccaccatgcctggctaatttttgtattttcagtagagacggggtttcactatgttggccatgctggtctcaaactcctgatctcatgatccacctgcctcagcctcccaaagtgctgggattacaggcgtgagccactgcgcccggccccacctctgcaattctgttgtgcggtttctactatttggaacatcccctatttggtctctgcccatagaatcctttctttttctttctttctttctttcttttttttttttttgagatggagtcttgctctattgtccaggctggagtgcagtgttgcgatcttggctcacagcaacctctgcctcccaggttcaagcgattctcctgcctcagccttctgagtagctgggactataggggtgcaccaccgcgttcggctactttttgtatttttagtagagacagggtttcgtcctgttggccaggctggtcttgaactcctgacctcaggtgatccacgagcctcggcctcccaaagtgctggtattacaggtgtgagccaccgtgctgggcctcttttcctttcagaagttatctcaagcactgtgccctccatgaaatttcctatggcccctcaaccttaactgccttagtgtatccttgttacgccttatgtctgcaatagttgtcggcccaagtatgttccatggaatggtaacctggtaagatgctttgtagaaaagaaggttaagaaaaggctgctgaatactttatgtacctgttttgtatagtaccaatccatatgaacaattttaaaggttctgagaaatcctgcagtaaagaaacctgctgagatttgtttactccagaactttccaaacctctgactgtagaacactttcttcttggaatgcctattgataagctttgcgacactcctggagaggtggcgttgtagacatctatataacagtttgatgctatctcctcttataatgaaggaaaccaaagcccagagaactcagtgactagcctcaggtaaatcccagtgtctaccactccatcacctcttgggtcaattggcaggtcctttataatgagtgtccaaggctgggtggcaaggaagggctggacatggtagccaaggacctgctttcaaataactttctttctttttttttttttttgagacagtctcactttgttgcccaggccagagtgcagtggcacaatctcagctcactgcaaccttggcctccctggttcaagcgattctcctgcctcagcctcccgagtagctgggattacaggtgcgcaccaccatgcccggctaattttatatttttagtagagacagggcctcaccatattgaccaggctggtctcgaactcctggtctcaagtgatccacctcccttggcctcccaaagtgctgggattacaggtgtgagccactgtgcccggcctcaaagatcttttggccttgtcgaggtggcgagatggacatatggaatagagacagattaactgctaatcttgtgtccctgggcccatgtgtaacaggagccttgggaccctgttgtgtccctgcccaagaagggacatgagagtcaaatgtcctttgagaacccagccctgtccctgggcctgggaccccaaaattcgaccccaccttcctcccaccctgatccctggggattcctgtggccctatgtggttgcctcctgcaggatgcaggcgagggaggggcgggaaggctgcagggaagagaagagccttctgtttattgaggcacagccttctcctgcctttctgggggaaaatgctctcttttagagtcctcttttttatctgaaattctctggggagcaattacctgacagtgggaattatctgctgtctttattctagtgcctgtctgcctgagttccttcttggagtaattgattttggtaattcagagcttctgaacgtttcttaggggaaggtgtgggtgcagaggcagggggatacccacataggcgtttttaaaggcgttggcggctagcggctctgctggtggtagttggtgacagggatggaacagtgactaaaaagaatgtattttttagctttgaatttttccccacttatacggaaggtgtgtgggttgcatgggagcgctcctgactgtggaactggggcgggtttgctgaagggaagtaaggagttgaaaggcaaattgtcaggtctgatgggcttgatcactcttcgccacaggcaggtcagtcctgagtaccggccctggcccgaccctggccctcaccatcaacctttggtctgccagggagcctgggaggtggcagaaactccttggagagcctttaaagagagcagcggctcccagttggcttgacctttctgctgggcagaccgaggtactggctccagaccctgctgccccaggcactgctgtcccctgggagaagagggctggccagggcacctggcttaatagggggacagagaaggtcatgaagggtggacctcagggtgaggggcctgggtgactggagaggtttatctgttccgtgaataaaaagggagtagggtggccaggcacgctggctcatgcctgtaatcccagcactctgggaggccgaggtgagcagatcacctgaggtcaggaggtcgagaccagcctggtgaaaccctatctctactaaaagtacaaaaattagccaggcatggtggcacgcgcctgtaatcccagctactcaggaagctgaggtgggagaatgcttgaacccaggaggtggaggttgcagtgagccgagattgggccactgcactccagcctgagcaacagagcaagactctgtctcaaaaacaaaacaaaacaaaagggtgaggggagtagcgagtaaatttgctcctagaaatgctcccctagctaattccccaatttcaaatgagtgaatactctggatatgggaggaagagcttggactagaagcttcctcaggctctctcatctcaagcgttctgtgggagggacagcccaatacagcggtttccgtggagtctctcttctctgcacctcacccaagggaaaggaacctgtggggcactggtttgggtccagccccagaggcagcctgtcctttgtcatagtgaccaccctccccgctgaggtctggacactgcagctccattccatggccttcggcctggtgttacttggcattttcattcctattttacagatgaggaaatcgaggcccagggtgattggttcacaccatgagttaacagtggggcaaggcctcatacccagtctcctgatagctggtccaggattcctgtgagcctgaatggggggtcaggagctcatcagatgcccagtggaagagcggggtgcgtactcacgtgggaggggagccggtttctctggttccattgtagctcttagctggattttcaactccatggctggttacttgagtctatgtttaatcacctgctagactgagaagcccctaaaggacagggaccttttgtcacattgggatcaccttttgtggccagctcagtgcttgcatgaggtcagccagggcgctttaggtacaagacagaaggcccccctcaagctggccagagtgaaagggattttatgggctcacctacctaaaaacccaaggaggcccaaatggattacgatgggattatctgtctgtctgtctctctcttcccatttccccccagttctgggttcagtttctccactgagctgggaatggggaaaggggagtccccaagggaaatgagggtgctggccccagaagaaggagggagcagacacaggcaaaaacaacaaaagcctcataaacatacaatgtgcatgtcatgaatggtaaattcaatggatttttttttttttgaggcagagtctcactctgttgtccaggctggagtgcagtggcacaacctcggctgactgcaacctcagcctcccaggtttaagcggttctcctgcctcagcctcctgagtagctgggactacaggcgcccaccacaatgcctagctaatttttgtatttttggtagagagagggtttcgccatgttggccaggctagtctcgaactcctgacctcaggtgagcctcccaaagtgctaggattacaggcatgagtcattgtgtccggccaaattcaatggatttttgtagaaacattttttttttctcccaaaaggaattcacgctgtaggcgtgacatccaggtgcacatcagctcctataactaaacagagcaagccctgtgcattgagaaagattctgaaaccacctcttggctcagcagaaaagagcatcataatcggtttaattatttgtgcctttgccttggtggtgggggtggcggggcaggggctgtgtgtacggcatccctaatctggtcccaattttggtgttgtagaagtacttttaagagttgaaaacaattggattgaacctaaatgatgttgcaagatttccccaaagcttaaagagccaattatgtggttgggagccctttctgaccggctgtgattccatcctaaggactgacagataaattattatgtggaggccgtgatgaagggtgattgttggaaggtgtggctcttggcactctgatggctccagggagagcttcgtgtcctttgtattgttttgtttttgttttgagacaagatctcactctgttgcccaggctggaatgcagtggcgtgatctcagctcactgcaacctctgtctcccaggttcaagcaattctcatgcctcagcctcctgagtagctgggactgcaggtacgcgccaccacatcccgctaatttttgtaatttttgtggagatggggttttaccatgttgcccaggctggtcttgaactcctggcctcaagtgatcctcccatctctgcctcccaaagtgctaggattacaggcgtgagccactgagcctggccttcatatcctttaactgtgacaagagtgagctgcatggcccctgcctgcgctaacggtgtcaacacatatttattcagtgcctaccatgtatcaggcacagttttggggcagattgagataaatttatcccggattatatgtcacacttctgaaagaggagatgttggaaaaggaggtagctcttaagattttttcctagttgggacttggtaagaattgcaaatgtccttacacttgggtggagtatgttgtgatcccagtaatgatttccgggagcgcttgtaaaccacctctggtgtctgaaattccaccattagtgattcattcctttggggtaagcattgccgtttctattaatagcttaggtattaggtactaatgggatactaaatagggatctcattcatcgctaaggcctccttaggtaggaagttattctttgttttttctcccatgacaaggccctaagaagagaacccctatttgggtggagttaaactgggatacaacattgggttggtggtggaagccagagtatgtgcattataagacgtggtgcctgccccacccagagtgctaaacttagcaacagtcaaaaattgtcatcatcaaatcacttttagtggtcattgttctccaagtttggatcctgaaggcagaacaagaactaaaggtccttcccggctctgaccccctgctgcagccttccggatccagccgctcaaatgggcggctccgactcctgctgcctgggccagctgctggaggaagttgctggagccctggccaggcacccctgccctcccacccttcccagctggaggtgtggctgtttgcttccacctgtttactttctggcttctagcagctccttccacactgaaaatgccagccactgaccggtccacaaacgccgaccatccccctgctccacttgcagtggttaaaggtgtgtgtgagctctggagtctgaatgggtttagaatgaggcttgacctgctgagtaactgagctgctctttgctgacattcccatctgtaaaatgggataacagtgctaaccccagtaggttcttggaagtatcagtgaggtagctaatacatatcaggtccctggttaaaggcctggcttataaaaggagctcaatatatgtaaactttgatattatgttattgcttggggccttggccagccaccctgggggggtcctgcccctccagctgccctctcttgccttcccagacactgtgctcttccggtggctcagatgtttctctattgagacttctctgttgacaccgcttgaccctctgaggtcctaacccgggtaccctcctcacctaccagctctcacctgggagccccacccatgcccagggcattaacaacccctgaacctgggctactcccaacacagactgtaaacctcccctgagctcagatggagagaagtgcttttcactggctgctctaaaagcacatcaaccaatccaacatgaaaggcccttcctttctcctaacaaccacttcctctctcgcattcacctgctcccccaggtcccaactttcctctttgaggggaagaccgcactggccagcccctgggacagggaaccacacccaggtgtttccttccttcccttccctttttcctacctgcaagtctggtggttccccttgggcaccatctcctgcaccccatccctgccctcactgcccattaggggacagcccagccacagccccttctggtgcagcttcctgttttctccatgctgcctccagggggagtccctggaccttggtctgaggggtccctcccttgctcaaggtataatcaagtccctgcttgagggactccctattttccctgagatataatccagacttctcagctcggttttcagggcccttcttccaaattccagtaggatcctccttgccaacagttccttcctatgtgctcaggagctcagctgactgaacaacccactccatggcctctacctgttagactgccttgcctgtgtttctcaaagttcccctgcctggtgtgccttcccctcagcccggtgcctgcctgtggatctgatcacattcacaaagcctgcaagggatgtaagtcctcgtgcagtccagtcccctgtctcccatcagaatatcatggctgtttgtatttctttttttccttttttttttttttttttgagaccagtctcattccgttacccaggctggagtgcaatgacacaatcttggctcactgcaacctccacctcccaggttcaagcatttttcaagcaattctcctgcctccgcctcccaagtaggtgggattataagagcatgccaccacacctggctaattttttttttttcgtatttttagtagacatggggtttcaccatattggccaggctggtctcgaactcctgacctcaagtgatctgcctgccttggcctcccaaagtgttgggattacagatgtgagccaccatgcctgaccctgtttgtgtttctttttcttttttctttcttttttttttttttttttttttgagatggagtctcgctctgtcgcccaggctggagtgcagtggcgcgatctcagctcactgcaacctctgcctcctgggctcaagcgattctcctgcctcagcctcctgagtagctgggactacaggcgtgtgccaccacgctcggctaattttttgtatttttagcagagatggagtttcaccgtgttggccacgatggtctcgatttcctgaccttgtgatctgcctgcctcggcctgccaaagctttgggattacaggcgtgagccaccgcacccggccccgtttgtgtttcttaccctccccttggctccttccatagaagcaatactttttgcagtctgggaatctctggggtctacaagagggggatcttgccttctaggaaaactgcctctcaggggcaagatggctgcctccagaagtgtgtgctttgaggaggccaggatggggacctccaatacctgacacagggcagaattctattccttgtgactcactgtctcgaaggttacgtgggttttgtcagatacgctgggctccatggccgggagccctccactgccctcgtgtcggggctctgctttcctgtctctctctcgggaggtaagatttccacttctcagggctggggctgccgggtggattgagcaatggtgtgggtgaaagcaaaacagaagtacacaaactaataattaacagatgtcaattgttaatagctgaaaaataccaccaccaccccaccccctgcccccaggagggaggagagcaaatggtcacttgatcccttggaggagattatttcacagccagcttggggcaggtttggccaagacagtgacaagtactgtggggtatatgggcaagggggatgggaatagtgccattgccagggccactgggctttgacttactttgattcccttgtttaatgctcacagccttaagagtcaagggcagaggcattcctgagaatgagcatgtgggtgcctgggggtgtgcacgtggggcaccctgggtcctatctgccgagtctgagccttgcgccatctctcttaagcaagtgagatgcttacttaagagagcaattttgctctctttctcacctcagttttgcagatgacattggcttgacatgcctgaggtcagccccagattgccaagccggggtcctcgctgtgacacggcatggccagtccctaccctagacccaggtggcagccccaccagatttaacatccaggggtggtgcagggccagtggggactttacctagcttgagaggcctcctctttgaggcagggcaaccccaagggtgggttttaagctttcaggtttaagagttcagttttgttgttgttgttgttcttttggtggggggaatagggtcttgcccttttgcccaggctggagtgcaatggtatgttcactgctcactgcagccttgacctcctgggttcaagtgatcctcccacctcagcctccagagtagctgggactacaagcatgcaccaccacacctgactaattttggtattttttgtagagatgggggtctggctatgttgcccaggctggtcttgaactgctgggcctcaagcggtccacccacctggcctctcaaagtgctgggattacaagcatgaaccaccatgcctggccagggttaaggttgttttgttttgttttgttttgtttttgagatggagtcttgctctattgcccaggttggagtgcagtggtgtgatctcagctcattgccacctccgcctcctgggtccaagtgattctcctgtctcagcatccttagtagctgggattacaggcacatgccaccatgcctggctaatttttgtatttttagtagagatggggttttgccatattgaccaggcgggttaaggttttgagtttacttcacatctgtaagctgcttctctccttcctttgcctccatgtttgtacattttctaatgagagaaaccatccatttgttctctcacctgccttgggcccagcccagttggttctgtctggaccgcagttcccacccctcagccccaagacttggaggtaccttagattcactcctctcctagtgccaccatctcactacctacctgtgcacctgttggccctggctcaggtgtcaccttctccatgaagcagcttttccaggcagagtctatggttgtctgtgccacggacccagcggggctgcccagaggcaggagctggtgttgttcctggtgtccccaggactgaccaggttaacacctggcagcttgtaggagtcacagaggttcgtggcaaggaggaaggcatgcacctgaggagcagggtggagtggtggctgagattgctgaaatagcctacggccaaatccagaccatgccacttacaaaccagccttggacaagtcagatcacttctctgaggctcagtttgctcatctgtaagatggggaggtaaaaatacagtcatgtgccacataatgatatttcggtcaaggacagaccaataaggtccttaagatttaacaccatatttttactgtatttttctgtgtttacatacatgaatatttacaattgtattgcaattgcctacagtattcagtacagtaacatgctgtacaggcttgtatcctgggagcagcaggctacccaccatctagcctaggcgtgcagtaggctacaccatctaggtttgtgcaagtgtactctatgatgttcacacaacaacaaaatcgcctaatgatgcatttctcaggacatatctccatcattatgtaacacacaactgtacctaccttctggaattactgagaaagttaaaagacaggaacgtacatgaagcatttaacacagtgccaggaacgtaagtctcaataagtattcatttctgttgtggggatttagggggctgcgagaagagcacgctgctataaacaggccttcctgggccgggatctcggaggctaagcactcgcactgcctgccccgtccagggcatggatgaggggctgagatggggagggaggggccctgctttggcagtcagcccctctgtgacgtgtccacataacatccataggaagttattgtttttccccatattttacagaggaggaagtagaggctcagagagagaggctcagagaggtgaagtcattcacccctgtcacacagctgggagctgcagtgccaacatagatgctaccaaagtggctgggctttttttttttttttttgagacagagtcactcttgtcgcccaggctggagtgcagtggtgtgatcttggctcactgaagcctctgcctcctgggtttaagcgattcttgcgcctcagcccccgagtagctgagactacaggtgcgcaccatcatacctggtgaactctttttttttttaaattttaatttttacctttttagtagagacaggattttgctatgttagccaggctggtctcaaacttcggacctcaggtgatctgcctgccccggcctcccagagtgctgggattataggcgtgagccaccacgcctggccaatggctgggctttgaatctccctttggcagtgaggtttgggttgcagtgagtaggttttggagtttgggctgatgggatggcaggatcaggagggctttctgctttttttttttttttcccaatgatgccagttctgaactgttgcttcctggggcaccacaggcagggagtctgggccagtctggccttcagccctatttgctgtgacctgtatggtgtgtgtttattttaatatgtgatctagttgtctccattgaacgatcaggattttacatccaaatctggtagcttcttgtaaacttgatcttccggccatcgtgggcccacattccaataggacagtgtgggctggagtgtgttccccatttagcctgcctggccaagcctgcttctctcctttcctttccctcctggctcacattggcatttgcgtttgtgattcctgagccaagtgggctacagggctggggcacacgtggggtatgggccctgggagccccctctgaggagctccctactaagaagggcaggcagaattatgattcaaggcaagatgagtggccccagagagatgtctagacagtgcttggggctttcagaaatgttaatgtgttcagaggagggcatccagtgacttggcacacgtttaatgagctcttgccttgtgcctggcactgggcatccctggaggctgcagagatatattcaggacacagactgtcctcagagagcctgtgtttccgggggtgagggcatccaaaatgggctttcatggagcaggatatttgtgttggtaaaaatgaagatgtgaggcactctgggcagacgagatagtgtagaccaaacttcagacgagaaacctttttttttttttttttgagatggagttttgctctattgaccaggctggagttcagtggtgcgatcttggctcactgcaacctccacctcccgggttcaagtgattctcttgcctcagcctcccgagtagctgggattacaggcatctgccaccatgcccagctaatttttatagttttagtagagacagggtttcaccatgttggctaggctggtctcaaactcctgatctcaggtgatccgcctgcctcagcctcccaaagtgctgggattacaggtgtgagccaccgcgcccagccagaagagaaaccttgacagcaccccctggtttgagctttcggagagtggctcttgctcaagaatgacgaaggcacaggaagattcaacctggagaagcactgactttggaggaaaaggttctcttgtgttttgaatttctaaagacttttaatctattttttaaaaaatagcctttattttttagatcagttttaggttcacagcaaaattgagcagaaagtacgagatcccatctactctctgtgctcacacaagcacagcctcccccaccatcaacatcctgcaccaaaatctgcttcttagtctataaaaatggcatgtcatgattttgtttattaaaaataaaatcaaatattatagactgaaaactaagccttttttcttcacccctactcaacacacacacacacacacactcacacacacacacacacacacacacacaagcatatgtaagaatctatccacccaggagatcatcccacatatcctgaagtatccgatgcatcttcacctcgaagtccacggtgtcggtatacacatttccacctcgcgctgcagaacggtcacacaggattccattttcaggagagactataatttattcaaccaggccccctgtgatggacacagacgttgtttacagttttggtgctttttttttttttgtatgctgcttcaaaccggagtgcataaacatccttgtacatctgttcttacacgcttgtgagagtttatctgaaggatagcatgtagaaggagaatctatgaatttaaaatggacgtttatggatttttaacttttgatccatgttgcctactcactctctgcaaagactgtggctgtgtactctcctggcagcaggatgtgagagtcggtgggtcatgatcttcctgtgtatgaagagcggggctgggctagggctggggcagagttggggtgggcccctggcagcagagtctagccaatgcgtgggaggcatttggagggcatttttctcagtgctgccttgcactttcatgcacatgtatatatccatagaataatatgattctgtttaaatttcttttttaaagtcatgtatcgttctgcaacttgcttctttcgttcagtaagatatttggacacatttttctagttcagctgtagaattccacctcactgtttctatctgctgcgtagaactttctgcagtgtgagattgacttagccacccctccgtgggggttctgcttcagggaacatcctttgtgggtctcgtcaggcttgggtgccagcatccctctgtctgcaggaagcacatttattaggaaagtggtcattgctaagaacgacactgctgttattcctgccatgcacctggagcagaggttgtggttcttgccttggccttgggcttgggcctggcacttctctgagttttctcaagctccatgtgggtgcagtgaatctgctgactttgttcctggagctgagtggagatgctggctcagggcttctcctagctcagagagtggctgtgatgtgattcctagccccccttagtcatcctagcagactggattaggtgggccccccccatcctagtgatcctgaggcagatgcccccctgcccaggtgtgaacagactctgcctctgggtggaagattggcacaagccatgggatcacccatttatcttctagcgagatcttcctccaggtttaaaagagaccctgtagggcacctggtcctggctatgggtgtggtggttggaggtgataaggaaagaacttaggggctgctggtggccactgctgacagcttctgctaagggtgggaggcactggaagacttttgaatctgcagagtgtgggcaatcagggaaggcttcccggaagaggtgggactgggcccagtgggagttttagaatgaagaggcagtgtctctgggctccaaggcatcccctcggcaggggcaggggagggaaagcggggcatgcagagggcctggcaaaccttctttagagaggctctttggctacctgtggttgcaggatgaccacttgatgtccagaaagctactaaaggggagatttggaactggacagactgggctcaaaccctgactctgttgttaccagctgtgccagtcacttaccctctctgagcctcagttacctggtctgtaaaatgtgatgataacagttccttcttcacagggcaagtgggacggtggcttgagctcctgtttggagaactgttggcaccgacctgcaaaaggtgacaggtgtggtcacacctgaaggtaacccaatcacttgcgcctggagtgatggctagagttggccatggtgtctgggtgaggccagagacacttgcctagtagaaccccccagactcagtgatggacccaaggtgctggtgaaggcgacagaaatgatgcgatagattccctttcgctcttgggtcccaccccaggggcccacctcggggccctacctgcaaaaagcagtccctcagggacattggacaggtgaagaggctttgagggcatgacccaagttggaaggcgccctggagtacctggggagaaggaaagcctggccggctgatggcagagggtggtgggggtgacagccaagcttcaggcttggtgcttctctcagaaaatgccaccatagatgatgtccccaagcagcattgggtgtgtcctcatggcgccctttcttcctgggtaattaatggtgctctcatccccctgagagggtggtggtgggtatggcgggctggccgggcaggcgccgggcagacagtcagagcccactccagtcctcctcatccatttattacctgtcagctttgctctttctgaacataaaataagtgcctgggaggcggccagggcccctgaagccccgagctgggctgtctggggcactctggctccagggagtcattccctggaggcttctgctaagctcaccccactgaggggcttcagataagctgggacaaccaggctgtgggcacaggctgggttcctctgtgatgtgactgaggcaggtgggtggagatgcaggactggagaaggtcagggcctcggcagccagctagaggccagaatttgggttctgagacaaatcctcctcttttccctcaaacccccgcctctcagccagggcttcttaaccagggcttccgggacccagtgagtctcaggatggactccagagtgtccaagaactggaataggaaaaaaagaatcccactgttattttcaagaaccattaattagaattacaaatggtaattcctgcaattataaatgtagatgatcaaccacagtggcattagccattctatgatgttgcagaaatcataggaattgcagaaattctcatgtcctattattgtggacctgataataggacatgagatacccagttgtcatgggtatcctaaaataacatttttgttcaccgtacttcaaaattacaatagttattagccccagatcttgttctctaaggcattaataaagaagcacatatattgctatagcattaaaaatatttcgggaggtggaggcaggcagatcacaaggtcaggagtttgagaccagcatggccaacatggtgaaaccctgtctctactaaaaacacaaaaaattagccaggcatggtggcaggtgcctgtaagcccagctacttgggaggctgaggcaggagaattgcttgagcctgggaggtagaggttgtagtgagccaagactgtgccactgcactccagcctggtcaacagagcaagactccatctcataaaaaaattttttttttttttgataaccaggcatgcgccaccacacccggctaatttttgtatttttatttattaatttttaatttttatatatatttttgaatggagtcttgctctgttgcccaggctggagtgcagtgatgcaatcttggctcactgcaacctccgcctcccgggttcaagcaattctcctgcctcagcctcccgagtcgctgggattacaggtgtgcaccactacacccagctaattttggtatttttagtagagacagggtttcaccatgttggccaggctggtctcgaactcctgacattgggcaatccactcggcttggcctcccaaagtgctgggattacaggcatgagccaccatgcccggcctgttttatgtatttaaaaacatttttctgagagggggtccttagaccttactagagcccaaagggcccatggcatctaagaaaggtaaagggctcctgctgaggcccagggaggggccctcacaggctgggggctaccccatgctgacagggatgaggtgtctgactgtcaaatggactgaagtctgcactgggcaaggctgctctttgtacccatctctgtgctggcctttgggggacagcagctcctggtgagagaggaccttgcctcaaggagctcctggcctggttgcgggagggggcaaggcacacagacagctgaacagctccctgcactgtcaggagttcagaggaggagagagaagtcacttccaccactgggacctgattgaccatcctgggaaggcttcatggaggaggtggcattggatttgggccttgaaaattttgacgtaagagacaggggaaagcaggtcaggctgagagggaccagactaagcaaagaaatggagtccagaaggctggggcatgagtggtgcccagggaggagcagggttcaactggagggtacgggagagagcagagggaggtgggaatggaagtcctgaatgcaaggcaaagaagcttgcggcccgacgcggtggctcacacctgtaatcccagaactctgggaggccgaggctggcggataacaaggtcaagagatcgagaccatcctggcccaaatggtgaaaccccgtctctactaaaaatacaacaattagctgggcgtggtggcatgtgcctgtagccccagctacttgggaggctgagacaggagaatcgcttgaacccgggaggtggaggttgcagtgagctgagattgtgccactgcactccagcctggctacagggcaagactccgtctaaaaaaaaaaaaaaaaaaaaaaaaaagaagcttgcactctgctgttggcccagggaaccgtggcagggctttcagcagggagcagggcaggtttgggtttgaggacagaccccctggttggtgtgtggagagacgatgggagaggatgggcgggaggctgggtggccatcgttgacaccttgcagtcatctgatggggaatgtggagagctgaactgagcccagggtcctcgtggggagagacaggggccgtcccagccatggaatgaggtggaaggtcaggaggctcagacctctggggctgggactgaccgcctgggtttgaattgtggcctctgcgggttactagctgcgtggcctcgggcgtgtttgttacgcttgcgaattaatttgctcatctaagacgcacggtgatagcagcacctgtctcgcagagttgctgtgggcgtaaaatgtgacaagggatttaaagctcagcacagttcctggcacagagtaagctctggacacgccatagctctggttgtttattaccggtgataaaacagatgggtcctggtgacccagtggactggaggagatgcagggacaaacgcggccaagtctgaagtttcagatcaggaccaaagcccgggtctctgcagctggtatctgagcacagaccaggtctccaggtgctctcttccctgctgaccctaagggctggggccaggacaccccctcccctgccctcacctcctctgcccagctttcccttagcaaggcctcctctggcccctccagcatagactcccaccccccaggaagggtcaaacacaaactccatctcattccaacacctggtgccgtctaaccccgttcttttcctccaggagttcccagggtcgggaaggtgcagtgaatgagacaggcctcagagagtgacactgggagctccacttgggtttctaagtctcagagcaggaagtgtctagaccagcgtcccactgtgagtgagcgctggagcctccctgaagaggaatgcggtgggcaaggtggtgtgacaaaggtggggtctttgaacgtgggattttgcaggagcagcttcacctctgggcctgctcacactggggctgatacttggggtcctggaattccatatgcactttcccctagaccctttcggggggctccccaaccctgctcagcttccctctctcccagactgaggggttccagctgctccgggcagtgggagcccactgatgccggagaataaatttgctgttttgtagagcatgtggatgcatatttggggggcttaatcttcttaataaattgttctcaaattgtgcactattaaactcctgaaaaattcatgagcacgctgggaatagagacctcatcgggaaggtttgacatgaacaatacaataaacgcagcttctaaattgggtcagggaagccttcgaggcccagagagaggacattcccgcttgaccctccccaggcctataaattaatcatgtgcacaaagagggccttgttctctcttgtcagagccaggggttgtgtctttgcccactgaccccaccccccctaccaaaccacctctgctgcaaacagagtgcctggtgaggccgttcagcgtctgtgctttgttattcctgtgtctccaaagcaaggtgggtgtacgtttcagcaagagagatgtaggttagataggaggaagaacttcctggctgactgtggggtggtgtgaaatcctggaatgggctgctctgggaactcgaggagactcttttcattaggcttttaagacctggcaggctctatcccccttggtgctctcagaccattgcccagagacagcagtgaccaggacagacattgccccagggtttggccacaggagctggcctggatgtgcctcattctggaccgttgtgggagatttaaggctcagctaaggggacatcaggacagcatcctccaggcccaaaccctcaccatagtctaagtacatggcatttggataagggaagtcaagttaggtctctgccatgggtctggggctgctgctctcttcctcaacaccctcagcctcttggagtcctattcaaaggcttggcccagatgccacctcctctgtgaagcctttcttgatttctccctgccctgtcagtcaaaattagttacttcctcccttgtggtccctctgccttgggcccttgttcgagactctctgtggaagcctatgtgtcccaccagactgtcagctctctgaggacagggactgtgtcagagccctctcaggacacaaagggacacagttcttgaagggtcctccagagaccatgccatgacttgcattggttttcacatgccaactcctaggaagggtcccctatgcaccccggggtaggagctgaatggcctggcttcccaatgacaacatgggaatcctgtgcttttaagacaggagtagggccagaaagaggagagatggaggaggcagaggccccggccggccacacttgaccccgcctttactctcttagttctgacatttcacaagcctttgtttttttctgaatctgctcaaagtccttcaaccctgcaggtctttggaggagggtgaaatggccacccttagtgtacacaggagccccaccctgagccactgtggccccaggtgtccccttgtgcctagaaagcagcctcactccagcacaagcctgggcaggtgcagcctcggtgcgcagtttggaaggggtgacgcgcaggtctgagaatgggtgggcagtgggggtggagttcactgtcagcgccaaagaggaagtggggaggccctcgtgggagtgtggaagaggagcacctttctctggggagagcacttccgggagatgtaactgggtagcctacccagacccctggccctggtggtctagcctctaaaggaagcagatgatagcaataggagaaggcagtggacagccccattggtcctgcccccaccccagccaccacctgtggctaggctgggaggaagctgctcttccactcccaccctcaccccgtgggctcggctgctccctgctgacttgcacctcagaggcacccccagccccctcagccagaacagccaacaccaggcaggtttgatgcctgataccatggggccctgtgtgccagtgcggcccacccagcctcagacctgtgtatatgtgtgtgtgtgtgcgcgtgcgtgtgtatgtgtgtgtgcatgtgcgtgtatgtctatgtgcgaaggggaagcttggcagagggtggctatggagtggagggggctggagaggccaggcctccgtgtggccggtcaatgcctcaggaggtcagcaggtggagaaagagagccgtgtgtggggtcaaggagaccctggggctgttcattggacagcactaattcaatgcctaaaaataacctcggacctggtagggcacttcagaaatttccaggctctttcagaccccccacaaactcatttcagtctccaacatcttgtgaggaagttaattccatccttattttaccaccaggagcaccaagttctagagtaaatctgtgaagggctcacagttagttggtggtagagctgaaactggaactctggtctctctggccataggttcagggccacctcctgtggacctactgtgtgcttagccccgtgcagggcctgggcatggaaacggagtgaaggaggcactggctttgctgccaacatggcctgtctgcagggaagaaggccacctgagagagaggttaggaagcaccagggcaaccacaggaaggaggggcgctgagatgggagcgaggccttggacaagaaaggatatccagagctagagagggtggggcttgagggtggaggccattcaaacacaaagcactctgggtgaagacaagacagtggggagcgggttttggcccagccccacgcagagccttaaagacgcagccatgggcatcccctgcagggcctggcaggcagtctgcccaggagagtcacatttgtgggaccctgctgcagaggaccttcccaagggacagtcccctgtttagatgtcttttttgggggggggtctgggggatggagtcttgctctgtctccccaggctggagtgcagtggcacgatctcggctcactgcaacctctgcctcccaggttcaagtgattctcgtgtctcagcctcttgagtagctgggactacaggtacatgccaccatgcccagctaattttttgtatttttttttagtagagatgggttttgccatgttgcccaggctggtttcgagttcctgagctcaggcaaaccacctgcctcggcctcccaaagtgctaggattacaggcgtgagccacggtgcccagcctcagatgtcttttgggggtggaaccagggctgcactgcagaggtcacccccctacccctggccctgtcactctccatcctcttcctcctggccagacctcctgctctggcctgcttttattctccttttagcataagatggcaaagtgactgagaagaaggaaacaatcaaaggaagagaagtggttgccacggaaactataaagtggaagcagaaactttcaggagcaggagggaggagggaagcagacctggtggctgggtgggaggagaggcgggaggcctggcctgggctagcctggagtgcccctacgcccagttctcgctgctctccccagctgagcaacgctgggatctgtgctctcgggagcaggagggccgtctggtttctcccaagtctgggcaggaggtggctggtacgagagtgaggtaagcagcttggcctgtgggtgcatggggctgaggaggagccctgtcttctgcccagatccccacattgttctgaaccgccagtcccatgtcagcctggaggagtctttgcatgtctttacaccacgtcttgattcctccgttctaacaagccaaaatgacacggtgcaggactgggcagtttaccaggcagcttcctgagtgcagtctcattcaagtcttgtgacagttctgggaggatagtattcagattctacagagtggggagtttgggcccagagaggttagggaacttgccctaggtcacagagctgagaacccccaggggtaggatttatcccctggactgtcagatcctaaagccttgagctctcttttccttctggacactttgttttgtaatgcagggctctgcatgaagccatgagttctctgtagcctccagccccttctcatccttcattccagtaagactttcccccagggagctgctatttgcttcctggaggagcctagggaaatttagtgtctctgaggcttgatttccccatctgcaaaatgggcataatagcaccttttccctctgaaggcttttgtgaggatgcaatgagacaattcaagtcaagcactgggtgcagtgcctggcacagaggatacccttgaactctctgctggctgagcctagcaagcacccgtggagtgggcagggctggggcaacctccctatatttcagagaagccacttcgtccgtgaaacggttccgatgggttcctgccttgctcggggaattggaaaggtagattgagatcatggctgtggagccttgaaaccactgagtctggtgggggaagaagcagggtctcccctgctgtaaaactggccactagagctccagtggacattgagacgtctcagccaatggtctctctgttggaggaagggaggggagagggattgggaccctgcccagttagcccctgagtaggaggctcagacctgctgaaggtttgggtctgaaatgaccccttggaattccgcgttgcctgcccccgaattgcagccaagctttagatttctcccgggagaggcccagccagtcaaatgtattattaaatggcagagaggccgagcgctgcatgtgaaagataatgggggaatttatatgatgggctataaatcacagaatgagaagccctgcaacctgtggggaggaaaattaagaagtcctgagcagtgacttgtttggggtgggggcggaaggcatttggccctgttttgctgtgagcctggcaggttcatgatgcacgaggcccaggggtccgaggggctctgatgtgcacacttcctatgtactcaatggtgacacccccctccccccattggcagctgctgtgtgacaatgccaagctgggcactgggttatgacctcagggagagcagtgtgccaggagagacagatgtgagatgaatcatcaaaaaatatgcagtcggccctccgaatctatgggttctgcatctgtggattcaaccaaccaaggattgaagatagaaaaaaattgcatctgtactgaacatgtacagactttttcttgtcatcattacctaaacaatacaactatctccatagcatttacattgtattagctataagtattctagagatgatttaaagtatacaggagggtatgcatatgctatattttaatgtcagggacttgagcgtgcttggattttggtatctgattggattttggtatcctggatccaatacccctgggataccgagagacgcctgtatggcactgcacaaagcagtgggctccctggaggaaaggcgcagggagctcagagagagtgttgcaggagggctgtggaggaggcggtgaattgagagaggggagtggtggtttttctggaaaggaagagtgaatgcgagtcagccaggtggctcaagagagctgtggcagggaaggtgagccagaaagagtggccaaaggccagcagggccagggcagctagggcaggggctgtgtttcagatttcactctggctgttttatggagaaccacactgaggaggcagcggaggatttggggggacagttcggggggatggaggtccccaaaggtagagatggcgatgccctggttctgggagatgtcaatgaaggtgatgaggtggacagcctcaagctggaatttggagctctgaagagcccatttcacagagcaggctccaagtctacaaagccagccccatgtcctgtatcctaggaggtgggaatcatgggagcaaagacacaaaggaaagaagcagtgaagggctgggggccagggtggttggggaagggataggagtagggtgtggtaagagggaagataggagtagggctggggccatatccactgaccactatcctaggctaggactagagtcaaggctgtgtgggattgaatcctgtctctgccactaatcaactcttgtgcctgtaaaatgggagagtaacaggattcactgcttttggtcattagaaggacttgctgaattgacactgcctgacaaaggggaagcactgaattgggattaagtatgcactgagtggccttgggcaactctgccctctctgagctttgctttcttctagcaggtctctgcaaaccctctaggccaaagtcctctaatctccctgtgctagcagtgtgcagctcccgagggtggtcagagcacagcggcaagctggctgtattgcctcagatgggaccgtgtccctctctgccctgtaaggggataccatgcctatcagagctgtaaggggatattttaatcagcccaggacctgctgaggtcagagggcatagggaccagaacaaagaatgccagtcacggctgctgcctggccctagatgacctgctgggccccagaatccagaccacatggggagcctgcggagggaggtggaagctgggggcctcactgtgggtcaggcactgttcaaactgggtgttctccattttgggcctcagtttgcccatctgtaccatgaggtttataacccctccctgcctgcagcacatggggtgctgaaaaaaaggaacaggctgcagtttggacaaagcagattcaggtctttattgggggctgtggtctcaaagcctgagagagagcaacaggtgggcgagtgaggctcagtgcggcccacggatgacctgctttggaatcacctgtgggaccactgcccgctgatgaaaaatgcagactcctgggctgttccccagactggctaacttagactctgcccggtgggcccaagtgtctgcactttaacccacatcccaggggactggaatgtctcgaagtccaagatctgaagttctgggcatccccttccttgcatcaggggaacaggggcccagagggcatggggtcggctggcccaagttgcttaggagactggaatcctatgccatgccactcaggggtccttcctgtgcatcgccccaggagccctgggagtcctgggtgatgcctggggcaaggggtactttatcctagggctccatagcccagcagggggcagcgcagatcagcacctgctgagggctccccgctgctgtgtgggcctgggctgggtagtgcggatctagaaagagctcactgttccggagaggtaggtgtgggcctgggtgggaagacgggcctgtgtgtgcatgggagcctgtgtcaggggggcgacaatgagagagagagcaccaggaggacacaagaaatgcgacatcagagaaagcaggcccagaacattgtgaaacttccttacagcttcccgggacagaggctgcaggggaagaggagagggcatctgttgcccaagctgcctccctaggactgtcagtgggattggggtgacttcaggcctccccacctccccccacaccatgtcctctgggcttttaaatgaggatcaatcagaggtcagcccctccccaagttcagcatcagagtcaggagggactaggggctgggctacaggctaaactccagccccaactctccaactggcccttccttactttgcctgctacagcttcctctgctgctgggaacctgtgggcaggcctacggcgtggggtggggccagtcctgagcctctggacctctgacttgagagtgggctgaccactagatctcttgaggccttctgcagttcccagttgtgggaaggcagcttcactttcatactttctcagggcaatggggggctggtttggtagtgagctccctgtcaccaaaggtatgctagacaagactaggtgaatttttcttcctcttaagcctttggtgacaggctaaagggtgggtcctgggccatcccctctttataccccatctgtctgttaatcattaattgccaagagagctcctcctgggatggggtgactccttggctatgggggatgctgatatccaggatgaccttgaacttgtttttcttggccccaaactttctgctacttcctgtttgagcaggtgcagaaattataggggcccaacccttccttgttttcctggtagaatttccagacaaaatgctcttcccaggatgggggcagagctgggattgttctcactcccaaggggatttgaggaatgaggatggcagaagctccatttaattcccacctacctggtcttaggatgctagctatgggctaggtgggatcctcaggaaaggccagtaaatgtgagaaccgtggctctggcagtgcttgcctctcctctaacaccagctatggctcccatttatgttccagattggacacagaggctctgagtgtcaatacccaatggccttgaacacccacccaggccaaccccattttgtaggaggggaggctggggctgtgagccagaggagccttgttcaaaggcacacagcaaagtgaaggcatttattcatccattcattcattcaccgagtgcaatctctgtgccagttccttcacggtcaggatttgcaccctggcctgctgaccatcctcagctgccactcaaaaataaactttccagcctgccatccatgtgtcacaccaggcctcaagaggtaggtcacttgttcctggtcccacagccagcctgcctgcctgcctgcctgcctgcctgcctaccttccttctttccttcttccttcctctttctttcttttctttctttctttttctttctttcttttctttctttctttctgtccatttctttccctttctttctttctttctttctttctttctttctttctttctttctctctttctttcctttctttctttctctctctctctttctttctttctttctttcctttctctctctctctctctctctctctctctctctctctttctttctttctttctttctttctttctttctttctttctttctttctttctcactttctttttttttgacagggtcttcctctgttgcccaggctggagtagagtgacacgatcatagctcactgtagcctcaacctccctggctcaagcaatcctctcacctcatcctcccaagtagctgggactacaggcacacaccaccatgcctggctaattattattattgagactgagtctcactctgtcgcccaggctggagtgcagtcgtgcaatctcagctcactgcaacctctgcctcccgggctcaagcaattctcgtgtgtcggcttccagatgggatttcaccattgctggccaggctggtctcaaactcctgatctcaggtgatccacccacctcagcctcccaaagtgctgcaattacaggcgtgagccaccacacctggcttttttttctttttttttttttttttgtagagacagggtctcactgtgttgccagggctggtctcaaactcctgggctcaagtgatcttcctctcttggccttccaaagtgctggaaccacagcttcttttctattaaaaaaaaaaaaaaaaaaaagaacaggggctttgagcccagctcccttcatgcacctcgttcatcacacatttattgagtgctattctatgcactgggcatatggctgtgaactggactcacaaggttcctgtcctcattaaagtctggggaaacaaattaatgaacatctgaatacacagattagatagtttcaggaagcgctatgtggaagaaaataaaacagggcaatgggatatcatggagagattggggcaaaggcacttgagataaggggtccagggaaggtctctgagggtgtgatatttgagctgaggcctgaatgacaggaaggagctgtccatctgaagatctggggtttgtgggaatgaggcagcaggaactggagatgcaaacgccctgaggtgggaccacgtttggcacattcagagattgaaaagttatcaagctgagtccagaactatcttagccagtggctcctcaagaaagccactagaaagctcttttaagaatatagattccttggccctacccatcaaaatctggattcagggatgctgggagtggggccctggaatctgtttctgaatgctcccaatgtagttaatggcatccagtccagccccacacctgtaagcctgccatatggagccatccccttctttcattttttgcagagggaggatcagagaggcaccgtgacttattcaaggttgcacagccacacagtgacaaatctaagcctcaagcccagatctcccaccagagttctgcccttaccacttctcttcttcccctctggagaagctgcctgggcctcaccccaacttggttctatctccctgtctattctccctgatctcacccctcacatagcctgctccccagtcctcactgtatcctctgctccagcctcaccatcctacccactgtctccagtacatgctttgttcatttccacctctggggcttttctcatgctgtctctccctccaagaatatacttttctgctcgctatgcagtcaactcctactcagccgtctagctccatgccagtgtctcctcctccaggcagtcttccaggacttctctcttctccaaattctctcagtgctgactccaggtcagataggctcagccacttttttcgaatgttgccatcatctctcccactgttgctaagagcctgctctgggctgggagctgtactgatcagctctggactgtcctctcaaccaatccacaaattagtgagaaaagaaatagccaaggctaggcatggtggctcaaacctataatcccagtgctttgggacaataaggtgggagaatcacttaaggccaggagttcgagaccagtctgagcatcatggcaagactgtgtctctaccaaaaagttaaaaaattagccaggcatggtggcacacacgcctgtagtcctagctgctcgggaggctgaggcaggagggtcacatgagcccaggcattcgaggtcgcagtgagctataatcccaccactgcatttcagcctgggcaacagagcgagaccttgtctaaaaaagaagaagaagaggaggaggaagaagaggaagaagaggaagaggaaggggaaggggaagaggaaggaaacaaggaaggaaggagaaaggagggaaggaaggaaagagaaagaaggaaagaaagaaaagaaaggaaagaaaggctgggcgcagtggctcatgcctgtaatcccagcacttggggaggctgaggcaggtggatcacctgaggtcaggcgttcgagaccagcctggccaacatggcgaaaccccgtctctactaaaaatacaaaaattagccaggcgtggtgacacacgcctgtaatcccagttactcaagaggctgaggcaggagaattgtttgaacctgggaggcggaggttgcagtgagctgagatcgagccattgcacttcagcctgggcttgctgagactccatctcaaaaaaaaataaaaaataaaaaaagagagagagagaaagagagaaaagaaaagaaaaagaaaagagccaggaggggaagctgcttgtcagtttatacgcaaggctttgatccactatgttatttgactcttccacaacctcacaaaatattcatatacccctttataccttaggaaatggaggcacagagaggtgaggcagtgatctggggtcacacagtgaagaggggaaggctcatcactccaaatcccccacctgaatgggggcttcctaggagctgactacagggcccgttcagctgtcctcctctgtggtctctgcaggagttgagcaaggccctcccctggaacccaggccagtgccagccatgaaatggttcacagatgaccaggcaggcctgcttgagaagggagggggctccctgacctcacactgggaccatatgccaccccctctggtttcccagtgggtgcggagctgtctgggcccttactgaagggggaggaagaagcccagagacctggaacctcagccccaggcctgggccagggagaaaggaggggctgtgggcgtcactggggcccagggcccacctggagcttggcagcgtttctgggtcagggcagggagaggaagtacacagagagagtggctccaggcttggccatctgggctgaaatgccggctgctagggttggggtgaggaaggagggctggggctggggcctggagagtggattagtctcccctgggccacaggattggagccctcaacttcagggcagccagtatggaggggaagcccagggctcctgtgggcagaaggcagcaggcattctgggagaggtggtccaggctctcgacggagagaggtggtcttggcggctgtatttgggttccaaggtggaacccaccctaatccccagccccatgtgaccttgggtgagtcgctccctcccttggtctcacttccccatcttcaggaagggatgctgccccaccctgactgctctgtgctgggatgagagagccaaccagaccctcagtgattgcagagttgatgccagatcccagtttgccatgggttagggagggtcctctgggtaagcagctgattttgagggcctcagcttcccccgttcatcagtttctctcaaggttccttctacctcggacattccggggctttatgacaggctgtcgacgtgtacgagggagacgtgcatgtcctcttctctgggcttctggaggactggaggggacctgtaggtggccctttggggaatggggagatttttagatcctgatggaatctctgggaggtgagctgaacagagctgtctcatctccatttaacacgtggaaacctgagacccagaggtatcacacggtgaccccctcttagagttccggcctgtcccgagggctctgccctcggcccagccctgggtgacttgattggaaaaacactcacactccccgaggctctgtctctgtgtgttcaaatgtccacgcttgactggtcccccacttccgcctgtgttgagaggggcagagccatccaagcctggggtcatcttgtccctgactgcaccgttttctgcaaacgatgtcattaaatatatcggtggcttttgggaggaagtctggggggcggtggcagtggtggtcgcctggctagcctggagtgctttagtgtgacctcttggggcttgtctatgcttttccctgaatggggtgacctggccccagcctcccccatcttcctagtgaagatcctgctcctggtccagccttattcccggatgaacagtggatgcaggaagtcgtcattgcctgccagacaggccacctcctggggcagaggccatgaccttaaccacaagtgtcccgccaccccccccaccccgaccctctgtcccccccacccccacccctgcccagagctccagagactgaaaggttgagactgtcctgggaggcggatgtgtgcaggcctgcctggctggggacttccccggtcaccaccacccaccctcatcccaacaggaaacctgacaggtctgagccttccagacacccattgtgtggggcctagtgtgggctccgatgcttcccctgtcaggactcctgtcgcccctagcctcctcctgtcccttgacaaagctggctattaaagaaagttctagactgtttccactcccccgtctctgcattccgtactgctcaaccttatgatcgttgctcctttcagccccctgggttcaaatcctgcctcctagtgcaagccctgtgactttagggaactcacctaccctctctctgcctcttgacatttcttctggaaaaagaaataaccatctgcctcctaggattattctgaaattaaatgagatgatgtgggtagaatgctgagaacaggatctgggacagtgcatgctagatgcagttcagctaccatgattaggattaaacccaaactccaccctcaaacaaacctcttgaggtcaaacttgtaaccctcctctgttaagaagccttgggtttctgtggtgccccacgcatgagcatctccccttccctgggggaggctggtgtttgaagataactggttgtggttgctgttatcatcccccctgtacagaatggcccatcaatgaaggctgtgctcttctgttttgtgcttagctgcagaaatgggtgatctgtcttaagattggaggaaacactatgctttatgggcaatttaaggcttttcaaaggtaattttggcaatatgcttttttttctctcttttctcactgacttcaaccctgacaccgcagagggactcaagactgccttgggctagcctccctcccctgcatctggtgcccctgctgacccaccctggcctggcccatgatgtacctggactttcagcccagctctgatgctacccactgcttcttttccagcagggatgctgatggttttctgcctagaggggaattttttgggtccatccctccctggtcttcacaagtagcctcctgtgtccccattattcaaactgactagtggggtataccaggagccaggaggggggtgtctctccttggagtcagagtagacttttttaaggagggggtgcttcaatttgcaattgcaaaaatgtatatatacacacacatatatatacataaacacacatatatacgtatatatacccatatatacacatatatatacatacatatacatatatattatatatatacatacatatacgtattatatatatatacgggtatatatgtatatatatgatggaatactactccgccatacaaaggaatgaattaatggcattcccagaaacctggatgggaattggagaatattattctaagtgaagtaactcaggaaaggaaaaccaaacatcatatattctcactcataagtgggagctaagctatgaggatgcaaaggcagaaaaatgacacaatggactttggggactcagggaacgggtggaaagggggtgaaggataaaagactacaaattgggtttagtgtatcccaagttactgctcgggatatgggtgcaccaaaatctcacaaatcaccactgaagaacttactcatgtaaccaaatgccaactgttccccaaaaacctatggaaataaaaaatttaaaaaataaaaaactgaggggatgcttgagctgggtcctgaagggtaagcaggaatgcaccaggtgggtgcagagggaagaccttggtggcagcggtccaggtcccaccaacagggcgaagactggtggtgggaaagagtgtctggaggatgaccaagggggctgaaatgggttggggtgcaagcgggaggtggtcgctttttgacacagcttggtctctgagagttcgccttgggaggcttttgaggggagggtaaaggtgctggtggtggggttaggtcagatctgatttagccagtcctagtacccacacccctacttactaaacttgcatgtttccaggccccatccagacccactgaattgagcgtcttgagggaaactcagaaatatgcctgttcactgagtgaaggtgatttgggggctgcagccctgtccccgctaaagcagcacatgggagaggtgggagctgggcctattcaggagcccctctggaggtgggagaataagaccagacctttagccctgtaggtactgaggctctcatgttggcagggctggaaagtccgatctgttggtctgtcacaggaagcagtggtagcaatggtggtggtgggcactggaagcagggcttctcctgttcagagagagaaagccacaggggcgccggcgggaggtgggagcagatggggggccagtttcccagcaggattgattccaggtcccctgctgggctgtacagggagcggcctttaactgccctgttcctgggccaggaagaaggaaaaggagcctgggctctttctctcctagctcctgccctgcccccttcccactcagtacccggagagtacctgccccaggcccgtggagatgctcggctcagctggttggcgatgcccattcccatcccaagggtagaaatgcacaagcttcctccatttcactagctgaccctccttcctccacaaggcagatggattgggggtccatacgttctccctataggtagggaaactaaggcacagagaaggacttgaaaagctgaagtggggagaccatgccagacctttggagcccagctgtgcttacagatgaggtcctgagttccaagttactgccccctctcccctccacacacactcctcagacttcctgttgggggcccaggctaagaccacttgcccacaccactgataacagtgagttgattgtgagcctcccgtcccctccagggagggctggaacctggctgatcagagggttcctgctttgggaaacaaaatgggccagatgaactcaggccctgggagcaggaccgttgcccccgtcctgagtaggacttcctgggagtccctcacccccagaacccgtggacctggctacggaggttagtcatgcctggaagtgccaagatgtggacaggtggtgctcagaaccccacctacgtgaggaggcactgaactgggttctggcagtttggccagaggaggatgcatgctaacaaggcccccagcttgcctggggactgagtgactgtgtgtgcgctctgtccaggggcttctttttagagacgttcctgcaccatgtctgctgttgaaaggagatagggcaatgcctccaagcttgtctgacctgcagcctaccggctgcatgtggcccaggatggctttgaatgctgcccaacacaaattcataaactttcttaaagcatgatgaggtttttttgtgtgtgtggtttttttgtttgtttgtttgttttagctcatcagctatggttagtgtgagtatattttatgtgtggcctgacaattcttcttcttccagtgtggcccagggaagccaaaagattgggcacccctggcctaacccaaaggaggctaagggtgtcctcttgggcaccctggttttccatcttcctgtgggattggccagtattcagggaagaggggaccagggcagctgatagctctggactcctcagactgagtttgctggagtaacacccctcctgcccctcccccctggtcagggaaggcgcctggcttccagctgtgagacaggctccgcaggactagggaccctccccgctggctgagagcgctagggagggggcttcccctgtgaggtgcaaaacccggcctggatttctgcccagacggccccgcccactccagggccccaccttccccactgttctggaggaagatcccctagccggcctcaggcacttgcggtgactcacaccccccacccctaagtctgaatgttgagagccccaggctaagaccacttgcctctgccactttccatgtgactgaggcaagacctccttgccaaggcctcagtttccccctctgtacttcaaaggaggcagctcaggcaggtgtcttaataatttaaacgacgaatattgctaaagagataaggggcggggagagagagagatcactgtgggccatggttagggaagggtggaggagctgggtcctgaaagggtggactttggtcgggtggagaaaatagccaagaaggcagtccctgctggcagcacagcaaagagaagtgagaattagggggagcagaggtgaggctggaggggactttggttggggcaagattatttggggtccaaataacaaggatgtttagacgtattgccattgtgctctggggagccacggaaagctcttgagctgaggagtgacttggagaaagtttttcagccaatgcaatagagggagttggtacctttccttctgccaccctgagtttctggtgcctacggtagggtagggattgttctgccctgccttcagtgctttgagtgcttgaaacagacaccgtaattttaattacataaaaatgatacgtgtatcagacgggacaacctttaaaacgtaaagaagaggcaagtatcctgcatcacaggggagtctttcaacctggctgggccagggcctgcggagcagtgagggtcgtttctcagcccagcgagcctggggcaggaacggaccctaattgaaggtgaccgtccccaagcatgcgtcctaccccgggctccggagagcgcacaagcaggtgtgcaccgtctacccgcgctggcgggattgggtgcctggtgcgccctcaggtcgacggtcgaaccctcgggggcgggggtgggagccagaaccctcgggacgacccgtctggggtcccggggaaactccgggccgcctcgccccgccgattccaggccgggatttctcccgcactgactttccgggccggtgccagcccggcctccgggtccccagcccccgccgcggggccggctgctcggggagcgggagggggcaggaggcggaggaggagtttgagcgactttgtggggcagccagggcctcggcggccgctcgggcgagcgcgggagaacgcgtgggcgcccgccgggctgtccggagcggccgatggggcccgtgtgagcgcgcccaggcccggcccggtgcccggcgggcggcagcatgtccgcgggcggcagcgccaggaagagcaccgggaggtcctcctactactaccggctgctgaggcggccccggctgcagcgacagaggagccgctcccgcagccggacccggcctgccaggggtaggcgccaccccgacccctgacccctagaccctcctaaggccactaagccacctgatgccctgggatgctagggaccgggatcctccttccagccatttgccgggggtttcctcatccgccccttcctgagtctgccggaccccccattcccccagcttctgcttagtcctcctctcgccgggggaagccgaggctctagggtctcctcttaagccagggacagggagaggggagcctggaatctttctccgcatctcagatcagacctcctaccccactgtgcctcagtttactcagcagccgggcaataaagtaacccagggtggatctgagctttcccacaccttgccttcccagcccaggccgcggacttctttcttccctttccaggaacttaacgggctccccacctcttgggtgctaggacaagtgggtggacctcagggaaggaaccgtgacccctcgagcgggtgggcgccagctcctttgcaaagtttctctccatcaagctcaggaggcaggacgagacggagggggaggtgcgagcagcattttctttttccagtaacaggatcctcggctggaaatgcgtgtgatcccgggggctgcgtttgggcgggtggtggccgggacttccttccctggctgagtaggagggagggaagcccctgggaggaggaggccttcaaaggggctctggggaggctggagtcctaggcagaggttcaggcccaccgagggtgcccgtggggtggaagggaggagaaagacggcgccttagcagggacctgggccgagttgacaccatcaggttatcttgaaagtgggaagccgggccctgtgccaacaaatgccatgcagggaatctggtagaccaagaggggccacattcccaccctgcaggctgccgttgtgtgacctgggctgagctgcctctgaacttcagttttcttgtcggtgtgagggtaaatgaagcaggcaggtagtgttcggttgcttccaccagaatggggaagacttttcccacagtcaggtctgagtagcactgtgcagtccagggcttcctcaggaagtagtgagttccctgtgcacagaagggttcaagctgaggctaagtgtgtgcacaggtgtgtgctggtagttcagtcctcaagggtctctcaaagcctgcaatccccccactcctgcctttcctgaagtcttagtaagtacagaattaacagtactaagttacttagtaagtacagaattaacagtactaagcctttagtactccttggagggagtactaagcctttagtactccttggagggagtactaagcctttagtactccttggagggagtactaagcctttagtactccttggagggagtactaaagacctggggaaggctttatctcagtggttcaggttttggttcttctatctctgtccttctatttaattctgtacttgctaagacctggagaaaggcttagtactgttaattctgtacttactcccttcccctggacttggtctgggagaccgggaatctgggctcaagctttgtgactttgggcaagtcatttcccctttctgagcttagttttcctggttgtaaaatggacctgccgtatgtggaggattcagtgaagaaactgagaaatgggagctttgaaaatgcccagtactgttcagaccaccctggggcctctccttctgcacccacctcacgtcacctcacccacccgcccctcctttgcctcagaaatgccctgtgtgaccttttcctcttctcacctcagcccagttccatccctgactgtaatgggagtctcgctcctgttcagctgacctcctgctcagctgaccaggcaggggataatcaatgtgtcaggggctgtcacctgagccccagctcccagaccccacatacacaggatcactgcttgtgtcccagcttgaaggagctcacggcctgcagagcggggaggagactgtctctgaacagaagttatatctggggagatcagggagagcttcacagaggaggtgacatttggatgggatctcacaaaatggatagggtttcccttcgcagagggagtaattgagtcagatctgggttcaagtctcagctgtgcacacaactattctacagccagttacctctccaagcctcagtgaccttgtgtggtcaatggggctagcagtgacagggtcatgtgagggccagaagccagtgcctgggactaaggctgcagctgagggtgagctactgtcttctctctggacagaatgaacagactgcgcagtcagggagaaggaaaacggcttgggtattgagaatagagttcctcctgggtttggggaggggagtggattgggaagggggctgggtgagtgggtggggaagagcaggcaacagtagtttggatttgataaagggccttgaactttgggaggccaaggcaggaggaatccttgagcccaggagttcaagaccagcctgggcaacatagcaagaccctgtctcaatattgtttttgtttgtttgtttgtttgtttttttaaaaaaagaaggcctggagtgatgaggagttagttacagctgcagccagggtgtagggtggaggctggaggcaccctgtcctcctcctccttggtgggaggcagctagggcagccattgccctccctccactaaagcctcagacgcctgactctaccccagagccacaaccaccacctgagggcagggccccacccagggagaaactcaggctgaggaagccaccctgtggcctttgagccagtcccttctgaccttgaacttcagcctccccatccacatgggggcttggtcccatggtgtggtagcatcggacctcagaggagtgggtggtgcctagcatctcagcctggatcagactcttgcccccacaccctttctggcctctggcactagcagggaaggaaaatgaccaagaactcaggctgtgtatttgttcagaaacagaaaaatgcaaggaagagttggttgctgccaggttctgcaggtggccaggctgggggaagggagcagggctttgtccctggtagggctgtgagtgagggacagtatctgcagtctccctagtttgaccaataagggacttaggttcttcccttttctgggcttcagtttccccatctgaaggatgggcagagtgagacctgctgtggtggggggtagagcacgaagctggagggtagctggaggtggggtagaaacagtgaccttcggagggtgagggccatttgcattttcccactgtgtccctaactccacttgaaggctgggcatgtcccatggatttggggggatcctttccccagaagggtatcatcagcaaggtgcctccccacctagtcacaccaaaatcaagaaaagttttgtctctgacccctgtgtttccccagggctgctaggagaaacagaaattttcctctagccctggataaagttctgacccattcattcagccagtcagctcctcttaagcacctactatgtgctgggcttcagcttgggtgcaggggcacatggagatgaatcacatgtgctcccagcccttgccaagcccccagtctgttggggaggccagcttgttggggtgcactagggcacaagtctctttctaggggacagagcagtggttagtgggaggcaggggctgtagttccagctcagccgcggactggttgcatgactgggcacatcatagggcctcagtttccccatctgtcgaggggggttaatcttgctctcctgcctcttggaatgcctatacccatagccatgaggggttttgattatgttgttcatgttttcatctgagtttttctaggggtccagccacctgccaggccctggctgggagctgggggttttgcagatgtttttctcttgagatggtcaggtcctcctccgtgcctgtacacacccctcttgcatgcctctgtatcttgcccgcgtggtgggagaggatggtttcatacaactggttcctaaccaagagaacagttaggtaaggacctgtgtgccaccatggggggtgggtaacttctcaggggaccctggctttttttttttttgagacggagttttgcttttgttacccaggctggagtgcaatggcgcgatctcagctcaccgcaacctctgcctcccgggttcaagcgattctcctgcctcagcctcccgagtagctgggattacaggcatgcaccaccacacccggctaattttgtattttcagtagagacggggtttctccatgttggtcaggctggtctcgaactcccagcctcaggtgatacacccgcctcggcctcccaaagtgctgggattacaggcatgagccaccgtgcctggctgggaccctggctttgataaggtctgcaagaggcctctggggcaacagcttggacttcatgagttgggcgagcctgagaacagccctgaggtgggggggttttgtggttccccagttttcaaatgttccctgcaagggccctaggcctggctctctgcctccaccttggatgacacctgtgaaatcattatgcccttttctgccttgtctcttcttctgtttctgccaagacacaatctttcatttggggcttggccctagcctttccagtccctcctctcccttacatacctcaaggattggggagctcactccctctcaggttgtgtaatgagggtgaaaatggctcctttttgttacggctcctgtgtgctgcgtgcctgctccatgcctggcaatgagctcaactctgaacttgccttgtcttatgcagtgttcagaacaacactgtgagatggatactgatactatcctcatttcataggtgaggagactgtagcccagagaatgaaagctttgcccaaagccacacagctcagaaatggtggagcccagctctgcccacctccaggtcctgagattcaccttgcgatatccgtgggcaggcagacctttctaaggtcaggccctggctttgagaaggccacctcccttcacagccaatgacttcactgggtgttcatggcaattgtctctcacagtcttggtcaaagcttgggagggaggcaggggagtggccccgttggcatctggttgcctcctccacctgcctgggatagctcaggtgggacctccccggcctgcccctgccccctggatcctgctgtcattcatgacctgccaaccatgccctttcccagggcatgcgacaggtctcagggcctcagccatgtttctccaccaaagcccttagtgctgagggttcagagtcccctggtgtgaggtccctggagcctggcagacacctgaggcctaatccccagagctctctaggtcctcgaaggaggccacaggccccagtgaatctgctggaatgtcagcctcttgcccttgcctttgtccttcctgacccaccctcatcatctttaataatcaggaagagaacagctccctttcaccaagctgaatgtgtgcccggccccatgccaagagctccccctgattacctcatgtctcatctcagttctccaatcctcctagcaggtaggggttattgttgtcactttcctttaccaggtgggaaacggagctctgggtgtgatatttcctctgcattttcctgtcggggtggtgaaataactggtttgaacccagtccactggactcgaaagctcatgctcagaagccccagggctccctctaactttcttggttgctgcaactcagagagcgctggaatggacccagggcatgctcctcatctcagcggttcaggttttcattcttctatctccatccttctatttaattctgtacttactaagacctgggggtacagggaggggcttggagcctatttgcccagctgctgaatggggaggttggagagatggatacttatggctccagtaccaggagccaactgtttcccttgacaactggggaaactgaggcccacagagccaaggccacttgcccgtggttacctaaagatgttaacgagaaatccgggtctggaactcagatccctttgtatcctgtttcggtgttggtgtagtttgttgctttccctaagatgagcccagatagggaaactgaagtgcctgggctcctggttgggtcttctgcggggagagaatggcgattcaactcccgtgtactgttgaacttgacacaaacacgctcacatcccaggctgcatacgtgttttgctttagaaatgacatgaagccttttgactatttttaagagaaaggcaatggctgtgatatttcccctgcacctccctctcggggccacttggttaaatgtcaggaaagggagagtatttcctggtcaggaacattcagagcttgctgggagctgaagttttgttttccattaagtaggtattcggggagtctatttccctctgcctcctctgtttccctggaagcttgcgcttgacagttgcagggaggaggggtttgagaatgagcagccgagatgcccacgtatcgcgtgcccgctctaggagtggcggggtggctatttttagccatcccgattcagtagaggcatttcagcgtttgttcaatatttaattatccatctgaaattggcccatgtggccttcagtttggaagcagctctctgtgctgtgatttcccagttgcataaataaggaagcaagggaatctcaatagccctccaaataataataacgagaaaaaaaagtagactcgatactcagcaaagacaggcttggttcctcggtctagacagaccacctgtatgttagcagagaagcaccaccgaggacgcccatcacgcccttggaaatgcggcggtgctcagtctccgaatctcagatccacaactgcctgggttttattggggatgggttttcctcccttcgccaggttcctgtgttgactttgacagctgctgggtacctgagaggtggtttggggattttgcttttggaagccttgttagcttttatttccctcttctcttctccctgacagacaggagagtactatcggcatctgggctgtgctatttctttttccttggcctttggaggcgatgtgccgacatagttgtgaaatgaaaaaaggcagagcacagggagggagatgttggggccatgaggctctgccttccttccccaagcccctggctgatgagggagagaggggagaagaggagagagtggggcccaagggtgctgggcagtcggagatgactccttcctactgtcctgcttggcatggagatttgtggactttgggttcggagactggaaaccaataaattggtaatctggaataagcttggtttttctatccatttacacctctattctggggacacagagtttggcctaggagcgtgtacagagtcctgactaggtcataaatgctgtgtgactgcagacaagtcactgaacatctctgggctcagaagcacatgtaacagatagatatgatgcagcatagggtgtcattataggccaggagaattgtcattattagctgttcacccaaagtctgaggggttgcttgcaaatcagttagggctgatctagaaagaaaacgtttgggaggccgaggtgggcggatcacgaggtcaggagatcgagaccatcctggctaacacggtgaaaccccgtctctactaaaaatacaaaaaaattagccgggcgtggtggcaggctcctgtagtcccagctacttgggaggctgaggcaggagaatggcatgaacccgggaggctgagcttgcagtgagccgagatcgcgccactgcactccagcctgggtgacagagcgagattccgtctcaaaaaaagaaaaaagaaaagaaaaagaaagaaaacgtgatgccagtggggactggacccacctaggtggtttctcggcatccctaccctgagaggctgccacaggtctcactggtacttgttcagagcagcagagctttagcgagccacctagtatgtgtgacctgggtgccaggggctgccacagcagatatagccagcccccgccctcgggagctcagaggccaaggggaagagtcttggcataaggttagcagatggtgtgactggaaaggtaggcagggccttgagtggtgagcaaagaggggagaacagcccctggcagaccactgggaatcaaaggaaggattttgaaaataacaggaatgataacagtgatctccatgtcttgagcacttacacagcaccaggggttcttctaagtcctttacatgcatcctgccttaaatcatcattctcccaggtggtgttatcagctccactttctagatgagaaaactgaggctcagactggttaagtgacttgctgagcatcacccagctactgagtggcagagtccaggatgtttaaccctcactatacttaccagagctgtgatttaggaaaagaactcttaacaaccctcaagctagactggtatggtgcagggagaagaaagtgggaagagggagcagggaggccagtccgcttcctggggaattttgaaggaggccggcaggtgcaggatgggggaaggcagagggcaggtggagaggagctgggaagtttggaagggctgacacaggagagaggatgccgccatctgagggccagtgctgggctcctgccacgatctctccctggcctgcggtgaaatgaggactgtaagggcattgcagcgagtttcccataacatccatttcacttcagtaacccattttgatgcctcttttttattctgagatgatggtctttggattctttggggttagaacattccttttatgcaatacataaatgtctagtatgcaccatactaaatggtgttcttttttttaaacatctatatttggcaagaaaagaagtcagtggttctgtgtggcccaccctcatattatgctacttcatagttttcatttatagacattgaactagttcctggaattctcacaggatggtaggctgacacccacgaaggagaagtccaggggtcgtccttacagcgagaggagtgggagctggtggtgggataaggtggtgggataaggcccttggaaaggcgtgaagaagcgggaggatgagggtcattgagggctggggtgggggatgcccggcaggctgtggacatggctgatgggcctgccttggatgctgatgctgcaggggttttggcacaagactgggcaaggggcttttcagggagcagcttcaggagaaggcgagaaaggtgctggagcctgcaggggatcgattatttgggggagaggaggtgtggggtgcagaataggacaggattggagaagtttggtgaaaatgggggtgcaagagaagcttggatttcccattaactgtcaatacagtcatggttccacctggtatctagaaacctgttcacaattgtaggtttagcagcacacagggtggggtaagtgtctctccccatcaggagcagcctctgaactctcctgggaccctgagcttcagggaacccaggctgtggcccccctcccccactttggcaatgctgtctgcagagggaagggccggttttactagcacagggagtgctccggctcctgtgtgtcggggaaattctggaagaggctctcttccagaagttatggaaggtccccgggagacagaccaccagtttgggccaaacccctccatctacatgaaacaacaacaacaacaataataatgtttacggccaggcaccatggtttatgcctgtaatcccaacactttgggaggccaaggcgggaggatcacttgaggccagaagcttgagaccagcctgggcaaatagtgagaccccatctctacagaaaattttaaaattttttgttgtggtggcacaggcctgtggtgttaactgtttaaaaggttgagggtggaggattgcctgggccaaggacttccaggttgtgatgacctatgatcgcaccactgcactccgccctgggcaacagagtaagaccctgtctcgaaaaaaaaaaacaaaaaaacccaactcctaagattacaaaaagcagtaaatatctattacagaacagaagaaaataaaaatcacctttaatccagcacccaccaataagctctgggatcactggggggttatttccagcccttccccttcttttctttaagtttttgaaaattctaaaatattctaaagtagaacagaaaagcatagaaaataatattgcagacacccacctctcaggttgaacaaaccttaacattgccatacctgcctctcttctcttttctttctatctttcttagaaatagaaatgattcaggtccagaaggagtcaggacagtgtggtctactggccaaacccagcccctcatctgtttctgtatgacttgtgagccaagaatagtttttacatttttaaagggttggaacaaaaagtcagaagaaggagaacatagggagttatatgaaattcaaatttcaatgcccataaataaagttttattggaacacagccatgttcattcatttgtgtattgtctatagctgctttcacgctacaatggcagagttgaatagctgagacagagaccatatggacttgtaagcctgaaatatttgctatctggccttttatggaaagtttgctgacgcccaagatacagctaaagccacctactctctctccaggcataactggccacctaaaggtggtgggtatcctgcctacatgtgctttctgcttttacatagaagcctatgcttccaagtgtgtcgaattgcattgtgtgtttaaaaatggatatggtgaaattgcacatggcagagaggagcaaacacatatggacaccctgagacctccttagtttcctgaactccagcagcacagagtaaatgccagctctctgccagccctggaatgggccctgcagatgcagagaaaagaatcgtgggaagaaaactccagaagaaaaaatggggaaagtgacactgccgactcaaattactagaaatcctcagaaagtaaaaaaggaaaaagaaactcagggttgagagaagactttgggccggtgaattcatccttggagtgttcaggaaatccagagatttttggaaggctgggaattctttggaagtgaggcgtgtctggagataaggaataggaagcatgggctgtcaaaagcaattgttagggagctcaagtagagaagcaaaaggaaaacctggggacaaggtcgacagatgctgaaaaccttgtaggatttatactaggctacaccagactattaacgcggccaaccagagaccaacaagggagcaaacccttgcactgtccttgcggaagggccctacccagcatcctgggatgtaactgggaaggatgtgtctcattagcacctctgccccacctctggaataccagctccaagccaaacacgtcccctctgagcagctgctgtgccctgcccccgagtgctctatgttgaggatcctccgggcaggaatggtgggctggatgctgagccctctacagttgtccccatgtccctctcccaccagactccactccccagcagcagtgggcaacctcctctgattctgaaccacctcctgagcttacagaccattggaactcgatcccagttccctttaggagacagcaggctatcatagttccatggcctcaggacactgtacctgtaccacctccaaactcaacatcataaaaccaaaacgtgaaatcaacatccctcatctctttctgccaggtagctgggactgagctgggccctggggacatagagagaggccaagggccaggcgcgaactcagcttcctgagtcacttgggagcactgtcttctcactcatctctgcacagtgccattcctttcccacattggggcaacccttagattcagagatatccgggcttgaatcctgttttcaacgtttcctagctgtgtggtcatggtttgaacttcagtttcctccgattaaaggtggagctgatgtttcttaattcaggagtcgattttaggataaaaatacaaatacgtggcacagtcattatctctcttagatctgtttctccacatttcctggtgatccatttttattacatagagacaactagttgttttttagaactatttgttgaaaaacatatcttttccagcatcaatttacctcggcactgtttttgaaaatcaattgcccatgtatgtatgggtctatttctagactctattctgttccattgatctgtatgtctatccttatgctaatactacactgttttgtaaattagctatgtttcaagatcaaagtacttcttgagaccaggtaatgtaagtcccccaacctgtttcttctttctcaactttgtttggctgtctaggtcctttggtttgccatctaaatttaaaattcatcttgtcagtgtcctcaaaatttttattttggattttgattgggattacgttgactctatggatcagtttggggagaaatgtcaactaagcaatactgagttttccaagccttgaatgtagtatatctctttatttagatccttaatgtctctcagcagagtttctgagttattagtctcttatgtgttaaatttattaagtatattttggtgctcttggctaatcactgaagtggctgagattttactttacttgcagctaacaagttaaacaagtagtttcatgagtgctggcggaagacacgagacccctgggtcagagacaaaggactctatgatccatggcgtagcagatggaataagcttcaggtttatatcagttccccttcccgctaacttcctagtgctattgtagaacataaaatcatctatgctagaacataaaatcatgatctattctagaacataaaatgatcttctttgtagctttcccaaattataacctcatgtcccctacaggatcttatatacagtctgagtcaactgttctagaggctaaaaattacacaaaggactgaaattcagttttgctttagtatcaaatcattaaattagaactttggagataagttaaaatttgacttccaagttgtcaaatacagaaaggtaaagaaagtttcaaaatgatatggaaaagccagtatgtacacacttaaaaccttatgcctgtttatatttgttagaaaaaataagcctgttatttcatatagccatgttgttctaatttaataatatagatttcaaataaacatgggttggacatggtggctcatgcttgtaatcccagcactttggaaggccaaggctggaaggaggattgctggaggccaggagtcggagaccaccctggccaacatagtgagaccccgtctctaatgaaaataaataaagaaaagaacaaaagtgcagaacattactaaggtggaaatttggggggaaaatagtttacagttaatgaatgaaatgaaaaataagatgaattaaataatacatgtggatatttaggttttgataatcatggttccctctggagtgctataattagaatttatataccctaaagaagtattactgatgtacttagtacctatactaaaggtaaaatacacagagtgtggagtgactgtatgaaaggataacatgtgtacagatgtgaaaacatctccaagctatattatgaaagaagcaaccaaggtatcctatatttttgtggttttcaagctctatcgcatatgtcttttgataaaaggtgcattatggagaaagagcaaagcttaccttatatgggaataagtgtggtatttctaaaaggaagctcttctcttttattaagccatttgtagatttgaaagaggagagatgggagcccttgaaattccatagtcctgaatcagacgatgatctgaacctgtatctctctatctttactttaatgtaactagaatatgttgagcctggatccatggatgtattagtgcctgtggctgctgtaacaaattaccacaaacttgtaactcaaagcaacagaaagttattgtcttacagttctgggggacagaagtctgaaatcattttcgctgggctaaaatcaaggtgtcagcagggctgtattccttcttgaggctctggagaagaatccatttccttgcttttgccagcttctggaagttgcctggttccttgtctcatagccccatgtcactcccacctctgcttccatcatcgcattgctttctctgacctgcctatctccttcttgtaaagacccttgtgattattttaggcccacccaggtaatccaagataatctcctcatctcgacatccttaaattaatcacatctgcaaagtcccttttgccatagaaggtgacatatcacaggttctagggattaggacgcatggttccttggggaacattattgtgcgtagcacaggtgggtaaggtttagtaacctccaagcaacacctctcctccctgtcccagagaggcgtgcctaaaggctgagctagaaaaagtgtgcagtggtatgttctcaatcataagtgagagttgaacaatgagaacatgtggacacagggaggggaagatcacagggaggggaagatcacacgccggggcctgtcggcgggttggggggccaggggagggagagcatgaggacaaatacctaatgcatgtggggcttaaaacctagacgacaggttgatgggtgcagcaaaccaccatgtcacatgtatacctatgtaacaaacctgcacgttctgcacatgtatcccagaactaaaagtaaaattaaaaagaaaaagtgtgcagtgggagccaggagagctgccaatttatcaatgcattattttagcaaactctttatttggcttcatcccctatccccagccccaacacacacacacacacacacacacacacacacacacacacacacacacaacactcttaaatagacgtacacagaggcataagctggacagctcttcgtctggaaagttctaacaatctgaagattccatgacttgttgcatggtgtgttttgtttgttttcgagacagagtcttgctctgtcacccaggctggagtgcagtggtgccatcttggctcactgcaacctctgcctcccgggttcaagcaattttcctgcctcagcctcctgagtagctgggattacaggtgtgcaccaccacgcctgactaactttttgtctttttagtagagaccaggttttgccatgttggccaggctggtctcgaacccctgacctcaaatgatccacccaccttggcctcccaaagtgctggggaaaagcactttggggtaaattacaggcgtgagccaccacgcctggcctgcatggtgttttttacctttggcttcctgctcagttcacctggcccctccctcggggagcactagccagttcactttccacgtgggagctatgtttccccacccacaggtatgttcctgattcctgatctttggacttctctgatccactttttctttctttctttttcttttttttagacagagtttcactcttgttgcccaggctggagagcagtggcgggatctcagctcactgcaacctctgcctgccaggttcaaatgattctcctgcctcagcctcctgagtagttgggattacagttgtgcgtcaccacacccagctaatttttcatctttttttttttaatacagatggagttttgccatgttggccaggctggtcttgaactcctgacctcaagtgatctgcccacctcggcctcccaaagtgttgggattacaggcgtgagccaccacgcccagccagatccactttttctaactggccatttgtattagtctgttttcacgctgctgataaagacatacccaagactgggaagaaaaagaggtgtaattggatttacggttccatgtggctggggaggactcagaatcatggcgggaggtgaaaggcacttcttacatggtggtggaaagagaaaatgagagagatgcaaaaccagaaacccctgataaacccatcagacctcatgagacttattcactaccaccagaacgctatggggaaaccgcccccatgatctaaattatctcccaccgggttcctcccacaacatgtgcgaattatgggagtacaattcaagatgacatttgagtgggaacacagagccaaaccatatcaccatttgagctgttgttgatttttttttttttttgagatggagtcttgctttgtcgctaggctgtagtgcagtggcacgatctccactcactgcaacctctgcctcccgggttcaagtggcacgatctccactcactgcaacctctgcctcccgggttcaagtgattctcctgcctcagcctcccaagtggctaggatgacacgcatgcattaccacacctggctaaatttttaacttttcttagagatggtggtctcgctgtgttacccaggctggtcttgaactcctggcctcaagcagccttcctgcctcggcctcccaaagtgctgggattacaggtgtgagccactgcacccaggctgttgtggattttaatttgttttgttttgttttctgattttgtattttctcttccttctattcttttctcttcagatgtattcatcgagtacaatttgtgctgagtcatatcacctatttatattttaattttactattagttttgggaagtcttaattatttttcattcaggaaattgtacagtcatctgtttccattcatagcccgtccccttctccaaagagaacgtctgataacaagtttttggctactgtgtaatatgatatttttctatgtaagtgcatgcacatgtaaacaaagtaaaacatcatattaatcacatagacagcaagtgtatttcagcttaaagggtccatagtaagccttactttttttttttttttttttttttttggagacagagccttgctttgtcacccaggctggagttcagtggtgggatcttggctcactgcaacctccacctcccaggttcaagcaattctcgtgcgtcagcctcccaagtagctaggtttacaggcatccaccaccatgcccagctaatttttgtatttttagtagagacagggttttgccatgctggccaggctgagtgttggccaggctgatctcgaactcctggcctcaagcaatccgcccaccttggcctcccaaagtgctgggattacaggcgtgagctaccgcgcccagccagccttactttttattttgaaataattatagattgacaagcaattgcaaaaccagtacagagaagtcccaagaacccagttttctctgatggttgcatcttacataactataggacggatcctccagctgcagttgccctctagccaaagacccaccaagagtacacctctagttgaataagttgcatttattactcattgcagtgagggagagcacgcaccatggggcatctcagaaagtgtgtgttaggaagaacctagtataggatttgggttttggttgggtgacttgggggaggtcgaagggagtgggattcacactagatgaattgcatctgctgtcagaaggcagaggcaagtctataactgtgtagcttgagtcctatctctagggagaggaggctggcattgggggctaaagctgtgactggtaaagtagcagcagtcactgctttcagccaagagagggtgatgattggtattttgtgggtggcacagtgaccttgtctttatgggttacttcaacaaaaattaggtagtgaccttgttttgtctcacttcatcatggcctcagagtaaccttgtctgaggttgtgtcttttgcgattatgtctaaaaggagaataacgtggtatagccgtgaatgccaagccagcttcccgatgtcaggggcttttattccagatctttcgtgtacattggtaccatgcctgcgtatagttctctgccatttcatcatgtatgtagatttgagtaaccaccactgcaatcagcatccaggactattccatcaccacgaagatgtcgcttgtgctccccctttaacatcacatccacctgcctgccccaccaccatccctaacccctggcaaccactaatccgttttccatctctattgctttatccctttgagaatgccacgtacatggaatcatacactatgtgaccttttgatactggctttcctcgctcagcataatgcccaggagatccatccaagttgtcgtgtgtatcaatagtgtgtttcttttttagggctaagtagtattccatactgtgtgtatttgttttctatgactgctgtaacaagttaaaacttagcggcttaaacaacacaggtttttaatcttacaaccctgcaagccctctggcatgggtcttgccagaccaaaatcaaggtgtcagcaggctgcgttcttttctaaaggctctagggaaaaacccatttcattgctaattccttgctaggggaattcaattccaagtggttgtaagactaaggtttctgttttcttgctggctatcagctgagggctgttcccagtttctagatcaaggccatccacattccttggctcgtgaccacctctgtctgtgtcaaagctggcaacagcagatggagttcctctcaggcttagaatttctcctgcctctttcctcatcacatttctctgactcaccttcttgcttccctcttccacatttaagaatgcatatcatttggccgggcacagtgggtcacggctgtgatccaagcactttgggaggccgaggctggcggatcacttgaagtcaggagttcaggaccagcctagccaaaatggtgaagccccatctctactaaaaatacaaaaattaggccgggcgtggtggctgaggcctgtaatccaagcactttgggaggccgaggcaggaggatcgcgaggtcaagagatcgagaccatcctggccaacatggtgaaaccccgtctctactaaaaatacaaaaattagctgagcatggtggcacacacctgtagtcccagctactcgggatgctgaggcaggagaaccgcttgaacctgggaggtggtgattgcagtgagccgagatcgtgccactgcactgcagcctggcaacagagtgagactccgtctaaaaaaaacaaaaaacaaaacaaaacaaagaacaaaaattagccgggcatggtggtgcatgcctgtaatcccagctactcagaaggctgaggcaagagaattgcttgaacccaggaggcgaaggttgcagtgagctgagattgcaccactgcattccagcctgggcgactgacctagactccatctcaaaacaacaacaacaacaaattcttatcattagattattctcacctcgataattcaggatgatttcccatctcaaaatccttaacctcaaccacatctgccaagttccttttgccatgtaaggcaacatattcacaggttctgggaattaagagtgtggacttctttgggggaccatcattctgccttactcattctggatgtaacacagtttgtttaaccattcatctatagaaggatgtttggttgtttccagttttggggctattaaaaataaaggtgctgtgaacattcttgtaaaaaaaaatggtatataagtggattacacaccatttccttttgcaactgatttttttcactcgacatcatatttctgagttgtattcatgttgatctctatagctctaggtcctttgtagtgccattgtgttccatgtgaatagtgtcctcccttccttgctgtgtaatgttctattgaatgactgttcccctattggtggacatttaggttgcttctaactttttgctgctacaaagagtgctgcggtcagtatctttgtgcagatctccacgtgtgcaggatgaagcagttttcttgactggatgagtaggagggaaggttctggccctagcacatatgtgttgtcggttcctactggctattgtgtaattgttcttcaagcccttttcactccatcagcagtgatgaaagtgttctgtgcatctctgccaacatttggagtcgcagttctttttaatttctagactggtttctttttcatttcttttacttagtttcttttaaattctggactggtctaggacctttccaaaaggtatgaaatggcatctgagacttttaatttgcattttcccgatcactgccgaggacacagggacaccccagtccagcacctccttgttctacactcttgctgacttcttttctcctgacgttagcgttaagaggttgctgcctctacctgcctttaagtattaagatctgggcgatgcaacccgacaactgaaatttggtgtcttgtctgaaattacaggatgttcctcaggccgccgtgtttccatgggaacaagtaacagtcatccttcatgattaggtggtaaccatggcaaccaagccagcagcatttgaatgaaactgattttattttatttattttttgcaaacacatgaaggttaaaatgcatttctccagctgtggcttccaagaataggaagacagcctggtaaatggagaccctttccacctcctagaggaaaggggatccaggatcagctggtcccatggcctaattttgcagactaggtgaccgagaggtcacatagaagtcatgcaatgagtttgagccgaggaggaaagactgctggatcatgctcgaaggtctggggcgcactcttaagagatcggctgggtctcccttcccgtgatctaaccctaggaatgccactttcatactgtgtgatcttagcagattcacttcacctctctgggtttctactggcaccagctgtggtgctagacctatgggaccatgaggccaggcctcccagtgtctgtttgcccaaattagaaaagatttgctgcaaaatgaaaggccaaaggcagcatgctggggcctaggaccccgaggctgaatccccagggtccagagttagaactcagggtcagttccctgccttcttttcctgtgtaaaataatagagggtgtgtgtgtgtttttacttggttccaaggactggagatgaccactgctcttactccctgactcattggattgatgaaatcagctcagagagagaaaggggcagccatggagtcacacagcagagtcagggttgaatccaggctcctggtgtcagcttggctcctcacccaaccccatgctccatgtcccctccatcttctctggggctggaagtgtgggtttgggggcagtttaagggactttcggcatatactcttgcttcttccctggaggacttttagaggtagtcacttttgcttctcagaacttcagtttctccatctggaaaatggaactcactatagagctgcccaggttgtcctgtgggattacatttgaaagggtccagaacatgcattctcagcaggggcgagattgcccctaagtgggcaaaaagttggttcttgggctagaagatgaaaaaaaacctttctgtacaaagcccagtatacacacagtacataaaagatactgtatgtctgtgatattaaaattttatggaggggaaattaggaaaaaagtgtctaagaagacttttaagggagagcgacaatgaaaaaacattgagaaacgtgggtccagaacccagcgatccatgtcttcattaactttgtgtttagagcttacggcaggtggctggctccgtggggaaggtgtgtggggtgtcaggtcaggagagagcctggcctggcccagactctgccctcgatgttcagtgtgaccacgggcacatcacagctcctctcagggcctggtttccccatctgtgggtaaaggaggtcccatcagctccatgggtgactcccaggcagttgagctcccacctggtggatcagttcagggtctggagaaaagcaggtggtgcctcagactatggtgattagaggagcgtttaatagaggggctgcttatgaaggcgtgggcaggcctcgggaaccacggggcagtgcaggaccccaaagctagggacagcgggggctgcttccctgaggccccatggaggaggggagagcgtggttgctgggaggcaaaggtccagaagatagggtcatcccgatggtggctgggaccttccgtggaggaggcaggcagcccagatgactctccctcctcccctcatctcttgccagggttcctctttggccaaaccacatggaagttgagggtctagaagctcagatcataaagtctatacaggccagtgccctggagcagaaggcagtgcacagagacgtggagaatggaactaggggccacacaggagatacctgggaaggtgccccaggtttccctccagtttcgtatggagtgcaggccttgccctgggtgtgggctgggagactggagaggtcagggaggagagccagccgccctgtgcaggagggagagtgggcccctatcctccggccacctgggatccttgcggccttcctagcttctcaggtggaggggtgtagccagggcttctgaatggaagttaaagacttctgggagcactctttgctatagacctgttgttgagggatcacacacacatttctttgcttctggtctcagcttcatcatctgtcgaatgggagattggaccaagcaacctctgagagcttcctggcccagacccaggaggcaagaggcaggattctgggcatcagtgttggtctcagtggaaagacatcctcaccgggcacccagtgttctaccagggcactccatgcacctcttgcctggagtggtgagggcccacctacccaggaaagtgtaaagctgtggccagggtggtgtgtgtgtgtgtgtgtggtgtgtgtgtgtgtatgtgtcaggagagggagggtagttcctggaagctccagctgcttttgtcctggtgatcccaagacccctgtggggcagcctgactctgccaaccaggttccataactgcagtgggtaccccgtgtttgttggtttgatggaggcatcttgactaagcactgcagggtgcctggctctgggtgggggtgggaaacagacaacccatcttcctgctgagtcgccaagtagcaagtctgcagggctgactgatgtgcggggttgtgagtcatccttcctaaagtgatctgggcgcccccagcattgccccagagctcaaaggatgacagttcccgcaggaggccattccagggaagagaattctagggagggggagagcataggtaaaggtgtggaggtgggacattcctgcatcgtggcaggtacagcaaagagggttagcaagaacagaagccagagagtgtgtgaggtagaatggctttcggtgccaaggtgaggagtcccttctttctgagggcattgagggcattagaagcagtcgggcttagggtcctgactgtgcctggcactgcccatctcccacttctaccgctttccctagaaaggtggctgaacccgggggtctgcctctggctaaggtttgcatcctgagactaagccctgagtacctcctatgcgttggccccttggctgggtgttgggacccatgggacttaaggctgaaggagccatggactcggtccagacacactggaccctcattcctgttgtggtgctcagtagccctgtgaccttgggctggtgactgcaccctgagcctcagcttctgctctggtcattggtagcttggctgagtatagcagatgggacacaggttatgggtgacagcctcccagagggaggtggcatgtgctgtcacagaggacaggagggtgctccaggtgggtggtgcgaaggggtgagagatgaaggcagacaggaaagcatgggaagaattttcctagcaaaacctccagaaagagtggttatcccctgactgtgactagagagattgtggaggaggaggtccaaggaaagttctaagcaggaagcaccgtgcgggaacagcaagggccttaagagacggcgccaggctgaggatgagccatgtgggaagggagcttttctggaagaggcgcctggggctggatggtctggacctggtgtcaatgcctgccccaggcctgcctggaggtcagcgggcctgaaccagtctcaggacagctttgcctgcttggccatgagccaaggctcaggatgaagcctgtgcttctgtggactcctgtccatgtgactgtgtggagggaatggcctggaaagcacacagtgccccagcatcctgttctgccttctggaaagcctgctccttgtgtgaaccccatgtcatctgtcctgtgtgtgtgtgcgcacgtcccctgctcagtaggtacctggggtgggtctgggagtgtacacattggagtatctgcatgaatataaacatgcacatgtgtttgtctgggcattaccgtctcactccacacccctgtgtgttcacacctaccagggaaacctctgccctgtccttcttctcccttgcgagtcaacaggtctttcccaggcaccccccacgcaccaggctccatgcagggtgctggggaggtggagatgcaaccagcttaggcgtaggtgttaggagttctgcagacgcacacacacacacacactcacacacacacgcacacacactgcaaatgagagcgttgataggagactcaggtctagttattgctgtaggagccaaaagcgaggcaagagctggaagtagagggggtcacccaggacctcctccagggcctgcaggatggaccaggctggggaaggggagcaggaagggagtcctctgttgggggccacctctggagcaatggcaaagaggcagctggtgccacgctgttgtgggggaaccagtgaggaaagtggccaggttggcaggttggacagactcaggaggttttatgtaggtgtgctaaggccatgactaaaagttttcaatgagctgtcaccatttaagagtcagaatacttcatattttgaaaaacccagattatcagcctctcttgaaccatggcagctatggctgccctgagcccctccttgtgatgtagcagtaaccaattagcgccgagtggctggctgctttcctagattctggatttcctgctggcctctgtaggcctcccaagtttaaagcctctggaaaataactggaagccagaagtcacagattctcatgtttgaaaaaacgtgggggctgacatagtggctgagccctgtaatcccagcactttgggaggccaaggtgggaggatcgcttgaggccaggagtttgagaccagcttgggcaacaaaggaaacccccatctctacaattttttttaaaaaaattagataggtgtgttggggtgtgcctgtggtcccagctacttgggaggctgaggcaggaggattgctcgagcctaggagttctaggctggttgagtatgattgcatcactgcactccagcctgagcgaaagagtgagaccctgactctaaaacaaacagaaaacttgagaagtcatccaagctccccaagtgtggcatcccaggagatggctcagttatctgtctgcttatatgcctccagtgacagggagcccactacattacaaggagtgggggttttggggaacctttccccccgcttttttttgagacagagtctcactctgctgcccaggctggagtgcagtggcacgatcttgggtcactgcaactttcgcctcccgggttcaagtgattctcccacctcagcctcccgagtagctaggactacaggcacacaacaccacacctggctaatttttgtattgtcagtagagacagggtttcaccatgttgaccaggctggtttcgaactcctgacctcaggtgatcctcccgcctcggccttccaaagtgctgggatcacaggtgtgagccactgtgccaggcctttttcccccctttttaaaaaattgcgataaaatatgtaaaacataaaagttatcattttaactagttttaagtgtacaattcagtggcatgaagtccatttgtaatgttctgcaaccatcaccactatccattcctaaaactcttcatcaccctttacagaaactctgtaccattaagcaataactccttgttcccctctctcatcagcctctgctaacttcaaatctgctttctgtctctacgaattggcctcttctagatagttcatataaatgggatcatacaaaatatgtccttttgggttactcagcgtaatgttttcaaggtccatccacattacagcttaaatcagaacttcattcctttttagagcagaatggtattcctttgcatgtcagtaccatgtgtgtgtgtccattcttctgctgatggacccttgggtttccaccatttggctgttgtgaacatttgcatacaggtatttgagtacttgttttcaattattttgggttatacccaggagtggaattgctgggtcatgtggtacttgtatttttaatttttggaggaactgccagacttttccatagtgcctggaccattttctagggaccggtttgtctgttgtcctgactgggatgggagtggcaggaggccctagctgtgtggccttggctgttcttgttcaacctctctctcctcctctgttggcagagtcgcctcaagaaaggccgggctctcggcgcagcctgcctggcagcctttccgagaagagccccagcatggagccctcggccgccacgccgttccgggtcacggtaactatctctgcgtcaccaacaccgccactgccaccaccatcaccacctcgcccggggtgctgctctgtgaccccacggccccccttcctggagcctcatggacccggagagcatccggcctcccttgctctaggtatccgatccctcagctgctcccatctccgtggctcagccctggtcccgggggccacatggggggtcccatcctgagagggagggggcaggtggaggacagacagcaccgaaggctatggggcccagcgctgagctggcccggaaagagaagaggctcttgttagtttagataaatgtacccttgagggcgcacacacactgtgcttctgcaaccccgaaaagatgcactatttttgtttccatatattttaacacctctcatggcataccataatttaaatctttcttggtggtacataaaataatgctatatattataactgatgatggcttagaaccgacaaaacacagaatatatatcatagctattgaactgagtggtccccacaagcacacagactttttaaaaattacaaacctaaacaactttatggaaacagaacccaatgacccttaacgtctgactgttcatacccttctgcatttgtgcatgtacacacacacacacacacacacacacacacacacacacaccagagttctgggtcccttcactccctcgttcaggagcattactgtgtgtacctctctccagggctgtgccaggcaccagaaacgcagcgatgacatagacacattcctttctccacggagctcaggtctgtaggtcaggtggatgttggatggtttgttcatccattcattcactcatcagttattctggcatgcctgctgtgtgcaagcagaggaaagaaggttctgggtggcaggaacagagagtgtgcaggcctggctgtcactggatagcatcatataggggctccaggggagctggaagtgattggctattcacagtgggttgggagggggtcccacgggagctggcttttgagctgcatcttgaagggtccgtagaaaatggctaggcaaggacagagagagagagagagggacttccggggagggagaacagcagttgcaaaggtatggaggcaccctagaaatttcctctgcttgccatagggctggctcctcatcccttgggcatcagctcagatatcagctcctgaccacaccacctcaaggaagccctcttgcttttccgccatcacagcagcctgctcttctgtttcctaatacttagtgtcagcatgagaatgtgagctcataaggtcaggggctgatgtgtttgtggcatgcagaactgcttggtggagctggagttgaggggatctggaggacagtgtaggaggtgaggctgggaggcctggccgagtcaaggtcacgtggaacctccagtaccaggccaaagggatggggctttccccagggccactgattctctccactgccagtatgttataaaaatgccttaaaaactagcttattgtccttctttaagatttcagtccactgggccagggcagggcctgggaacctgcattttaacaagctttccccaggaggtgattctgagtccccagctgggggttgagcccatgggcaatgaggaggaagcctgcgctgagacgattcagggtcatggccctgagtttggccagggggtctcaggaagctggtctccagcctgcagggagcgcttggaggctgggacaagggtgacccccatcagctggagcgaagaccaagttctgatctctctggatccctggggccacagcaggcagggtgggccttcagggggaccctagggaacgatgactaataataattagtaatagtagccacctccattgatgaagtgcctactgtgtgccaggcactgggctcactgtcctacatccctgatctcttttttttttctttttttttttttttttgagacagaatcttgctttgtcgcccaggctggagtgcagtggtgtgatcttggctcactgcaacctctgcctcccgggttcaaatagttctcccacctcagccccccgagtagctgggattacaggagcctgccaccacccccagctattttttgtatttttagtagagacggggtttcaccatgttggccaggctagtcttgaactcctgacctcaggtgatcctaccacctcggcctctcaaagtgctgggattacaggcatgagccaccacgcccagcctacctgatctctcttcatccaggagacacacctacagctgaaacattggttaccccatttcccaggtgaggaaacaggttccgagaggtaaagtcacttgctgcccaagctccaactgctactaagtggcggaaccaagattcgaccccaggtctctgtgactccagggcatgaggcacacccatcctcaggctaggaggcggatccattgccccacacccccccagaaccccatcagcatcgcttttccggctatttccctttctgagttgctctaataggggtattatcacaccttaaagtttttataatttgcagctctttaagtgacagctaggatcagtgttttccctgtagtggtgtcttcattctgtctcccagggtagaaaccaccttcagtcagagccagccttgggaacctcgagctgcctgggactcaactcgcagtcccacctgcccggttagggtctgcaggatggagagcgtgttcaaggtggtcgttttgcccacttctcatggcaaccctctaggggaggcaccattagtgtgcccatttcacaggtgaggaaactgaggttcagaggtgaaattctttagctggtgtcactcagctcctgagtcaggactgccggacatctacgttttgtgtcctttcctgggcaccttggtccttaagagatgtgatttgagattctcttctgggctgggtgctgggagctgaggggactggagaactcagaggtggggatctgggttcaaatcccagatcttccatgacccatgtgatttcagtagccactgagcctctccgagccttgtgttcttgacagtaaaatctggaatgacagactttgcttggactgtggacttggtgaatgtggtcgcccaagtctgacccatggtaggtgcttcatggatgaaatccatcattaacatccaaatcgggtttccatttttggctgtaaaacatcagtaaagatctaggagggttggagtacaggcagaggacaaggtgtttgggggaaggtcagtggtgagcctggcctgggccttggggacagtccctcacacagaccctgtgcagggccagaagcaccctcctccctcccctagcccgtagcacacacttgctcacttacaggctcccaaaagctatgtcctcacgtgctcagctgacttttgctctgtgtagaccctcgagggaacccaggaaacatggttttgcctcggggaggcaggggagatgccacaggatgtactggaataactgccaccttcactgccatttcaaacccagatggcaggctgtcagcatctcttacaggggtgctccgcagggagaatcaatgagtcacggtgtaaggtctacaaggctcagcctgtccaccttctccatggaaactgaggcctgggaagggcttgtcagaggtcaccacccagctgacagcagttcaggagcctgggttgtttacaccatcacatgccacccctcctcattttgtgagtcagccgaggacctgcagccactctgtagggcattgaaggctcagtgctagtcctgcccctgcctcttgtagactgtatgaccctgggagagcctcagtttccccttttgtgaaatgtgggggatggactttgtaaggcagcgtacagttcaggcataaataggtgcttaaatgttctggtgcagtagctaagagaatgggctctagagagttccccgacccaggtttcaggccctgcacagcctcataccagctttgtggcttgctcaggagtggaacttttctgcctatctgggacaactccctccctcctatagggagagttggggggtaggggagtggctctccaggaccacacagtgctacgaggctggcatgtgccctgcaagttatagggggccctgaatgaggatgggggaaggggcctgggagtagatgaccagagaggcttcctgtgcatctgtggccatcagctctcaggctcctgagattcaaacccaggtctgtctgctctgtgccagtagtgtctcctggaagggaaggagggaagggtggcaggcagcaagctggggccctggatctgcatagaccaatggtcagactgggtctgggggctttgcatgtgcccacccagcttccccaggccctggaccccttagcagcaacagcatgctgttctttctctcctgccactccatggcagaggagccgtggtttgatttgggaggcaaagagctgatgactcttcctggtctccccacgagctccttagcctgctcccttccccagccccaaacttccctgttgcgggctgggtccttcctccctccctccttcctctgcccccacccccctcccatcaaccttgaggatggctggcaggcctggggtgtgggaggtggcagaggctcagggaaacttgacagccaattgattcctcctcgggaagttgaaagtggagagtcgtgtttgaaggtttagctgaaattaggtctcagggctattttttgcgagatggagaaggagaagtgtcagggaggggaaggcccaggggtctggcagaaactgcagataaactcaacattgggttgattatggatgcttctaggagcaggtctttggtttctttcaacaactcacttttattggtgcttggttgtgcacaccctgcataggatgctgtgacagaacaaggaacagttatctctggccaggaaggacagggaagaattcttaaagaagggactcttggggctgggctttgaggagtgtataggagttcgtcaggaaccaagggagaagagtatttcagttagtgaagtgaatagaaggaaacaagctaatggccctgtgtgattggagtgctggatgggttcagggcctggagagaagagtgagagaccttggtgggtgagctaaagcctttggactttcccctgcaggatacaagaaccacagtggatgatggctgtgagtggagctagcagtagacctctgagctgtggacctcaggttttccagctgctcaccccttttctcactcctgtagcctccctgcaccctccccatgtttcagctgtctttctgtcacacaaactcaagaaacaggcatgtgaacacaaacatgcaagctagtgggtgaccctcccgcccatgtcaccatggaaaggctgttggaaattaactggttcaacccttccctatacagaggagggactgagaatcatagacgggagggtcctttcctgaggtcacacagcatgtctagggtagggcctggagttgagcccaggtctctgtccctctcccccgcatccagtggtcctcaccccttactccttcctgtcctctcctcccagcacctggatatcagccaccccgtctgagctgagcccttctcccagcccccatcacatttcctgggaggaatgggtgttctttggtccaactgccctcggagccccacgacagctccttcccgctcatctgcacactgccccctcctggccaccaggccccagccccagctgtagagggacccgaagtttgggctgcgggctgcctgaaggaggaatgcatgacttcaggtccaggagggggcattctctgctccctgcagagccggccccgctgccccccatttgtgccccttccaagctacggaggctccgggtggctgttggggtggggaacagaaaagccagccaggctcacagatcagacaagccagatctgtcccagggtatatggggaaactgaggcctggagaggagcagcttgcccaggatacttgctggggctccctccactggcccaggctgctgtgggtccatctcagatggtcgttcacttgggacatatttatgtttgtggcccatcaaccagtggagggatgtcagccacgtggtcctggctgtaacagggcggtagtgctggacccctgggtggggtcccaccatgggcgccccagttttctccttgaagtatgaggaatttgcttagttctgctctgtgagtcagtctcctgacccagcatccggcgtgtattcagcggatgggcggggtggtggaagagcaaaccctgccccctccgccccctccaccctcactccctccatccctgcccttcacggaggctgattggtattaaactattcaaacccaaaaggaacattaccgtcattttggtctgtgtctgccttccgcggggggcatcccccttttctgcagagggagtgttggaaggtgggactcaggagttgtccggggtggccagggtggggcaaggatgttcttcggggcaggagtctggggacagggggtcttggagcctcctgaatccaagaccaggctagtctgaggcctgggacagaggtgggactgctgcagtattggtagggttgggaggctgtcgccccaccccattaatacacaggaaggtggtttcatcagctccattttacagttgaggatcccaggcttagggaggagagaggcctggcctcagcaggtctccagctggtgggtggtaggggcaggagcccagctctcgtctgcgagccttgctgcggtgtgaacgaacttactttcttctctccttttgcctttctttattctttctttcgataaatttgccatcatcaccaactatgtgtcagggcctatgccagtcattgaggatacaaagaggatgaaaacgtagttgctacctgcagaaatacagaagggccagccggggcttggtgaagtaatttccaggcaggtgaaggggaaaggacattccaggcaaaggccaggacatgggaaacagcatgagcaaatgacagcaggaactgagcgcagtttgggggctgaaatgtgaggaagtggctggaatggaagcgacaagagatccacggcagtgaacagagcagatgggatctaaggccatattaacaggagtatgaggtcctcagcaagggaggtgaggtgggccagagtaggccagagcagacatggagtgcagcatacttgaccaggctaggagagtctggagctccttcagtgggcagagaccaagactgggtggggatccagcatggggttggggggacaagcaaattgcttttctcaagcaggttctcaggagcctgttccaacccccccaacatctgtgctcagaatgcccttgggcaggggtagggggaagagcccacttcaaggatccctggaatcttctgcctcatcctggcaagtggcagctggcttgggcagtgtgagtgaggaggatggaagtgaagggaacaagccagcctctgtaccccctcctcttcctgccctggggacttccaaatacatcagaaggccatccctgtaaattccatttccccagccctgcacttaagcctgttgggcagcatggaatcagatgaactggttcccgttaaggtgtaaaggccaccaccccagtccctgccaggttcagtaactggcgagtggaatgctctctgtgggggcctttcttcctctcttcacacccactcagggtcttggggtacagtgctggcctctcccagggatagtccccccaacccagggatgaagcaggattagaatcttggccactgctcccttctgtaggatggctcaggcaagttgccccactctctttccctgtctgtaaatgggcaggaacccctccccacagagtggctgtgagggctcagtgcctggcacaaggcagcattccccacacctgttccctttgcttgtgtgaggggtgcacctccaccccacatttcctccagagccccaggtaactgggcagacccctcccacttccatacccttccgtcacggccccaaagcaacatcacccctgactgaacttctagggctcagccctggcagtagaaggtggagaggggctggaggggttcctaggggaccagagaccaagttcttaggtggtgagttcagatggagatggaggtgtctgcgcagggtggtttcctgccagttgggggcagcagagggtagcaagtggacttctgggtggctcctcccagtgagtgttgaagtcccaggggtttgtgtgtcaggggccacagggagctggcccaacaaggtgttagctggctaaacaaggtgtagaacatactgctgggggctgggagcagctcagatccgggagcacctgtcaatggctgggcctggcatgactggctgtgccagctgggcctaggttgaccagaaagccaggggttctgaaaggggaccctggtcagggacactggatggaacaaggtctggggctgggacagctgtccaccaagagaaagggcacagggtgaggtggaccagcatgtgatctgtcaggcagggctgctgcactgtggtcaccaggctggggccaacagacactcagtcactgccaccctttgatgggttataggcacctgttccacctaccactgctttgagagggggtaaggcgggcattgtgggagaggcagggtggtggtcagagcttgcactccaagtcccactggcctgggttcgaatcccagctctaccacctctgctgtctgtacgatgggggattttgaatcctgttctgcatagtactctgagtcaggccctgtgctgagcactttctaagtattgtctcatttaatccttacaactcgaggctcagataacacaaatctcactcatagaaggtgacaaaatcaaggcagatggggagtgaagagatagctgagggtggctcctctcatgggcctggatcttgaagttctcacagcgcctggaccatagcatgcagcccagtctttgctagtcagtgctgtttttctcttcatcttacggacgaggatgttgaggcccagagaggggaggtgcattgtcctgggccacacggcttgcagggacagagctgagatttggacccaggcctccccatctctctgccttatcttgtcctgcccctactttgagcaggcctggccctaggggtcagacacccctgggataggagagaactgctctcctcttgtcatcctgccctgtggccctgcaggtcctcccctttcctgggaggtgggggagcctgcatgtcaggggcaaggctcagacgccttcattttcccacctcctcatgctacaaaaatgaaacgatcaagtggtattttggtgggattacagacataattatatctgagttgtcaagcggcaattgttgtttccaaagccaggaggccctctgtggaggtggcagcagtgacatctgtttctaacacaaggctctgcatcgggatgagtaacttctcctgtggaattgcttaaagaacgtctaaaacgagctgagcttgttactcccctgctccagcaccttagatggctcccagcagggtgggggatccagctccccggcctggcattcaagccccccaggctgtcccagcttccacgcctttgtgtgggcggatccttctacccacaattcctccccatctctctctgtctccagagctcactagtgccatccagggctctgtccaggttgcagaacaccccatctgtacacgctccctcacggactctgtgacttcatgatccatcacttctgtctctcccaccagacggtggtcaccttctcaaggacagggactgtttctgatttgtctgaactcccagcactggggcaaggactcacctgtggcaggctcatgaggggcttgcggaatgaaggtgcacgagacagagagagacagggagtaaacgaattaaatggagtaagcgcagggtgagcagggaagagggtgagccgtgacctctccacttctgccagcccccacacttctgccagcccccacactgggtgtctgaggccagagtggtcccctgccttgggaggacaggtcaagacaagtgacccagcccaccagaggccagcaaggacaccagcccttgccttgaaaagtgccggacgtggtggctcatgcctgtaatcccagcattttgggaggttgaggtgggtggatcacctgaggtcaggagttctagaccagcatggtcaacatggtgaaaccctgtctctattaaaaacacaaaaaattagccgggcgtggtagcgcatgcctgtaaccccagctactatggaggctgaggcaggagaatagcttgaacctgggaggtggaggttgcagcgagctgagatcgcgccactacactctagcctgggtggcagagtgaaattccatctaaaaaaaaaaaaaaaagaaactgaccttgactccaccccatacccatgggccttctgaggccaggactcccaggtgaaccttggcccgcagatggtaaatcacccaggagaaatagcctataaaatcctctcctaaaatggtgcattttgtattctgtagtgaaaagggcttttaaaagcactgcttactcaggtggatttatggagtttcccccacccctccctcccactagtgtttactggtcctcagtcctggagctccctggggtcctgttttttccttggtggctcttggtccagggagagaaacaagatagcatctctttcctgccttgctgccttggggccccccgggccagctgggtgcctggaagtgcaggggaatcctacccaacagaagctccctgtggcccagcgcaaacctgaaagtcccaccattagtgcccatttgtccccgggagactccccccccatgtgttgtcacctgcaaatgggtcaccagggaggcacaacaaagctggaaagaattcagagatcagctagactaatccccgcattgtacagcagggaaactgagtcacagagcagcttaggtgctggctcaacgcctcagtctggtaatggaattacatgagagctttagctctggagcagcctgtctgctgtgttgaacccagctctgccgcttcctgaccgtgcggtgctgtgcaaattagttgccctttctgaacttctgttctcccatctgcacactgggttgtgagaattaaagagaagtcatgggaagctctaatacagtgcctgaagcttagacagggcttactaaacacatctgactaattctcagcagcgtgttggaagagccctcattagtattaatagcagagctgggttttgaccccagacttatagactccaaacgtggttttcttgccactcatgcagtgcacagagcacaggataggggagttttgctggggaatgagcactaaagtcagcaagccccgggaggactggctgggacctcagtgataggacgtgcaggcaggcggagatagtatagaccctgctgcaggggtgtaacctcctggtggaatcggcttccttgcagccacgaggccctgggtatccaactccccaccccttagccagggctggctgagagcttaaagagctgatgaggtgtttgtagccatccagacctctgggacaggcttattatgctaaggcaagtgtcagctggaggatctatgggacaatgagtcactccctggctgctctgggttgtcacatcccaagctgagaccttgggaatgcgtaactggtttctgttcgctgatgcccgcctaatcctgggcactggcaggtaccaggagggctctgctgacgtcctcagctcccctcccagcttcacctttaccctcttcaaatctgggctcccctctttttcctccgttagactctcagtgttccttagggttcccctttacttgggtgtcctctgccctggggaagggattacaagcccaggctcaggtggtggtgtataacttggaggctggagggacctgtgataactccaggggcctcccagggcagccagactccccgctgtcctacctctacacctctgcttatgctgtgagtctgcctggaatgcctttatgtggctatcctgccccagccaatctcagcaagcccacctgctgtcccaccttcaatgtttctaaaatgctgtcaaaagctgcctcctccagcaagtctgcccagattgctcccaagtgaaatccttttaaaaagccccacagagcactttatctttttccttttatatcattaaatatttgtgaattcattcaagaaatattgagagaatacctgccaggcgtccagcactggagacccaggttgccatggcccctgctctggaggctttacagtccagtatggggtgggggaggcactaaacaaacacacttataattacaactgtggtaagtctacagggagacctggcctagtgtggggacatccggggaggcctctaagagaaagactgaggaggtacctgaagggtgtggagagtcttccttcccaggcaggaggaacagcccaggcccttctggctaacggctgggctggtctctggtggtcaaaggaagtgatagcagtgagccgagatcgcgccactgcactccagcctgaggacagtgagagactccatgtcaaaaaaaaaaaaaaaaactatgaccatgaaagtgatcatgaccgcaatgatagcagttcgtatttattgtatgcagggaaatgggctaagtttcttccatgcgtgatctcattgaatcttcacaactacctcgtccccattttacagaagaggacacaggcatagaaggttaagtcatgagcccaaggccccagagccattaagtggtggaatcccctgctcccaccttcttccggaggaaggatgaaaattatttacattttacctggggattcctagagattgaattacccttaggacctaaagaggtgtgtcaaacagtggaatttcagctgtactgatgggcaggagaaatgtttagggcaggaagcttcagctcttgccagggaacagaactccaaaagtcacaggttctgggagctgtaagctgtaaaaacgagctttgagtgtgagagaagcaaacaaattgtccaaagtgaagccctgcgagaaaagcagggggagttatcttggaagccgttaagagctgttttcttgccttggtcctgagatctgggctcctaactctggagcttcctgggccacttgcccttcctgtcctggttgtgaatgtgagcacgtgagggccagcgtgtttagcttgtgtgtctgcacaattctgctggtgcctgatgatagctgagtacatgtgtatatttattggcttatttcagtgtatttgtatgttagcttgtatgtttcatggctgtgtatgtgtgtattcgtgtgtgtgctgatcaatgtgtatgtgtttgtgtgtgtctgtatgtgtggtggcactggggtacttgtatgcttacacatacatttctttgtgggatgcctttcctgtgtgcatttgtatgcatgcctgtccttgaacttgtgtatgtttctggccctgtatatttctctatgagaacatgtttaagtgtgtctttccaggcagtattttaactcaacagtgaccctagagtgtcagggtccagcctcttcctggggcttccctgaaggctctcaaggcctatgaattggttttctttgtttgacttaagtagtctggctaccttctccaggcggaatatgtggcgatctcactggtatgagattgtagaggattctgtgggcatagggtggcctgtgagtaggtggccaccaggaagtcaccaacttaatcccagcttaaggtgcctcccctctttcgcctgtcacagtgtctgacattccattagtgagtcattctccagctgggactctctttgatggtgcatacccttgaggggaggaggccagagaagcccggcagcctgctgagggtagagaccggggaacagggaaggggagggcaggaggaatgacgcatctgaaggatttgggcaaagccagagaattccctgatgccattagtgcctagcttggggcggcccaggcaccctggccctggcagctgctctgactttatagaatcatcaaatatcagcgctggaaaggagcttggtgatcacccagtctagcccctagtgttgtagatgggaagactgtggcccagaaagaggaagtgtgggcagactgggaggttcttgaagcgtggatgctgaagatgcaaagagcactgggcaaggagcaggggacccaggttctaatggctccgcctggtgacgctgggcaggtcccactgccctctgggcctcagatgtctcctcagtgtcactggcctggctgccctctgtgggccctcctgactctcactctgtgactctggaagcaggacccccaccacccccagcccttttctagtgcccccaccagcctgccgcggtgtcaggtcggcctgccagctcatgcacccagcatctctcccctcctggagccgagagaggtggcaggatctggatgggatcttctcctccctttcctgtttatttagatgtgcttttggcattcgggcaaagccccagaaagatattgagagacatgcctgtcaaaacagtctcccttctccaaggctctctctttggggatgggccttagaaactgccatgggaggagccgggccttggcggagggagggcccacagggttctgcctccatcctgagtactgtcttggggttccccagtgggcagctgagagcttaacgggtgacaaagttctgccaggcccacatgcccatctgcagcagcccaggtcagtctgttgaaaggggagagggtgatgaagacaggcctggaggaagaatgcaaggacaaatagatgctgggcttgggggaaggaacccgcccttgattgagcacctactatgtgctaggcatgttgctcagtgcttcgtattcagttgagaagcagtgcctttgagaccattggtgacgtggggctcccgggtgtccaggtggcggtgctgaaatgcagatccctggttccctaggggctgcctcctcggctgggagtgtggcacagacaaggacagcactgggcaaggttcccctccctgggggtgggaagcctccaggtcttcactgggagcccctgtgggacagctctgcactcagggagtgagcgggcctccctttcttccctcccgccttggctttggtccttgaggcctagtacagtgcctggggctgagtgtggggaggatgatcagagctgtccatctgtttccctatatgggggagtccccacgctgcccatcccaggggccagaactctcttggttacagtcccagctctgccactttcagcaggtgacttaacttctctgagcctgcattcccccacccggaaatccaaaacatcctgaattctgaagctcttatcctcccaaggattcctgataacaggcattgggcgctcctaggcatcctctcctagggtgggagtgattcgtcagaacagaagcttgattgctggtaatatatcatcatcatcatgtggaattcattgaaatgagtgaatgaagaaatcacgtgtcttgaattctgaaaggcctttgagacagtcgttcaggaccttctggagaagcagcagggttgtgggccagatgtcaggatggtggtgtagctctactcctggggtagtagagctgcttaagaacttgggtccttccagccaaagaccccccaggcctctgacccccactcaaactgccctgtgctttgctcagtgatatgatggaagcctagggcctaggggatcagctggcataggaagggtgtccagatgggcaatgggccatccacagagaggggcgggggctacacagctatccacgcccagccgtcagggaatgagctgggggggtggcaccaggcagcagccttgtgcagcagccttgtgcaaaagccctggggccttggttgacctcagcgtcgtggcacagctgcctgacaagtagatggggacatgggctgctttaatagaggcagagtgccccatctggggagggagccgcgggtccctgcagactgtgtaggctgcttgctgagctttagacatcagtccttgctccagtgaatgaaagctgaggcctccacctgagcagccctgcctgccccgtgcactttgggcatcgggagtctcagtgaggttgctttaggaaaaaaaaaaagtgcttgtttaagagagttcaaaactaccaaactggatgacattctgcggctccagaatcattttgcaagcatgttcattcatgtccctgtccccctgccgggcggcccacagcctccttggagagcccagactgactcccacccttggttgtcatttatccatttgggcaaaaagaggtggtggtgctcagccaacatcagtattggttgcaataaacctactactctgtgtagttgcttaatagttactgtctttctggcgacattgtacctcatttcatccttcccaggtcccataaagtaggtatcatcatcagtttattttacacatagggacactgaggttcagagaggtccagtaatcggcccacagcttgtctgaatgaagatttgaggccaagcgatgtgagggggctagagctgcccagtgggaatggtcagcaagcgtgggctcctgtggtccagcgccatctgcaggagaagtgggatacagccaggccttagtgggtgtggctagggggtcatagtctgtccctaggcaagggagtgattatggggaccacctataatctttgcagatgagctaggcccgacacatgtcactacaaacggagtgtttttaacagtcctgtacatgtatatgggaattgcacatggcttttgttgagcacttactgtcggctacactctgagcctagagctttatcagtttttcgtttttgtttttgttttttgtttttttgagatggaatcttgttttgttgcccaggccgaagtgcagtggccaaacttggctcactgcagcctccacctcctgggttcatgcaattctcctgcctcagcctcccgagtagctgggattacaggctcgtgccaccacgcccggctaatttttgtatttttagtagagacggggttttgccatcttggccaggctggtcttgaactcctgacctcaggtgatccacccgcctcagcctcccaaagtgctgggattacaggcgtgagccaccatgcctggcaactttatccacttttatctgccaatttaatcctcactgcagccccccacccacttcagagagaggcaaggggccttagctgtcttctcttgcagtgaggggtctgtggagctgggtttgacttggttcttagccactgggctgtcagtgggctccactgcggtcccggaaagtgggtatcaagaaccctgtttgactgaatgatttgcccactgcccctcaattaaaggttgtcttgggtctagaataagagtttctgacttgaagaccagtcagcccctcttcccaagttaggggctgtagctgcctccagaaatcaagtcccaggagctgcctctgaagggacagcagaaaaggtttgcctcccttcatctggcgaagagggagaggacgcccttggccctccacccccatgaaggagagcaacaagctgtgtggctgggcagagcagagcagaggactggagtccacggtccttgattaaccttgctttgtgatcttggggaagggccttccctactctggtccccagtcaccctgtaatacagcctttgcatctgagtccccttctggcagtggctttccaagatgatgagtatttgttaagtctgtcatatgcagggtcctgagctgagttctctgggggacacaggtctctaggtggatgtgtgatgtgatcggtgggtgggtcaacgggaacactctctgttccctggaagaatctcttttcccatgatctgagctccctgacctcttgaatatccatatactgctcactccataatgttcatggctatcttggccactgtgtctagcacataatggctctcattaaggtgaaagagtgaatatgacagggtattaggagtccccaaggtcattgtcagtttgggtgggggagttaccattctgagtaggctttaaggaggaggctgcttgtcagaggaacattaagtagagtcacagggggtggagtggggaagaggaagtggcacatgtgcatcaaacctcctagacgggagaaaacttttttgtttaaactcagaaataggataaagccatcaatattgctccagaatgagctacataaattgtgaaacatgcttctttgttcttcatacctcaagattgcaaaaattgtgaaattttcatcagtgtagaaaataaaaaccaagaaaaggtacaagcccattgggataacttgcttgaccacaacccctgggagaagagaacccatccaaattagccaggtgcagccccctctcctatagctggcaagaggcagagtttgggagagctcagagctcacgcagaggtgcaggcctctgcctccatgccatgtgtcctggagagcctagtgctctcctgacctgccaccgtttggggtccctctgcattaagcattgccttgtctatgggtcatgcctctggagaagggtccctcctgcagcccctaatacctaagagatatttgtggcggctgattagaataccctgatggataattccaggctgcagaggtgagaggcatttggactccactgcctgggatggccttctggtgaggtatcatttcagctgggccttgaaggacacgcagaatcccaacaggtggccacaggggtatgtctcctgtggatatgaatggctgaggaaggaggaaaaggcagaaggagaaagataggaaaagggaaatcttgaaagctcttgaattagccaggcccggaagctgggtgtccttgggtaagtcactttacctgtctgagcaagcttcttcatttgcagcaaatgtttttctgtcattttctgtctgtgcgggtgacatgagatgacttgtacagcccatgtttgaccttgtcatgttgaagatggacagatacagcccagggcctgtgccaaacatccactgctcctcttgaacacagagagggctgccaaactgaccctttattttgtgatggatggaatgtggtatttggattatgtacattaacctcaaattaaattaatatcccacttgccacctggaattgagactggggtgggtgagcccccagaacacccccctctttagaggactccccctcctccagttttcctctccctcaagctgcctgtagtttccaagcccggcaggacacaggctgtgtcccctggggcccccacatctatcccgtcacctgtaaagggaagattggtttgacctgtgtgtattgaacgcctgtctcctctgtctctgccattagaccaggagctcttgggatgggggaggtgggggattaagctctgttttcagtcagtgcaacctgttaggtggataaatggcgtgaataaggttccccaaatcttgaagcttttaatggggatactcagcaaacccttcagcccctcgggcccctccctgagctgagcactagggatcccgtcccgcaaggtggttgtccttgctggggtacatacaacggttccggggaggggccccaccctgacatcaagctactgccgctctgggaaggaaagtcgcccggaatcggggtctaagtggccagggcactgccaggcgcaggccagccggcgcctcagccgaccacgcgcccgctctcatcggtaccaccgagggctggagagcagcgacctcgcagcggaggaaggcgctttgtcaatccccgacggggtgggggggcgtggattcctccaggtgggtgtggggggtgtgacctcgcacggggaggacaagctcggaggcggcagggaggtgagcggggcggccggccctggcggtccccgggggtctccgcccctccgcagccccgccccctcgtcccggtactccccctcgccccggcgcccggggggctcgggcagcctcggccgcggtcggcgcggctcggctcggcgtcgccaaggcaacagcggcttagggggcgggggcgacgtggcgggcggggtgggctgggccgcgctgcgcgggccgggccgtcggcgctcggtcggcgggcgggcggcgcgggccgcgagctgctggggccgagcccgagcccggcccgccctcggccgcgcggccgcccagcaagggtgcgggtcccgcgcgggtcccggcccgccgccgccgcgctaaccccgcctccccttccccctcttgtccccccgtgcgcagggcttcctcagccgccgcctcaagggctccatcaagcgcaccaagagccagcccaagctggaccgcaaccacagcttccgccacatcctgccggggttccggagcgccgccgccgccgccgcggacaatgagaggtgagcccgccgccgccgcccggtcccccgcgccgccgccccgggctgcgcccctgaggacgcggggacaaagcgcgagcccggcccggggcgagccacacggcggtggggggaccccacgccgcccgccgggaacttatggggccacctcggccggactagggggcccgaggggaggaccctgtgcctccctccggggttaggtgagtagaagagaggagagcagagggtgcccgcggcggcccgggcgaggccgggcgcgaagtcccctcgcagggaagtcctgcctcgcctgtccgaggtgggcattgtttcccgggccgtgcggtgcccgaaccggggacggaagtggggcctctgccgccaggacccatccccctgccttgggagcccctgggtatcagatacaaaaggcattttcggccgggtttggccgagaccgggcgctgcccgtggtgaggggaagggtgaacatctggaggggaggagcagggggctgggccacttagggggcacatctgctctaagtagggcgcgtgctccactgggggctggcgctagcagagcgggcagtgcccaggccctgagctgggggcacagcctgaggctggggagccagggccatctcctctccagcctaggcagctgcttctctccttccctcacctctccactctcaggggtgtctcctgctttctgtttccttctcctgggccagccgggagcaggtgtggaaattccgcggggaggtggctggtggggcagaaggggagagggaggaggaggtggttcaacctgccgggagacgctggccagggagcaggcttcagctcgcaagggcaagccatcctgtcctccagggggcactgggcggacacagcctctcagggcccaggtcctcctcgagtggtgccagccacaggcacctttccacttaggcacaggcatggtgatggattccagtgccagttagaacatgtccctgcccagcctgtggaggtgaaagtacgggcaggcaccgaggagccttttcagcattcagcccgaacgtctcagaccactggcatctgccttcgtagggctgtgtccgtgttggcactccctgtaggggaggcgtaggtagcatgaaaatgtctctcccctcccccttggttctagcgggcagaggagtacaagttacagcccaactcctgcccaaggttgagtgactgtttaactgacccctagcatcttcctggagagtaacacttccacctcccagtagaatggctagacgtttaatttccatcgtcccagagccgcgctctccagtgcatcctcaccactgcctgcagctggtttcctgccccagctgccaagcccagcctgaggcgggaccctcagcctttctctgatggccctggtgccccaggggaccaggcgtgccctggcaggaagatgcagccaggccagagctcagcgctgggtgcagtcactgcgtctttgaaaatctcgcttcccatctttgttattgtctgggcggcaggccacccggtttgctgccttcctccctccaccgggcccctgccttcggctgtcttccccaggaacatgcccttctccgcgctttccttggcgggggtcaggaccctctgcacccgcatgcgggggcttgtgtacgtaccccgttttgtgtgcatgtggtggttgtccggggagcaggagagacaacaggcagtccggcttctgagtgtgtctgctctcccgggagcaggcggcatgcatgtcatgtttacctccttacagcgggaagcctgtacctagaagccggcaagtgctggctggccaccctagccagaggtcggggcatggccaagacgacctcgtgcgggtcctgccccacttggcctcaggtcagccttgccacatgctgaaggggcgcagagtgggggttgggagtgaaactacaagcctgtttctggaaacagtaggaaacggtagcggttggagcagaatgtcactggcagcggtgtggaattgtcttattaattttctataaacaaaatatggcttggtggcctctctggcacaggaagggagcctagatttcccatggacaggcagaaagactgggtttgaaatctctctacccagccttggagctgaaataggctttcccaggactggggtctcctgatttgctgctttgcttaggaacagattcgtcggctgctgctgggatggatgggcagaaatttctctggggctgtccctggagtcatcctatttggagttcagtgagtaaaaacaactatggtgaccccgcccgccccccagctcatggccaaacctggatgagtggagcagtgcctctccctgctctgatgtggtgtggttgtgatgttgaaggctgggagggcaggatgggctgtctttggcttggtttagcagcaaggaagggttgtgtcctggctccatgggacccccactggctgccatgcctctggctggggagagggtaagtgccaagacgctagcctcagtgagtgggtgggacacgagtgggaaggacggtgggggcttctagggtgtcgagcgggagtcctggtccccatggccttcccgtgtagatgagcggcacagggcactctggggcggccacttgagttctgactttggatgaatctatctggtttatatggctgctgaagaggctttgttgaatgctgtctgcgtgctccgcaagctgctgtgttggggaggtggtttttttgcgctggaattctctcatctggaggttggaaaccagttggttctgtgctgggatttttttggctccctggaaaaggagtcggtttcaggggtggggatgccgaacctggctggttgggattgagggttgctatctggttgtgaggctggggtcaggccaggcagtgcttggttggcacagctgggctctgggggctgggggctgtaggacaggcttgagccttcggacttattcttctgaaacggcctcaggggaggttgccagctggtctccacagtctctgggtccctcagacactcatttcttcttcagaagctttggcagtaagcaccaaggacaggtgatcatttctcctgggtaacaaacacatgctgcttggagcgctttccaggtgaaaggtgtgccggcaaaagcattttcattttgcacactggaaatgctgctgcttcatttacagggctgttttaatgttggtaaaagtgatatagaggatgtggttctgtcagcccagaggataatttccaagtcattcatttatttattaatgttactgaggagctaggagggtcagttggcaatattatgctttcctcattccttctctctcctgatgctgtttctgggtgactctagccctccacacctgctgggaatatgcttcctttggcatgctacctgtctaaacttaccacagtagttactctaaagtgtctgtacccccatcaagctcttcccagtcatcctggtgcggagcttagctcataaatgcaggcagctctggggcaggtaggcaaggctgctatgtgtggagttagggatcgattcccccttccagagtatgtgtgtgctggctggcgttcccacacctgaaagttactaatggtggaattccaagtgataagggactagggaaggagatacagtacttggatgttggggatggcagcttccagggaccctcacctggacctgggtaggcaggaatcaattctgccccttgtggtgagacagtccctggaggagggagagtgaggaaggttgatgaggaacaggggaaatggaagttagggtctattttcctgctttagttgctgacagtaagtgcaggcaggactgggcacccaagtctggtgtttcttgcccttgttccctcccctactatagacagggagggcctggtcctttttttggggactagtctgtctagtgtggtgatgtcaagatgatagtgcagtttagacaattgccaggagtcatgggatgtatgtgatctttggatttgaagccaagcattcctggggcaagtcacgtaaccttttgcagcctcagtttgctcatctgcagaatgggcatcatgataatcatgttgttgaagacattaacattaatacatttagcacacttttcatagaaattttctggttcagtgctgttttcttagcatttaacactgggtcttgcacatttcttaaatgtttctaaaatttaattaaataatgtgtgaaagaggttagattaatatgtcataggttttcagttaatattggtagggttaagtcacctcgtcttggtaagcctcagttttctcatccacagtgtgggaataataagcaatcatgtggcctcatcctgaggttcaagagataatagatgttgctgtgcctggtaaggtgattcgagcttaagatgggtcattattgccttaaacttaagaaacagccattattacctagagcacaggatgttttcctagggattcctgcttacacctgggaaagcaaagctctcatgtgtgttttaataatcagttttaaaagttcattgttccatcttccgtttgggtcatacttgtttttaatcatttaggcatttaggttatgtctaggttttctttattaaaaatgacactgggatttaaatccttgaatatttatctttgcctacatttctgatttttcccaaaggataaagtcttagaaacagaattactaggtctaaaaatatgaagagtttgagatttttcttagaaaaatgtcacccaccaaaatcctgtaataattcatacccctccccagtgatttttgagagtgcttacctgtttcctcacacccttcaaaacattggatgtcatcattaaagcagtctttatcgtttggataggcagaaaaagggcatttttttgttatttgcattcatttgcttgttggtgatcgaatagtgctttcctgagtttcatggccagtggcagtgcttcttttgagacttgtctattcctgtcctttgcctgagtgttctgacaagcctcttgcaggattcttggttgccctgtttggtcttcctcagctctgagaggtcccatgtaggtggatcctacacgttaaatgagcctctgccttccaagaggtatgacaaggaattcattaattacctgtaaggaaggctcacctggctgtcctctcctcctccccctcccttcttctttccaccttcctcccgtcctctcctctccataaggaaatcaggtttaattcctaatcctatcattcataaggatgccctgtatttacacagcactttaagaggtcttctgccctgtagggtaggtaggcagtgaaagggctgctctatggccaggaaaactgaggcacacagtcaaaggcatggagctggggcctatgcagaagccaggcattggaaccagatcccctctcaactgcagcattgtacttgagccccatgggcacctttgggggcagggctgaccggcccaggagcacatgattctgagtctcatctctagagaggaaggggagagccacagaatacgacctggacgtatagaagaatcaatttattttttgctttctcatttttattactctcctttagatctggagctcccttgtgtaccttcccaagatctgagctgggcaatgtttttaggaacggtggaaattagctagtgagaatgggatcagcaaggctggggtttcaaaggctggagaagcctttctttgcacaagcatatgtttgtctgtgtacgtcttttgtatgtgttgcaagtgtgcacctgtcctcatgaagatgtgtgtacattatatgttaatgtccttatacatgtctgtgcatttaattgagttaatacaggtgaagtatttggaacagtgcctggtacatcatatggggtgagactgtataaagttgctgttttgggaggccaaatacaggcaattgcatatgattcaatctatgtgttcaggttaagtgttggctactattgttattatcgtgtgttttcttcttgggtatgcatctgccagttgtttgtacatgtctgtgtacgtataccctgttgtgcccatgtgtatagtgtgttctgtgagcactcacgtgcatacttgtgtgcatgtgtgcactttctgtctgggtgcatggacactgagctggccggtgtgtgaataagctccccaccttcttggggagaacttcccagagagcaactctttgcctcccctctcaccttcggttaccaggcagagcccaggcccaggtgccaggcctgacaggtgccatgggactgctttcattctcctccaggtagccctgcctatttccaggccccatattagaatatgcaaatcgactctttaatggaattcctttgcaaaatattacttgaaccagtaagttaattaccaggctctaattaatggctattttagaaggccacagaacaaaactggaggagatcataagagaccaaaaaggcaagagggaaaagcatccagctcccccagtcggcttggtgactccttccagggtggcagggtgtgcttagcttctctctgctctgagctgccagtccgctcccttgtgatgattggctgtaggtgagtgaatgctccccttgcacgaagaacctctggtggttctagtctcttggccatcagtgcatccatctgcgaggtgtgtccagggcagcatctgcctggggatggggtgagaatgtgtggatagcaagcctgggctgaggtggggctgcaccaacctcagagcagccgggtgacatgcccaaggcttgggctgtgggagggacagtcactggccactctgttttcccacccctccaggggcctgtgggctatcgctgcagggaagccaccccccagtcagagcctgggagcctgaggcagcttctcacagccaactctccaccaagggcccaactccctcccctccacttctctctgagttcgcggtggagtcacctgtggcccatgtgtgatgtgagagcttgcttgcacaccccttccttgggctcttggtcaggccctgcctctgtgtgactatgggcaagccgtggttcctctctgcccctccttccactcatccatcaagaggagtgattgtacctgcccacctacctcaaagggctggctggaaactcgcaggagattttagtgatggaaatgataggggagtttcccctcccagctggggcatgcctgtgttaccatcccctcctgagatagaggtcgtctctgtcctctgtgagcatgtggctgtcctcccttgtgtatacaggccatgccacctaccacctgggcatgcacacatgcacgtccttgtggaagccaccagcgtgcagcagatatcccctctgggccacaggggcgatggggtgaaaacctacgggagggagagggaaacagggtccatccccacccacaaaggttcctggcaccctgcctgagaattgggggaggggtaagaagtgatcccaaggctggaggtcaggccccatcttgagggttgcccaaggagtaagacctcccttcctcccctccctgtgttggcttaggaggcctgcgttctgcagacccctagggttatccccttgtagacctcagctgatgacagtgccttggcggtgggctgcttggaggcactaacagagcactttgcgccctgtgccagaggcatttagagttggcctgtgaataactgagtgtgcttaaattttttaagagggatggactgactggtgggcagcctgagactgtactttttagaggttgcgcaaaaggcagcctgagaaggtttttgccacctccacccttctgccgcccccctcagttttcccatctctcaggtggggctagtggtacattactgcatcagatgctctgccgagtgagttactccttagcacaatgagatcccacctccacttttcagtgggcagcccccacgggggaccagagcagcccttctccctactgtcccagttaaccatcacctcctgcctgtcgccctaacttttctggaacaagcagggcccttgttttcaggctgggcctgattgtaaaagagtgcactggggagagatagagatggcaccagggtagcatgggccctaatttgatgcgacgttgtcatgggaagttttcataccaagggcagtgaattagtgtagtgtctccctgtgcccaatgactaaggggaagttaatttcatgctctgcctttttgacattcataatcagaacgttgtattgcagctgcagattgttagcaggtgaaggatgtgtgagcctcaacaattactgtttctggcttgggaggagattgattaatagattgttcccagccccaccccctctgcttcttactcccgtttgtgctttctttccctctttccaacttcaccacatttcgtcaggaaactaagtggctatgactaaatccctactcttgtactagaaacccagggcagaggaggacctgtatgaggaggaattgcctaggacacctgataaaatgcagattcttggactccaccccagaccttctgaattataccctctgggtggggtggtcttgcttccccaaagtttgctccttttgcagaggggcaggcattgtgccccagctgtgtgctagtgacttgcctaagcacttcctgtgctgtattcttactgatttctcatagcaagagggctttttgtttcccatttcacaggtgtagaaactgaaacccgatgtgtgagtggcccaaagtcacacactggaggaaacccagtaaccaggcaagtccattccctggttgatgtcaagatcccaccagtagcatgtcatgtcctttctcattaaggctgtgatgccttttgaaataaaccctctccctcctcagagaagtagcagtagcccccttctgtgcttgcactaggctcccattgtgaaaagctcctgcacaccagtgccctgggtctcctgagggtgcttggaacagtcagggcattcatgactgatctgcattttgcagctgtggtgggtgacgctcagagaggtgaaggggcagaggcaaggggagctggaacttgtctcctaactccaggtccagtgctcagcccacctgtgccaccaaggcctgctcttctcactgacttcctggttgcaggtggggaaactgaggttcagggaagtgtacccatttacttaggattgagcgagcagcagtaatgcaattcaaggtccgccaagtcaaattccacaggacaggactagtcagcattttaggagtggatcttgtacccttggctcccgcctgagaatggaagtcttccagaccccttggaaggtctcggctcagggaagagaatgactgtctttggagagactaggccaggtggggtgggctgcactcccaactaaggaggccaggcacctgctagggtagtgggaggtgatgggggatctgcgcctgtgaggtgggcagctggaatctgaacctagggctgccttactctaaaaccccgtcccccacaccgccagttgccatggaggttaatagcaggcgttcctgagtcagtctcccagagctggtccaaggcccagctccaccaactgcttccctctgagcttgagattctctatttcagtaaagcaaaaacaaaaacagaaactagtgtctcggggcccaggattcctggcacagggctggcccagtctttcctgggctttggtttactgcattcaggtcatgaagcccctggagctgctggagaatggagccatcgtagcggggcgggggacggagatgcctttcatcctgctctgttcatggcaagctgcttctgatgctgtgatagccccacccactgccccacccactgcccgtgagtggccactcaggatgggccaggctctgtgcctggtgctttctcgtgcatttgctcagctcattcttactatagccctttgaaggatacgtgctattactgtccccattttacagagaagaaaattgagtcacagagagactgagcagcttgttgaagtcctacagctcataagtggcagagctgggtttcaaacccaggcggttggctttattatgtaaggccccctgtcaagcaccgttctacatagcctgtgctcatgtgctctgtttcacattacatgttctgtcagtgatcacactgataaaccacctggtcacttaagaagcacccgtgtggcaggcattatgcatggtatgtgcatcatctctgattttcttgactaccctcattttatccttcccccattttacaggtgaggaaactggccttagagtataaaatcacatagccaggattagcctcaggttacctttagaatctagatctctttgtatccacagccagggccctctctagtatattagctgacatggctgggcacatcctatgcgccaggccctgctctctacacttcactgagctgaactcacttcaccctcacagcagcccgtgagatatatactgttgcagtccctggttcacagccaaggaagcgtgagttgcatggccagaaatggcagagctgggattaaacccaagccgtctggctcccacatcagtgtttttaaccaccccacagtactgccctctccctatcttacaggtgaggaatttgaggttccaagaggtaaaagtcacttgccctgagtcggacagcaggtgagtggcatagacaggatttgcatccaggtctttctagaatgtttttctgtctcccaggtgagagaatgtggctgctgccaggcggtttggaagtatgtcccaagggcacccggggctctgctgggggctgctgtgggtgcccaagtcctgaggtggtaggggtggcagtggaggcaggccttaagaaagagtcatcaggatgtgagggcaggctcggctcagtgactgcccctcctatttgcaacttatcacttattctcaagcgtctttttctgtggctcccccagggttctgggctcccacacctcttttcacctgggcagagctgatgagctgtggctgcgtttggatctgttgacttataatgctgggtgaggtggggcaggtacaagaaggggtcgtggctaggctaagtggccttccatagcacttcccttcctccaaggtcagaagaacatagaggtgacttccatcactacccaggagggtgaaggcaaacagggtgatgatgatggtggccagggactcccccaccagcctctgctcaggatctgtgggaagatgggtgaagctggcgctgaaatccccagccaccccaggcagtactacagcagactcaccaagggagttgcctattgtgctgcaggccacactgccctggtgtcaccaccttctgtggactggatgtgacgtagggaagtggtagtgccagggccagatgttctgcccggagcccatccagcctgcctgaggtggtcttgctcagttgccctaggatcataaagtccacgaatttgatggttgtttatgaggatagtgaaaacctattccagagagtttcagaattaaggaaaaatggagctggcagagaacttagtcttagagtctgtacaagccaggggtgcacttgaaaggccttgttgtctttcgtacctctgctgcttattgttcagagcacccataggagtgttttcccgaactgggttccatggaacacattcttaaagatgttaatgggcgtttgcgatgagagaattccatagtccaaacaggactggggagcagtctgtccagagtttctcaaactcagtgtcagaggttcttggaggtgagacttgatgttttactccagtggggtgattgtgtgctcaaatacattttacatcctcaaattttgcttcctcattcttgggaaatcatttgtgacccaggagatgaaaggccctgagaggtcctgcaatgaagaagtcagttttgctttgtttaatccagggtttcctgtcccccaaccccaggagcagctgttaacatctgtggagcagttgtattttgcagaacattatttggtaaacattcttttgaggtgttatgtctcctcagaagcatgttttggaggaaactctggaagtgttccctgcccttagtacctgcaggagtaagccttgaatgatggcattgctggctcagcaacaggtagtgggtcatatgtatttgaaaaaagtcatcctaggtcctcaatatcattcctcaaagcagctaccagctctcctgtgtgtgggatggggcctggctctggtcagagagccctctgtggggaggtggtttgtctgggaccagcctaggcctagggtgtaggggtttattcccctttttgcaggctgggtggcgtccatgtacctggcagcttgggctctgggcctccccatccccctctagactccctctgcagaaggcagtggtcaggcagaggctgcccacagatttgcataattgcaccgtctcctgaataattaataaagctctgtccttgctgggagcaaagtctgcaccgttatggatgggtttgccatggataggtttgccggagctcttccaggggagccgatggttcctggactcctctgcttttcctggcatggagcccccagagagaggagagggcactgggttgggggctggctctggtgtgtccacatggctcccatagcatgataaagggcaggtgaggggtagtgtgtgctttcttccaggatccacacatgggttttctagcacacagatggtttaggattcttattcttcttgctttctgtggtcccactaaccctttttctctgaagtgtgatcagctgttgtggggcttagccctcttttctggcagcccaaagggagcaatgcttatgcagcaggtaagagcaatgagggccagttttcagacaagtaggggagggggaggtgtttctgcttggggcccttcttcaatccctcccagtttctgggcttgttaaagttggaggtagcctgggagtgattcctatttgagatttctaaatcccttttgatggtgtttcattgacgtgaattttccctctgacgcatggccttgtctccctttcatgctagaaaggagagtaaggggtgggcctgcccccaacatgtggttgacattggggaaagtcctagagtctcgccacgccatgagtactcttgaaaggccttgctccaaaccttctgtaggagtatttcttaaatgggttctactgaacatattcttacagatgttaatgggtacttgggatgagggaattccacagtccaaacaggtccagtgaaccaagtcagtcagtttctttaatgcatggctccttagaggctttaatgtgccagcgtgtgtctgagcccctgggagggcgtacaggatgctctgcttcccatccacaccggcactccagagtgttggcacatctccagcaatggggagctctttccacctggagcggcccctgcccttggaggacagtgccaactcttgtaaacttccccctttgtggagcttccccaggcagcatttatgtggcaccttgtcattccccacatggccctcacaccagctaggaaggtggcagggcagggattattccattttatagataaggtaactgaggcccagagcgggtaattgtctcacccaggggcacatagagttgatatttaaacccacgtctgccagctgggccttcagctctttcctcttggccaccaagaaaccatttgctccctggatagatgtcagtatgttggctggggtggggccttaggacctgttgctctgacagtgcccttcccagcttgcttggagtgtctagagggtggaggcaggagtgagtgaaagccttccttcagggtttccaagctgtggggcctggctttggagccatttgtagacaggggcctaaaaccgccagatgcctgcttatcacaccattcccgactctcacccttttccttctcctgccctcttgttgtagggtgggaatgtttgaggtgccccagaaactgggtatgcactcaactttggccagtagtggtggtgcaggggtgaaggagcagggcagggggttccagctggcttgtctttctccaggccttcctgagagttactggacaagcttggtggatggccaggggagcctggggtgaatttgttcacagcagctgggcttagaggctgcaccggggctgagatgtgacttcaggactcaggccaactgttttatatctcaaaaatcttgggttataccatacaccatgaaaggtactgcattgccacacctgacacttccattctggtcccaaagcaagccacacgggggctctctgatgaacagaatcctgctctgctgacacatggacccagatccagatccgacgccctgacttcctccatgatctgggacaagtcacctaatctctgaacctctgtctcctcatttttaaatgggcaccatgattgtggtgcctacctcccagggttttgaggtctacatgggatcatgttacatggtaatttgatcatattctgtcatcacacacatgtactcacattctcacacaccatgcttttgcttttttgtttgagatcccacaacctgccagcacatccaacccagtcttcccagggtccacctcatcatatatatagcaagagatggcccaagacacatgaagtgatgtttgtgctgacatttctcccacttagaaaatcaatattctgtggtctgcctaattgctctgttgctgctaaatgagtcattatggagggaaaatagcaaatgcattgtgagattaatgggagaaaatggttggcaaatgactttggtttgcttcggaaactctgagaaggtgttactacgtgaaatctgcagagccatgcaaggccgagtcctgagcagcagggagacaggcaggcagctattggcgctgtgagcctcccttttagggcggggcaccgattcaaatattatagaggctggactcaggagttactgagtgatgaagtcaggagccaacaatgggacaggtgctctgacaacctggtctcaaagaagaggatactcttcagttagagccagttacatgccaggcatggtgctaagctgagggatgtaatggtgagcaaaaccagccccagctcctcccctagtggaggacacaggctgaagtgcaattgtcctacaggtgactgtgtaattgcaattaaggcatgtgtcctgaaggcagtgagagcccagatctgaagggtttcatctggtgggggtggtggggagggcctccccgatgacaaaaggagtaagctgagctctcagggaagaaccttctgggcagtgggagaactcgtgcagtcctgttgggtcttataggaggggctgccacgggacttgtatggccttaaccctccagccatcctaagaagtggatatttctcgtttcacaagcgaggaaaccaggactgaaggtggttaagagacttgccagaggtcatagaacccttaaatggcagagtccagatttgaacatggggaacccatgccaaggggcatgccccgttgctccagggagctggccttggcacttgctgccctgagggtgtctctttagctagggttaaggaccttgctcctgcagggcagggggcttcatggtggttgcctgagagtctttagagagagggttataggactctagaaagggggaaccctcaacagccacagccaggcctctttgctttcttgggtctttgcttccttttaatgacagcgtgacttgggtagttttctttttctttttctttctttcttttttttttttttgagacagagtctttctcggtagcccaggctggagtggagtgcagtggcaggatctcggctcactgcaagctccgcctcccaggttcacaccattcttctgcctcagcctcccgagtagctgggactacaggcacctaccaccacacccggctaatttttttgtatttttagtacagacagggtttcactgtgttagccaggatggtgtcgatctcctgacctcgtgatctgcctgcctcggcctcccaaagtgctgggattacaggcctgagccactgcacccggccatgacttgggtagttttctgatgatcaaaatgccaggtcaactagtgactcctctttcaaaaggctctgtaaataacacacttctctccccatgaaatgggttggtttattccctgcctctaatcccagctggactgtcatcaggtagggcctatcagttgtctgcagaggtgggtggaggtatggtcacctgaaggtgcttctaaggaaggtgcttgtgagttcttgtaaacttcccaaggtttcaggagtggcagcagcagataaggagagtccaggcatttcctgtgggcattatgaaggagcaccagaggcatcccactttgtcttggtgcctggttgtagctgagcatcatagtgccatgagaacctggtaaaaagattctggagccccaccctgggagggtcagggtcacaggtctaaggggggctctggaatctgtattcctgacaagccccaggtgattctgagacccactcaagtgttgagatccccagttagcagctctggattcttccgtctctgagagggtcacaggcctccaagggatggtggtagtggagtatacttttatcttcctgggctggatgtaacactgcctgctgccagctcaggaagccaggccacactgtgcccatagggccacatgtaaggcagagcctggtgctcagctgaaccccaggtgaggcaggaacttggcctgggatgctttgctactgctattgtccggaaactgagtttcatcccaaacttaggtctgactggctgtgccctgtcccttgcgaaatataaactgcagcccttcctggcgagaggctaagtgtttatgtgggctggttgcagagcccagctctttgtcctgctcaggttccatttccaaaataattctgcttagttcttcacataaacagcagggcccttagagactggccctgagagtatagaggggatccatccccgtcccagcaccccagtgtgctgccaggagacaccagtgggcatcctggggttggtacccagtgttctgctttctgctcttgctcctgcctccttggaggccaggagccacatgcctgaggcccaggaatgtgatggggaaacaagtttcccagattggccaaagaccaagatgggagccattgcaccaaggtaggcgtggtaattcagtgccacacgtttcccatggtcaaccctgcagtcactcttcccgctaagtcaaagtgtccactttgctgttgtcaggttatttggtgaatttctgtagcctctaatgatgagtagtgagtgggaactctgtctcctttgctcctagcatctaccaggaagactgtttcagcgaaggcaagtctcatacggagctgggccttgtgcacgcatgtgtcatagcaagcactcatgaagatgggccggggtctcttgtgagcctggggcagccccgggggaatcttgccctcagagaagcacttttcaccatagattcacccctaggtgatgctatgcagtcctcatggtaggaattaccaacttccacatcggctcaggggccaggatcttctaagtggtgggacttcgggtcaagcagaattctggactctgagtggcttcctaagagttggcctgctgcttagcctgaatctcagggcaggtacagacaggatggcggtgcccacaagccctttttatccagctagctaaaagccactcattgtactagcagaagcacgtttctacacatgagaggaaacactgcatccttttcggtgcagttttacagaaaactatttaacgcgcttgctgtagctacccctggcatgtggatcctgagaatccgcccctgggcagattcactcgggtcacacacttgtttatcacacggtgtgtaattgaccttagtatgtgtgcatatggacagcataccacgtagcagtgccctgggcattctgacctgcccctcctggcgtgtttactcctctctacccatagttctggctgccgtgcctcaccctgccatgtggcaaccacatgccgggcactgagaggaggcccgggtgagagtctggtcagggtcctgccttcctgggagcattctcctttgagcaccacctccctcttctttctctcttcccctccccctccagtcctggacttcctgctgttcctggtccagggggagggcaggtaccacacagtgatgggtgtcctgcaagctgagcctgggttgttgaaactcctggcccagaagcctctagcccccagccaaggtccctgtttgggccgcgttatgacagtcttgtttccggcatgtcaggtgtgaccatgccttctgtctcgatggctttccttgctggtggtctccctgtggggctgctgtccttatgtgtcgaggtttcagaatggccaggctcttggtggggaggccctggatggacatgctggtggcccaggagagagcgacccatcctcagtccctctgcctgtgaaggcagactctcctgcctgccctggcaacagctctgcgccagcctgtctgtgtggctgccggcagccgcggctcctgactggctgccttctcccagctccctcacgccctccaaggctcactcactcactcactggctgctcgcagcagctcaggcagcgttcaggcagatggtgcaagggaggcgtgggcgggggtcctcggactctgcttgcacacccccatgtgtgggtgaggtcacgcccaagggatgtcatcaacatacgctgggatgggcttggtgccattcaagatctatctgcagggacaacaaaacccgacttcgaggtcttaacaagtccctcgggagtctccagactcgagtccttacactgcatcacccactcccctgagccaccaggccctggtctcctctcttgacccacaggacactgcaggcaaatgctgggttgaaattccagctctgccgcttgtcagctgtgactttagagaacttagctaactctgcaaaatgggggatagtatcagttcatggcattgtcaagaggaatgaatgggatttgcagctaaatgcttagcagcacctggcgaagagcaagcgcaggagatgagttaaccgggattgtgtcatggagttccccggctcgtgttgtgtcctctctctggaatgctgccttctctttcccctgtgattcctactttgatcatacctgtctttcagatcctagctccttctgcttaaagctggctctgctccccctcccccagtcctaggcggacttcaaggccttcactttgctcctcattttttgtgcctgatttctgtgcttcacttttgggtccactccacctggtagcaagggggtgcttcatgagggcactggatgggatctcttgacatatacatgtcctgccctcactggtagaacaaagcaagaatctagctccttcatagctcctcagaacctccgggcaaacctggctatggtccccttactccctgcaaagtggagcacatgaccaagcccattcgcaaggccttaggatgagaagtcatagtgatccctttacagatgggcagctgaggccaggaatgaggaggggatgtacccaaggacacgtaagaagttggagaccctggcctgctgcttctgtgcctctctgctgggggttggggaaggagtcgggccatctctcaaggaatccgggaggacttcacagaagaagtgacaggagttaaggcttgaaagaggatgggttcatcacataaccaaggcagggaagggcatttaggcagagggaaccccatgagcctagtgctcagaggatgaaaaccttactctcttcctgggacagtcattgagactgcagtgagaggtgggaaagggcctggagcatcgggagagtgagaaatcattgggaagggcaggagccagcattaaggagaggcagagatagagaaggtgagctggttagaggcttggcccagacccgtgtatgtgccagattagactgggggagggagggcccaaggataagcatccctttgtgccaggtgcttcatctcttagtgcttacagtgacctgagaggtgtgcttgttttagagatggggaaaccagatgcagagaggtttggtggcttgaccaaggtctcatgggctagtaagaggcagagccaaaatgtgaaccaccagcaacatgactctcaagtcctctggtggccaccacctgtttgggatggggtggcagctcctctcagggcaggggccctgtagtctactccccaagcaggtgtgggggccactaagagagtgtatggcccacaaggttcattgttaggtcctaggcatgtgtccaggtgcacatagacaccttcagtgaaccagattgttcaccaagcctggcaactctcttcaactaggccctattggaaaatgggtaggatgccaggcagcctacagctgggcagctccaactctggcctctgttgcccagcagccaaaaggtggggctcttgtaagacctgagcccctcaccccgtgtctgggtcctgtagcatttcggtccttacttccttgcagttctcagggtgtggcagttgtctgtgtgcctcattgagtggcagatctcctgtggaccgggcccaggcctcctctctgggcctctggcacctagcatacagcctggcccagcacaggtgcccagtaaatgtttgtaccatgaacgatacattgagcacctactgcgtgccgggtgctgtgccaggccctggaataattaacttcggcatggcactttatgattcacagagctcctcccagtccccttaggagtctgattgtctcagatcaggtatttatttccctgttttccaaacaaggaaactgaagcttaggaagaggagggctgtagcctcaggtcacatctgtcagccagggaggggcagaaccagccccagccactgcccactccctgctccctgggcagtgagcacaccctggaggctgacagctgtttctttccaacccctgcaagcaagagatagagcaccctggctggcagggaagccaggccaacagagaatccgtatcccaggaagcagggctcctgggggctgcagtaggcacctggctcatcctcagggctccacccagcaggagcaggggcctcctcttccactaccaaggacctggttgctggggacaattgtctgtgtctggggtaagtcagaggcaggagaacaaagagaacccttcctgccaatgccactctgaccttgaaaaccctgtggggtttcatttactcgaaagaaaaagggaagagttggttaccagcttcaaagaggggcagacctcctgcaggcgagcattgaggaaaccttggctttgtgagttattgctgccaaatttctccttttcagtttaacagaagtcctggggatcactgtccatgggctggggaggaatccggccaccttttttagaaggcaggaaggtgccaggatcactgctcttactttggttgggctctaggtggcacagcttctgatgtaaagatcaaataacaatagggagatctggatgcagcctgaaggctcaccccagtgtcttgctgcaggtgtgcccagctgtgggaccaggaccccaggaaggaagggcattgttctgtccctgctgtgggagtctctcagggaagcagcatagcactcaggaaatcctgggcaccgtgaagggctgtgtatttattccttattccacaaacaataagcaagtccctgctgtgtgccaggcactgagtgggatcctgggagaaggattgatgtgttgtgggtcctgccatgtcctgcctgttgtgacagtccaccactgtagtggcatctgtgtccatctggagagtacatgttctgctaaggggggcagcagcccctgcaccatggcactgggcatttggtggcaggcctttggatttataagagaagccaaaaatctagaggtttttttgtgacattttaaaatttcacatctttaaatgttggcatttgattcaaaacttaaaaatgtcaacactgtgtgggctaaacaaaacatgaatgttgaccaaatacagctcatactctttagttaaagacctttatcttaaaggttggataaaacccagatgggcagagggcaataggcaaggtcttcctggggagggggcacctggacagaggggtggtggtgggaatctgcctgagcattttcagggcagctgggaactgggaagtgaggggcggaactgatggggccccgcccagtcatggaatccttgcatgccctggacgtgcagatgtgctgcaggcctgacccaggctgccctgagagcctccagctgtgtccatccctccagtcagcagcgtttacccaacaccgtcacataaatgaggctttggccaggcaggagctcaaggaagaagggtcatgagtatttaagagaaacctccaggacacacgatcctcatctccaggaaagctatggaatgggggctgtcgatctctccgttgtccatgcatgcatgtgacctcccctgccatttgcatttgctctcctgcagctccttcaggttctgggctgggccaggagggctttcgcaagaacacctaaaaacccttggaaaggggctcttcccttctcctcttcctgttcctcccctgcaggagtcctgcattgttcagagggtttgaacggctctggccaaagcctgtttgggtgtcttcctgttcggggcctgcagttatgactcctccctttttctcagtttctccccgtctgccactccccccatgatccatatttgagtttcttctaaatgatcacctgcagaaatggtccttcagattgtcccagagatttgcccaggaaactttcattgagcccctgctgtatgcagggccttgggccagagaggggactgaaacccagggctcccactgactggtagagtagacagccacacagacagccagtgggtttgaagaagaaactcaagtgtggatcatagggggagtgacagacagggggaagaaacagaaaaagggaagttatgactgcaggcctacctgggaggctgaggcaggagtatcctttgagcccaggagtttgagtctagcctgggcaatataatgagactatgtttcaaaacaagataagttaaaaaaattgcaagtatagagtaccaaattccaggcactataaagcaaaaagtaacaaaacttctatgccactcccaccatagaatctcttactccaccaaaagccacggtggactgttggtcggggactttttctgcagacttttttctgtggccaatgaaatgatcttatccacgtccctgtgcctggaacaggccacccagcatgctcctgcttccttggcctgcagaaggactgagggagcctagctgccatggcccagagccctctctcccagcacccacagcctttagtcccatagctatggtgctgggtggccctccatggacggagtctgtggctctggaaggaagagggcatggtcttttcccagcagtgccacacagactcaggccgtgggctgcctcagccagcagagagggaggcaacaagcaggctggctggctgaggacttcgagagcacacagggctcccccaagggatcctcgggattgagttatttctgtttttgctcacctgtgcctggccctggggacagagacaggaatcagctgcagtccctgcctccctggaggagctcccagtcaggtgggagaggtgcctgccacccctgatgaaactgtctctacctcaggttctccctgctgctcagaacaagggacagccaggaaccaggtccagggaggagtgtggtctgggctcaggggagccctggaggaagtggattgtaagctaagattgggaggaactctccccaccctggtttcacctgatgggtcttgcagcacctcctgctcagtaagcaaagaactggatgggaaagaactgacatctgtgcaatgcagacacttggagctgttgtttcatttagagtacagtgttttcccctagaggccctgtgtggatgaagacacagagctggttgaggattgggcccagggggtagggcggagaggagggtgcatggtgaagatttgtctacttaggctggtgagcccactcggggtggagcactggcttaaggcaccttggccctgcccactgctgctgggggaccttgatcaaggtacttcatcatcagtcaaatggggcagagagccctgcccacctcccagggcttctctgagagtctgcctgacagtctttctgccttgggagcagcagagcctgggcccatgttggggatgatgaggatgttgatggtaacgaggatagtgacagggacaacatgggggattgtttactgaggattccctcatgctggcgcttgaggtgacacaccctcactgtgtgctgtgtgccctgccgtcatggctccccactggaccctgcaccgagccctagacttgctcccctttcagtcagttctctgcccaggactcacttgttatgactcaggttccttcctgtggaccctgaatggggagcacctgactacctttccagttgcacttcccccacccctccccgttccctgccccacgagtgctccagcatacatctttgtccttgttccctcttcttctcttcctggaacattctttgttcagatacctgtgtggcttgctgccccacttcattcaagtgtgaatccaaccacccggtcaaacacagccccctcccatcctctagccaggacctggctctgcatttgtctctagctgttgagttcacctgatgttgttacatacttcgtgtacttttcccacactctagactgtacgccacatgcaagtagaacatttatgtcttgtaccctgatgtgtctctggcacctagaatcgggcctgacagaaagttggtgaatgaacaaacaaacatttaattgtaccccataatgtggacacattgctgtctacattttacagatggggaaactagactcaaagaagaggtggattgactagcccaatgtcatacagctgcagcgggacagaaccaggattttagcccagtgtctgtggcctctgagccctgtctcagccagtagacactcccacctccccagaatctaggatggacaggaatgggagggggcccaaaaaggtgggtaggattttaccctggggattgaggggtgaggccaaggagggggtgaaccatgagggtctgagagggccaggggcaggtcggggacttcagtgagggtcaggacagggaacccttgcaagacagtctctgaggagagcacccccggcaccagccactcccaaagaccagccgcctccaggcttcttgtgctggctttggttcctggcacgatttctgtttcccagaggagctcaggcctggcccggcttcccagggtggagaaacacatggtgagtgagtgtgtgtgcgcgcgtgtgtatgtgtgtgtgtgtccagccttgctgtttgcgttgtcgtcacgtcttcttaatcagcctatttctgggagcgatgacttcatctcctgtgattctcgacacagccattgtcaggcgtccatggaaagattgggcctggcagtgtccatattcccctaacgagccaggttgggagagccaattggcgggccctggtctgacctggctcgggggcttatggtcaggtctatctccaagagactccactgcccagggtcacccttagatttggcctctttgaccctggggtacccagtgcagcaaattccagccattgtttcctgtgtgcttcctctgtgtacgctctgctgtgggcagggggtaggggacagtcacgccaatctctgccctcaagggctcctgctgtctgacaatgcagatgagtcaacagacctcaccttagagggtctgtgcgtgaacagagaagggagtgaggactctaccagcgctcaaggaaggctccactgagttggtggttgggccacagggtgaaggtgaaggttcccttgagggagggaaagggcttttgggcatgccaggtagttgggtatcactgggcacggggcggctatgtgttgggcctggagagtgcaaggaatagaggggaaggtagcaggaaggcagcagggtatggacttgatcctgaaagtagctgggaaggattttaagaagagatgggacctagatagatcagcgattttagaagcaagtccttggctgtgtgtaagggtaggtgtggaaaggtgtgacactgggaaatatatacagtatttggtttcttggcacacgactcctgaaatccttagattctttaaagtgatgtctacttatttgctaatgagttgactgatggctggcagcccctaggtggcttcagaaaggggtcacagaaaagaccaaggcaggattagagggttagaactttcagcccaccccacagcccctggggcagggagagaggctgaaggttaagttagtcgccaatggctagtgctttaatcaatcatgcctatgaaatgaagcttttataaaaacccaaaaggacaaagcttggggagctttcagatagctgaatgcttggaggttcctggagggttcctagggagggcatggaagctccacgcccctgcccacatacctctccctatgcatcttttcattggtatccctttataataaactggcaaacagaagtaaatatttccctgagttctgtgagctgttgcagcaaattaatcaaacccaaagaggggtttatgggaaacccagttgatagccagtcggtgggaagcactggtaaaccaacacggggcttgcaattggcatctgaaggatggggggatagtcttggggactgagccctcaacctgtggatctgatgctatctccaggtagataatgtcaaaatggaacaaaattagaagacatctgggctggtgtctgctgcccaactaatcgcctgcttggtgtgtggggacaacccctcccgcccccaccacatctggtgttggaagtattctgctttgtgagagtataaaaggaaaggggagaaactgagttgggttttttctacagaaggtgtctgggacagggaggaagaagctggcgactgagggctcagccctgtattcccctttatcttcaaggggaagggtctctttccccaccctactccctcatactgtacttcaggaactggtgccaaggccagctgagctcagccaactgccaggagctcagttccccaccctggaatgctggtgggctggggatgggaggtggagaggagtagggatgtggggtggtctctcaaaaatattgtgctggacttactgcaggcttatgtatagctttgcctggaggcagggggacagttgaatgagtgccagcaggataaagcactctgaggggtgataccttgtgtcctgctcttggcctggacactcgttaccccctcacctccattccccatctggagatccctcaagccccaccttgaagcagagacactgatgtaacagttcaggctcctgagctgcactgcccgcggtgaagctgcttcccagcgttgtggcctctagcaggtgacttgctctgtagtgagttttagtttccctctctgtcaaatggggacaaaaagtgtaaccatttcctaagatacttgtgaggattaacatatgttttaagagggaggcttagcagagtgcctacacatagaggcgccagcgtgccttagcatggcagtgggggtgtggcaagggtgagggcaactgtcttcaccataattgccaaggctcccttaggattcaaaaagccagggatcagaggagtgaggaggtgtgatgggaaggcccaacaggagagcctgtttggcggagcaagaaagagactgggccctcctctccaccactctgtgacctcatctctctgagcctcaatttcttggcccaaagaaatggtgagaaaaggaatgttgggggcccccactgcaggggcaggtgaggagctaatgtatctgttaacacttgtgtatttccttttccctcaaagccgagaatcagctgcttgcctctctcttgggcaggcatccagcagggaaatgctttgaaggaagccttcccaagctgagggtagccaggctctcccacctccatctccttctcccacacagggctgtctgccttctcccttgtccctgagccaccacccatcatcctttgcatgccttcattgttccagctgctcagtgttgtctttttttgtaagaaaacagtccagttcagcaaacatttcataagcacctgttgtctgcctgggtcttttttgggctcagggcatacaggggatggttaaagtaccaacccagctattataggggagaatattatggaattgttttgaaagatctgaatgcaaaagcagcgatcccagggcaggaggccctgggttctaggcccttgttctcctttcttcccttgggaccttgggcaactcatggtacttctctgaatctcagtttcttcaactcaaaacccaggtcagtctgttgatgcccctggttctaagaggcatcctgtgatcagttttggagtaacaccctgtgggctcatcagttagagaggtctgtgggaactgcagtttcaggccatagtgagaacagcagaccccagagggaggagtctgatccaagtttgagtcccgttccactgcagcttttgctagttgcgtgaatttgggcccgttccttaactcaaagactgggttttctcagatgtaaggtaggcattgtgatatgcctgccaatagggaactcacgggtcttattaatgctactgagatcctgttctcagatacagggcctgctccatgccaagaatacatacccaaccctccagagctccttgtatcagagaggggcattagtgcccaacttaagaggagccagtgagggtggggaggcctgcagctggcccaggagctctagaatgactgcaggtgggctgggcaggggcttcttgatttcaacatgcactagtgtggaattctatctagctttatgaagaaaatgtttgctaatgttattaatagtgtaaatgagatttggggagggggggacagccaggggaaggggttatttaaacacacttcaaagaacacccttctccagtatttaagcagcatcatttgcatatgtaataattgtgctaattataggtggcctcatctgttaacgacaagtttgcctggttgagttacattattgtaatcacccaatcataattctctggcatgcttttcactaaagataacaacaacaatagtaataatgcctgtcattttttagtcttttgctctgtgccaggcttcctcccaggtacttgacagtcatcagctcatttaatcttcacaacacctctgtgtcccaaagattcttatctcctgtgtacagaggatgaaactgaagtgcagagaggttaggtaacctccctgggctcacacagccaagagccaagggggaaatgccagctcacaggctctttccactggctagcactacttctctggggacacttgacatgtgttctcaccctttatctctaagccttctctttctcatttgctcctctcagaaacccccattttaccgaagaggaagctgagaccctaggagagaatttggggctgggcaggaggtgagcccaggtccccttaactttatgacaaaaccagccccagcatacccacctgccttcctgcagtaagggatggagggcagcagctcctccatgttctcctctgaagtcttgaaggagtccagccttgaggaggagggtgctccttacctctgctatcaagcggggtaggcctggcctctccatcaaagaaattataagtaaacaggtgggaggactctagcacaccattaattgctttacataggttgtcattaaatcagagatagtatatggatggctggtggccagatgtagcccacaaacaggtctcatttggcccgatggggtggaaagtttttgttttgtttgtttgtttaaaatcattcaccaacactagaacatttaccttaaacattcacctgaaaatctaggtttctggcttctattttaagacagatgtggcttcagtgggcctatattcctatagggcaaataattggtttcttcagttcacctcagactccttttctccctggaaggctcctcccagcaaccttgggaggtgtgtgggtgtgtgtggggttatagtgttcccattctgcagataaggagcctggggcccagaggggaccagctgggccactccacaaagctgttggtaaggtcaggacttgaacctccatcctcatctccacgctttgtggttctcactccacctcgctgcctcccagccatgtccaacccccactggccgccaaggaaagaaagaaacttttcacaggcctaatgactcaaaaataagcaacagtaagcctgaagaactgttcctatctccctcctctccctttccacccttcccgaggccagaagggacatgggaaacctattcatttaaactcaattattttctcgaagacagaacagaactgaattgggtcaacggctatatttgctgtgctcagctgttttcctgcaacagcatcacccgccgggtctgttgctgggccctgcactgccaggctcaccaattatagctccatattggtagccattccttgggaagcttggctcaggaagagaggagtcagtgaatagaacctatcaccctctcctttttcgcccagcaggctgcaggggcagggtccctgggccagtgtgggtccaggctccgtaactgtgtggtcagcacctccagggacctaggcttcaggtattagacatttaatgtccaacacctatctgtaggggaggtgcatctgcagcagagtttctgcagatgaggaaactaaggcttagagaaatgaagtgcttgtgggagaagcagaccttagagtcaggcacagctggcactttctagctgtgtgactgggagcaaagaacctgactgccttgctcctctgatcccacctgtaaaggaggcataatttgacatacctcacagggctgggctgtcctgttgtagatgggttgcagtgtacatgccagcagcctgcccagggttaaccctcctggcaatgagaagtgtgcaccatgtgccaggcacagaagttggtgggggcacagaagttgttggggacacagatctctgaagaaggatatgcttggacatcgttctctccagatacctttcctgattccctgctcccaaactggaaatgctcctgcagtctctctaggtcccctgttggtccaggccctgccctggacacttttcaccacatcttctgggcctacagcctgttatatatatttttttgtttggtcctaatatttgtgtaccttcccctctctactaaactgccagtttcctgaggacagaccgggtgtcttgttcacctgtttggctcctggtgtcacttccttcccagctgggtggccttggactggttgtttaacccggtgcacctgttttcacatctgtaaaatgggaacagtgatctctctccctctggcacatgtcacggcaaggaggttaatatcacacatggcagcactgtgccagatggctgacggaatggagtctagagaaacattgggaggaaaccaaagcagaggctgcccctctgccctccttgaagtagggagtatctaaggaggcgaggcatagtggttataaatgctgtcttgttatagaattgctgtctggttacatggggaagtgggaacagagtggtggccagtgggcctttccttgtctcctccagcttcttgctgcagagtgctgggcttgccccaagaatggactgctctggcctcacggtcatctcagattgcccagtggggctggggctggggctggggctggggctggttgggacctacccacaaccactgacctccaggtgcccgggttacagtacctggcattagatctcttcttttggggtctgggtgtagagcaggatctccctgcactaccccacgatattattgctgatctcagggttggggagtgtttagggaggcttgagttccctgacctttcaggaagcatgcatgtgaacttaggcctcggacctcgtgtagacatggtgtggtgatggctgggccctactctggtggggtggacgcaggacttggggactaagcagcaagtgacctagccacagacacagaaatggctctggtgggagcccagagtggcactggactctctggggggccagggctgaggggactgcccaggttgatcccggcgtcttgtacaatagaaccagcagtcacaggctcataaactgtaaccgtcctctttccgttgcctcttggtagcattcagcccctggcacactatgctgggtgttgcctagtacttggcactgtgacaaccaagaaagaaaaatgctgaccatgtctcactgcttgttcgagtaaatttactctatattttttagagatgtcgcatgggtgggaatttactcccactaaatgttttgatggaaacattacatttttggagtgaacatgtgtcaacatcactgtggagaaaaggttccaggattctctgccagccaaagtcatcaccataagacactggttgggggcctggcaggcggaggtgatgcgaccaggctggtagtggggcagaggtagccagatgggtaggagtctgcctggctggtctggagggagaaggggatctgagctgggggaactgaataggtggtgaggaggaagggagtagggaggctgtgggctgatgacatacattaaccacccacacagctcaaaactaggtgagtggggagcttgaggggcaggaacagcgagcagaggctctgaagtgttgaacactggcagctcagacccgagggacaggctggggccagattgttgagggtcctagaatcccagctcccaccagtaactagcgatgtgagcttgggcaacttttccaacctttctgtgcttctgcttcatttttagtaaaatgtagcatggatagccacagcttatggctctttggagaattaaaggagataatgtctgtaaaatacctagcgctgggcctggcacatagcaggtgccaggacacatttgctgtttgttggtgatgataaagccacacaagtatagatgtactcacataaattaacagctggtgcactgaaactacttcctgagttggccctcaatctaataccaagtttgttttctcaccttcagctaagtacaactggtctcttcagaagcccttgtggtctcttgtaccttgtggtacaactgtggtctcttcagaagcccttattcatgaacagccaggccctgggctgactttgctacagggcatccgtctctggccctgtacctgtttctgtcctacagacggatcctggggcagttggtgggttttagcagcaccctcctttagaaaaagcctctgtcgtctgctcagtctctagaaagaagagatgtctcctctcccaggatgcatgcatctctccccacgggatgtacaggcgttgcctggaggtattccttgacagtcgtggcccagactctcttgtcattcaaagaaatgggaagctttttgaggtgggagggtttcagactcccccagagagcctagcccagttgctgaggacatcttcagatctgaaagaagataagacaggagcatcctgagctctggggagaagacggcctgcagtgtgtgtttctccatcactcacgtatggaatcccttaggccctgagaaccagagatgaacagaccccaaggaaggcctggcagggcaggcagcagtagccaggagaagggagtcagaccaggaattcaggcagagaaagggagagattgtgcactttcctgtgcccggggccactgggaaggcttccctcaggtgggggcagttgagctgggccttgaaaggtgaatgaaaattagaaatgggggcaggaggggagcctcgtggaagcaagtgtgtgactgtgagaaaggcggggcatgcactgggaagagtaaaaaaggaggcgggctttgtgactgttccctgtgataagctccaggtataaaggtgaggagtgtgcagggacaggtaggacctactgatgggcgaggcccaaggctctggacttgttctgtggccacaggagatgctgaaaccaggagtgactggatcagggcagcttctgaaattcccccagctacacgtggccaagaatggtcactgtgtactctgtacttttatgtgttactaaagatgttgctgggccgggcgcggtggctcacgcctgtaatcccagcactttgggaggccgaggcgggtggatcacgaggtcaggagatcgagaccatcctggctaacaaggtgaaaccccgtctctactaaaaatacaaaaaattagccgggcgcggtggcgggcgcctgtagtcccagctactcgggaggctgaggcaggagaatggcgtgaacccaggaagcggagcttgcagtgagccgagattgcgccattgcagtccgcagtccggcctgggcaacagagcgagactccgtctcaaaaaaaaaaaaaaaaaagatgttgctgaaaggagcctgcaagcggttatgcagacttctgagcaggggctaggaaggagggcacagaggaagcaacagcagacagctggtgagggtgggagacccactggagatggacatattctgaccctcagatgcaggctcatttcttgttagctcgtgactccttactatgagagctgtcatgcaaaggaaaaggccctgttatggggccctgttttcttataacaagatattataacagtggggatgactcaacaaggggatgcttcttgcctgagggaaatctaggaaggcttccaggaggaaggactattcagattgaggagggaaatgagggggctagtaaaaggtgcaaaaacagttgtctaggggtgaggcacactttcagatgtagttgggtcaacttgagcaaatgacttagctattccagacttgatttcatctataaagtggtcacagtatctgccttgcctgtttgttgccatgatcatgaaatcagtgggagcagacctggcttggagcctgcaccctggagggaggtggtgctcagaggatgcactctgctttcgccttccttgttggtttggctgctctggagccaaagggggcttctctggccccaggacctctctgagactctatcttcacctctcccctgctaggaaattttattaagacattggataaacagatgacagctctgagggaaaacttctcagaaggaaggggacaggacactaagtgctcttctggctgggagccttttaggcagtagggggagctgggtagctcttggggctttggtggtgtggactgatgcaaatgtgggcagacggggtggtgttggatcgcctggcctgtgtgcacggcagagctgagcctggagcctagggcccagcaggggatggaatgagtcagggactttccaggttgggggctgctgctggggacacagtaaaacctcttcaccagtcctgcaataaccccagacagtatcctgcctgcctgtacacagtaggtgcctgacacagtctgcagcttagtaggagctcagtagttgtttgctaaaacagtggcgcaggctgcaactgccaaggactgacctggggtctgtgatgccttagggtggaggatgcgaggagctgggcaggacctaggtgggactccagggtgtggctcttgttctcccactggcttctgttcatatttacatcgggaggctgtgcagcctcgggttcctggcctcagctggattagcacctcttgctggtggctgtaagggaaggaggtgtgacggtatgataccctgcatgtggtagagactcagtaagtggataccattgcggtggcttctctggtgggatgggaaaaagggtgaccccaggcaaaaatacctggttggctgggtgtgcctttcccctaggggtttttgtttccgtgtttaaatgacccaaggatgaatctccaggccagcaggtggggcaggggtttgtctgcccccaggcttctgggcgcaatcgggaacctgggcagctcacacagctcaccagcctgtctcctccttccctgcacccgacctttcccttctgtcctgccggactagccgggtgctttccagaagagaaaacccgggactgctgcctgggaacccagtgcccttctcagcttaggctgtctagacccaagtcggggtggggagtcgggttaggggatcatggtagacaaacccctggccttgtctggacctcagttgtgttcacttgttaaaatgttggaatggaaatgtggggaagggagagcgtttgccttggttgggtctctgggctgcgctggtctaagcccgacgaacccggggtggggccagcgggccaaactggaatgcgccgcgagagccgggccgcgggcaagtgaggggctggcggggccggtggggacccagactcgcacgaaggtggggaaggagttgcaaggcagagacccccgaacccctgctccagggcctgcgcgtcccgcccgcccggcgtgccgaagcgcagcggcgggtcgctagcgggaagtggctgcagctggaggcagctggccgcggaatgtcacccgctgccgggcctgggaagggctgggcctactgctgtggggtggggggcgggtgggagggcccggagggctggggctggggcgggccgcttccgggctggagagggtttggggcgtggcgcagcccgacgttagtccggaatgctctgggagcagcgctcgggggaggttaccttggcgcgcccccaaatcttttggttcccccgctcctgccttccactgctctggctgacctggctcagaccagcttgaaaaatgcattcattcattcagtacatctgtcgagtgtctactctgtgccaggctctggttcgaggtgtgctgggcttaccggggcgtgcaggtccctgttctcgtggaccggacattttcatgataggtaaaagacagaaacaaacaagatgacttcagggtagttctgtggagaaaatgaagcagggtgataacttgggaggtgggagttgcccctttagctagagagatcagggaaggcctcttcctgggacgggactttgggtctgagaccggaatgaggaggaaccagccttgcccacggaatggcaaatacaaaggcccagaggcggggcttggggcaggatatgaccttgggcggagtcagtatgttaggggaggagcctgtagggacggctcctccctctttcttgacccagacctctgtgctctggcctgcaccctgcccagaggccccagagggcgacttgccatggctggaagcgatagtttgctttcaggagtgtttctcgtcttcttggacctggaggttgtgccatgtggttacctgcatggaagacggtaattttccacttgtttcctgaaggacacggaaacctttagatgttgtcatcactgtgtttatttaagtcatttttgaaatttcagcttggaagacacagattcagcacgtgcctttcgggaaggggaagccctcctaggctcacctcttagatgccggcccggccgagaggccccctaatctgtccagaagagctgcctgggtgagcaccacccttgggaatgggcctctgtggccttggacttcttagtgacaacttcggcaagatcctgggccgggccggaggggctgctcactggagacctggccatcttcggaagccagatctggctccagagcctcgggggttgcaagtgcccagaaccaggtcagcagagaggcctgcgctcccaccacaaaggtctgtttgaagtcctgtgggagggaggacagacaccacaaggaaacttcctccccggtgggtgggtctccagccaggtatggggtcagacaggctttggtcgggctggagggtgaggagctgtttctccaatgaggcctggtcccaggactgagtcctcagtgggcagggcttgttggtgtgctgtgaaagtgcaaggcttgggggactgaatgggggactcccttggacatgggaggaagagtgaaggtgggggctggggttgctaaactggttcctcctccagggaagcaagccctgccctcctggagcttccaacctggaggtggggaggtgggctggggggaagctttagggcacagctcagagaaggccaagcaggcaaggttgtggggcacctggaaggtgggtgtccagcggcctggctgctgacctaggctcagggaaccagcatttggtgggtgagctgtgaggaacgggccttgaccctaggctgcagggctaatgagggcctttagccagaggctcccagcacaggtgagggggaaactgccggtgcccctgtgccctcgcgctctcccagccctgcctctctgagacagatttaataatccatgtctgtctctctctctctcagttagtattgcaggagggaagctttacttctaaaacttttattgatccagacactaataaaagtaaagggtttttttttcttctttcctgctagagcaaagaacatcagacatcagagccctaaaacacaaatgtgttttcctcctccctagatctgggagggagttgtgggttggccttgttcagatctagcctcttcaagaagcctccctaacttctcaggcctgcagtcatccacctgttccagagcagttaaacgaaactgccacatgtgcctctgtctgaccccagaaggctgggctgtcacagaagctttccttcccacctgaggtccccagggttagggagagacgccatgggaggcattcaagacctggctcttgatttcttgtgtctctcagggtttggggtttggttctttggctgctctggtctttgtttttgcatcttgatttcatcaggacttactgagctcttatactgtgtcagaccctctcttaagacacagaaatacaacacgtagagcttggccacacacagcttaccttgtgatgggagaggcagataagaaataagcagagaaacaaagtgattctgctttgggaaacatagtgaagttcccctactgaaatgtgagtcagggaatttctgtctgctttgttcagcacctgtgttcccagtgcctaaatagtgcttggcacatagtttgcacttaaatatttgctagctgcatgagcaagatgctatgaaggaaacaagccaagtgttccactagggagtaatgggggcagggcaggacctgttgtagatggagcagtcagggaaggattgagttgcagaagatgccagaagcctgccagtttgctgttagagtgtgctggagcaagaactcctagcctagggagcagcaagtacaaagtccttgagcaggaaacagagactttggtgtgtgtggtggggggcgttgggtgttgctggatgaggtcagagagtaggtaggtcatgactgccaatgtctttcacctgggtagcagttcagatttattcagtgcagtggggagtaattgaaggcttttaaggtgaggagttcagtaatctgatttgcatttctgaagggtccctctgactcccctggtaggggtaaggggaagcccagtggttggggaggctgcccggacagcaggctgcctggggaagatggagaggagtaaacaggtatgagggatttcagagggggtagcagcaggatttgtgttggattggattccaaaggccagggaaaggaagggctcctggctttgctactgaggctccacgctggacatttcagacgtgaagctccgagaggtgtcccagaggcgctgtcaggcaagcatggagacacatgggtccggagctcagaggaggatagggctggggatgcacttaggagtcgtgagcatgctggaggtatttagagctatgggagtggaaagaatcaccaaaggaaagtgttgtgctaaggaagtgtctccgaaacagccctgaggagctccagcactgggaggaaaggaggtgaggtgctagcagcctgtgagaacagaggaaagctggagcagggtggcctgggttcacggggtagtaaggcacagaaactggttgactttggcaacatgaaggcctttggtgtcctcaaggagacccagtggggtcggaacagacaggtgtgttgagtaggaaaaggaggtgagaaggtggcggggacagcagtgagcaaagaagtgcgtgaggacccagctggcccaggatgttgaggaggggagggccagggaggggcctgaatgttctctgtccacagcgtaggtttaccagcagcagctgacccagtggatctcagcctggagattctgattcaggagcgccgataggccccccacagtgatctttcccagctctctgagccctctccacccactctctggaaggcttgctcactgtgccctgtcacgtttttggactgaatgctgagtctgttgaccctgtgttccccccgtcagcccctttccttacaccagtctctctgggtccacggcccctaaataagagtatcctggagcctggcttacctcaagtgtctttcccagagcagagctagacttcctttacaccaagggtatttctctggaaggctcctttatgtgtttggcttctggagaagtttgagatgttttacacaatattttggtggccaggagctctaaccctcacccccaacaaccctgccccaagactttttgctggctctggggagggttcagaatgcatcggcttgagggtgcagggttggcatacacagctggagataacataatgtctgctagacgcctggtgggtttcagtgtctgttgaatgaatggcactcagatatttgagtttggggttcccagttgctttgttaaatgcttttcctggttaaccagtgtttttacatctgttatctgcaggggatagtgtattacctcattttatacatgaggaaactgagactcaggaaagtaaaaggatttgtccagggttccacagttgctaaatgacacgaccagaattggagcctgggcctgcaaaacccccaaattgggcctcttcttactgactaatcctgggggtgaggtagtaagggtggaggttaaggcacccaggtctcctactacctctcaagaatagtggccagatgttctgccagggctccaaggcattccttctgcctcccacccacctgtttcctctgatgctcgacaccccctcctctccccacatgcgcaccagatgcattcggctccaggaagataggatgaggcaagccttgaaccttgtcaaaccttggggatgcttgcggcaaagcctgtagcttttggggaggctgtttctgcaacaggcgtgtagggtggccctatggctgatgcagaactccccataggtaaggtgagctcagccggatcacatgccatgaccacacgtgagcatggaagacaaacccagagaggtctggaggcagggcccctcccggagaggcaaagccacttatgctgcctcctgacagcctgtgtggctttaggctctcgcttccctcctgctctgcccctcctactcacccagcagacttgcttagtctgggcttgggtagccgagacaggttgttttcaggcctcaaaggatttgggccacagcccagcctttctcagtgtttctcaccttctgtccttgtctccttatgggacggagcaggcatctggaaggtggcagaggggtgatcctgcctggaaatcactgagggtccttttatagaaagaaacaggctgagagaaagaaatgacttggccacagtcactacccaagaggctagtttcctgtttgtgcctccagctatcctggggcagcttccttcaccccagctgaaagcaggcttttgttacgcgctcactctcagcaaggctttgttctgtatcctctcggcaatcctatgaggtaaataatattatgtccatttttgaggaggaaacagagaggcctagggaggtgacttaacctgtccaagaccacacaggttacaagtggcagagtccgggtttgaacatagcctggcttcagagctcattttctttaccatcaggctacacattctgaaacttatttggcttccaggcatcacagaaacagagtgagggtgctaaatccttgaatgactcagcccctgtggagttggacctgaagacgcctcctggccttggcttttctgaccaaagatagccacactgggcagggcacggtggctcatgcctataatcccagcactttgggaggccaaggtgggtggatcacctgaggtcaggaatttgaaaccagcctgaccaacatggtgaaaccccgtctctactaaaaaaatacaaaattagccaggtgtggtggcccatgcctgtaatcctagctactcgggaggctgaggcaagacaatcacttgaacccgggaggcagaggttgtagtgagctgagattgcgccgttgcactccagcctgggcaacaagtgtgaaactccatctcaaaaaaagaagatagccacacagcacctactgtgggcccagccactccaggtgccagaatggcccacgcttctctgagggtgccgtagaccaggtgctgagacgcagacagtccagtctctcttcccttcctctccccatcccactcctattccagtaactaggcaggccctgcccacccttgccccaggagaagctccactcttgtggacagtggaagggcctcggccagcttgcctgagtcctgggcttggaaggacggttgcccccatctgccttggttccctgcacctgccttttcttccccgcatcctccctctgactgcccgcttttctctgctttcaccttcccctagtgttcctcttctttcgtgttgtgtcagaagccatgatttccagtcttctcatctggaagatgaaggaaaagatagacccgaccccacagggttctgaggctcaaactgaaagcctggtggtggggcacctgtgacaggtgagactcctcatcttgcccccttctttcttcatcatgaagaagagacactggaggatgtggagcagttggggcctgtggtccaggtgggatggagcagtcagggcctcgtggagggagcaggtgggaggaatactctggctgggatggacctcacggggtgtggcccagctttgcagctgacttgcatgaagtcctggcgagctggggagcccttgcaccctcagcttcctcatctgaaagatggggcaatggtaatgcctgtctgtggagtggtgaggaacaaatgagactgggccacaaagtacccagtgctgtgcccagcacatagtgcccaaagagggctgctatctcatctcttattcctgagatttagcttccttgttttgtttttgagctctttgggaccttcgtggactttgaatttttactattgttcattgtgtctaaaatcttcctcagaagccgagggcctctaacctgatcatgaattttggagtttcgttttttgttttttttttctttcctgtttcctgtataggaaaaagggacctgtacctttaagaccccagcaggcccaagtaggacactggccctttaaaagcacattacagagagttggaacatagcctttgttgaactagccatgattagtcccagcggacagggctggagtggcatgtctgggatcagggcggggctaggctggccggggccagccaggagcagcggacagcaggaaggctcgcccggccactcggcttcccgagcctggtggctatgctgagggatggtgagtggcctgagcggagcttagaataagagaggctgggaaagccaggagggaggcagccccagagcccagggagacctgaatgagctgggcggcagcagacaccctcagtgagtgactgtcacaggagctggtcccaggagggactccggagcaccctgcccctctacgcagacatccactgccggcccagaatgtagaaacggttaggagggacctgtgaaaaagcgggacaccaagaagagcactgttgctgtttttagtttttaaaataagaggaagcccagtgtgagttgctctgtcccccaggcgcggtgtcccctgtggtgtgctccgttgagaactgggaaatgccagggactgctgacaagttttctgagctgaggagcttggcctttgctctgagtggccgaacctttggctggctgggtggggctgcactggggtttgggggccatggtatctctgccccagctcctcagcagaactttgttttttcttctcccttcctgcttccactccctagtccatggggcccaggcccactgggtggggtggaggcgggtgggagactgggaagactgtgtctgggccaggagcgtgttttggctctgcttgaatatttgaaacagttgtcagaagccagatcactttggtgtggtagcgtctttactgggcaagtacccatttctgaaaaaaagtcagaggaaggattgggcttgttacagccaagtctcagtgcaggttggtcctaaccgccttcattgccacggctgggggcggatgagactgcctgccagtaggtgtcctcactgttttacagacagccacccaggaggtgacaaaggcagggctcagtacatttctggtgacccaggcttcctgtagttacttaaaagttggtgcatttggtcataggatttttgtaggtttggtgaaaacctgaggcattgacgggcagtgaagagagtttgaagttagagccgaagtgccaggtgtcctgttccacccttgtgcctgtgaatcgtgacctcaggcaagctgtttgacctctctgagcctctgcttcagagcagagggcgtgtgcataggcgcaaaccctggagggagttgtcagttctgggggaggctttgtggaggtggtggcctttgagccaggcgtagacggataggctgctggagtgcaaccccttgagcagaggcgtgcagtttagcatgatgagccagatagggccaagcagggctggcatggctgggttgggacctggaaacgtagcttgggaagctggattttaagtatgttgctttctcagttggaatcctgtgggccaggtggcagatgacagggctagcttagcctggagtcagccagtgtggaatgtgggggaaaagggcagacggtgaagtctgacacactggccttgggaagcccctggaggtgtcagagcctcattctttgctgcagttagctgtgtgagggtcagaggtgcagagacagccctacgtgcccttcccaggtatgtgggctcactgtggtgtggtgggtgagcaggtacttgagagccacaggtggctttggtgcatggtcactggcagcaggaggaactcagcagccacactcctggttttctttgacatggtgtctgagtttctgcccgtgccagtggcctggaaccctgtggcttactgagagccactttcctgctgtcttgctgctgctgaacactcctggttgtctcctgctagttacagcctgagaagcagctgctctggtgccccacgcagacttccagacctcaggctttgggaggaatgggcagctgacatccctaggcccatagccccacatgctcctgcagacatagtggaggcgctcagtggctgtgctggtggctggatcaactctgcccaggattggggcggggcgggggtggggggtggggtgccttagcatgatacatcttcagcaaattgtgccaggaggcaagggcaacccacttgacggggtaggatgctgaggtgcaggagaggcccatccgaggtccacactcctttggcccagtgctccttcccttcacatcttcacctcttctgtctctctgagctcaagctgccaacaaggagggagcctctgtcccaaatggtggctggaattgaagagatagctgagctggagtgaccactggggctggagtctagggtgccagcatttgttcgtagatttgtccatctcttcttaaatgggggtctttcagattcctgcttaaaacggcctgtactctggagcctgctcttgaggtaagggggtagagcaggtgaggtggtctggggtcagttggcagaggggctttttgagagctcagctgtggggggagagtcaggaaggatctgctgggcagagtgagagacagatcttggaaatgtcctgggcccaggaagaagccaggagcatccagagaagtgctggcaggaagggcgtgcgggaagggacagaatgccccgggaaggcagtctcagcccagcctggatggtaatgggggcagccagggctggttactgaggctgtgtatggagagctcgctgcaggtcagttgagccctacagccaaaggtggtggtgtccctgttttccagatgagaaaactgaggcacacaggttaattaatttgaccaaagtcacagagttttgtgtgtgtgtttttaaggaaccatgcctgcttaccaccttcaaccagcatagtgccaggagctggggctctgcggacaaatggctggtccttggttgaggcaggaaacctggccctcaaggatgagggaaggaggccatccctagatcaccccaacatgaatggcccacctggtcccaggaagtaacgtggcatggcgcccaggtcttgggtggaggagatgagatggaagaagatgctgcctctgcccccgcattctagggggggcccagcatgagctaaggagggcttcctggatgtggagagctgggaggaattagataagccagaggggaagcacttcctggagaatggaaatactcgcttttcagctaatttattcttttgtttcattatcatttcccacttgggtctcgcatccccagggccctgaggtggctgttggaggtatttatggtcccgggtggggtgcagggaccagttagaaaccagtcccactcaggccatgatgcatgggtgtgttcacatgtgaggaggagccaggcacagactgagctcaaggagagggaacgcatgggtcagggccttgaaacattctcaggagtggtgctgagtggagagatgggggagggcagtgggctagcatgtttgtggtgggctctagagcttgggagcttcagagttgctgcagttgtggctggggttggagccccaggtgctgtgcagggaggttgggctcttttcctggggctgggggtagggggactgtcactctccctaaactttctgagcagccaggctaagcctgatagtttttcctacaggccagggagggctgcagggttgtccctgctcagaagcaagaggggcaggggcagctagcccacagctcacttctgatttgcccaccactcaccctcgtcaatgagtgttccttagatgctttttttttttttttttcccctgagacagagtctcgctctgtcgcccaggctggagtgcagtggcactatcttggctcactgcaagctccacctctcaggttcacaccattctcctgcctcagcctcccgagtagctgggactacaggcgcccgccatcacgcccagctaattttttgtatttttggtagagatggggtttcaccgtgttagccaggatggtctcgatctcctgacctcatgatccacctgcctcggcctcccaaagtgctgggattacaggcgtgagccaccgcgcccggcctagatgctcttcttttaaaattcagggcacttcgctgttctgctgaggtttatgaatgtttaaaaactgctttgcggtccccaaagtaatttgacaagtctgacagctattgattaaaaacccgaaattattcaggctgcaggatgacttgggggattagatggaaagttttttgtttcttctctctctctctgcacccctcctcccccgcaaaaaaaaaaaaaagaaagaaagaaataagatgtggaaaggtaaatgtgttcctgaatgttttttgaaaactccattaggcttgcacagtttatacggggagaggatgttgaaggctgcctctcattcaggagccagtaccagcgccctctcgaatccctggtctctccggagctttggcccaagtcaccccaggcagcagtgagatgttgctattacattattacaggtgatggtagtggtgttggtagcagttatgatagtttatggtcccttatgttctagggagttgacgtagggtttttgtggctttctctgaagtagctcagcgtgtgaggaaatggcacctagaagggggaggaaactcgttcagggtctgtgatagaccttagatacagctgggatagagaccaaagactccttcagggagaggaacgggccgttgctggggtgctgggctgattggatgcctggcctccaggcctgactcactgtgaggtaggtgccaagagtgtcccacagagggtgaccaggccgttagaaccccagctttcacttctggaccatgtgacctagccaagccactccctgtctctaagcctcagtttcctctttagagaacgtcctaaagcttccattgagccttttggattaactggctcatgtattgccccatgagccagggcttgtgggacctgagcttgaatacccactctccctttcttctggggcagtgctgccttttgtgcagagttgttgggagaaggccatgagatgatgtttgtactttggtgagaacacctgcaactggcacatggtaggtgcttagtaagtggctgttaggtccaggctgccacagtgtcattcatttagtcagcctatattgggcaccacgggacaccaggcctcacagcaagcatgagctgtcccatcctcctgttttggttgcagggtgtggaccctcctctgccagctcagccctgtgatgtggggggaagcacaggctcccaggggtgagggcagaaggccacgtgtctccctgtctcacagcccagggcgttctgtgtgtatgggggcgtcacaactgggtcttggtgactgctaggacctaccccttaccttggcctgagggaaccctgggttgagagggaccacgcctctgggccctgtcatccctggaagacttcccaggcagggcagccaacctttctgcctttttaggacaggctctgtctccccagggccctgggagccaccaggcggctgcattcctctcctctcccctgggatcccagctgggccaggagtgagcactggccttctgagcagccggttcccaggccagcggggcaaggctgggcttggggagagagctctgctggacatactaggcagggcgctgccctgtttatgtcctgccgtttgattcccagcaggtcagtgcattcattgtgaccatgtccagactctctttttttccagtgtgggcagacgcttctagcacagcctctggacctgcctggctatgacaggcagaagcatgattggcatgttctgacctgatgaggcctagagagtctgctgaagtcctgactgcagaaccatcaggtcctgccagcctttgggtgggcaccaactctgtggagacaaaccttgtccaggatttctcttccttccagacctggttggggtagtggacagtggcttgggaccacacaggctggtgggctggagactggggctggagatggctgtgcttgggagtcccaggcagaggggctaaaggggcctcctcacgggggtctactgcccactgctaggcacaccttcttctcctttcatttcgcctcaggaaatgaagggctttttaaagaaatttgaggcatcccagagcatttgggcagatatgattgatccccattttgcagatggggaaaactgaggcatggagaacgtaaagcgtttgagtcgtcacgggacaggaacaggaaacagcctgggaagtccatatcttgtcactccaaattgtcaaaagtgtgacctatcccagaaatgtcagccttgatagcagcgtgtgcatcgttcaccagtgttgttcatagctgtgtctccagctcctgacatcgtggctggcaatgaggtgggcgaatggaacagaccaaagaggcatgaacagttatgagcaatggatgggagtcactgacacccctgccctcctgagcctcccgcctgcatggtctcatttgatccttagagcaacccatgaggaaggtgtgtcgttatcctcactacggatggggaaactgagtcctagagagtcgaatgacttaaagtatccaaggttgtatatttcataaggaatagagactcggtttgctctgcagccaggcacccttgacactaggccctctgtcctcctgcccgctcgcagctgcaggtgcatttctgtagcattcacttgtgtgcgcgcgcgcgtgtgtgtgtgtgtttaatcccagggcccactgcactgcctgcctttgtgtactgcccagcccattaccctggcagccctagccatgcagcatgtcttaaaggggccccccggctcctgcttgcacactttcagagacagggagcccactctctctaaaaccagacgagcctggcccattcaaggacagctgtgactgagctggaagtggcctctcctggtcccagccttgccctttggggccacacagggcagctccctctgagctttcgagatttggagggtgaccctgagccccttattttccgaccaaacaatcccactctcaattccccccacccaatagttgggaacacccttgctgtgtcaagtagggatttttaattactgtaagtttcggtttggggtcctttccctccttggaataatgagtttgctgagcttttgtgtcaccgaccttttaagagaaaaaaggatcagagttgaaaaacagcttgtgggttggctggaacgctatcagataaggctaggccccaggagccaggacagtgtccccattgttctgccaccagccctcacaatgagctgctgttgggccctggcgctgtctctcatagcagctccccgtgccttgtgcccacgtttcctgggccctgggcaggggctgccccatccctgtatcccccggtccttccttccccacctggagtgagtgggtcacagctagtgggttagctggctgtggacctttccctgctgcccggctgctgtggacctttccccctgcccggctgctgtggacctttccctgctgcccggctgctgtggacctttccccctgcccggctgctatggacctttccctgctgcccagctgctgtgggccacccctggacgatggaaaggccaagccaaggctggtgcagttagtcttgaactccgctgaactgggttcacatctgactcggccacttgctatgcatgtgatcttgggcaggtcacctcaactttctgggtgcacctttttagtcctgacaggattgtcacgagaattaagtggaacaggtgggagattgtggccctgagccgggcttaggtagcgtagtgtgagctgtctgtctggagagaccagggaccactttgtggtggtgacattgggctggcccttgaaaactgaggaaggactttgtttggcaaagaagtggagggagaggcagaatggacaggctcaggagactgcttggacatggacccctggaggataagagtttgcagctttgtcaggaagtagctggggaggagagtccaggtcacttgtgcgaggggcctttcaggagggctcggacaccagcttgaggcatctgggacttgattatcttacaggccatgaggcgagagaggagggacaggagtgaggccatgccaggcggagtggcttgttcagtggagggtgctgctttggtctagacaggagaaggccagtggaactcccattcccctctgccctcccatgccctggccaagctcctctgtagcagcggagtccagggcaggtcaccctagccatggccttggctgtcccgtgtgtgacctggatgtcatggtgccacctccttcctgggagcagtaaggattccatgccatggaggacaggtaaagggtctctagtccctggagcgctgtcatggggctagtgatctgccatgtttagaagggtctcggctggggccgtggggagcagtgtgcagccacagagggtaggatgagcctcctaaccttgagagggatgggggaagcggcccatacttggacagagcaagggcaggggcatttcccggagactctggaatgaacattggaatgctgctcttgggacttggccttgaacaggcagctgccctgacgacccaccctcaggccttcttcgtccctcctccaagggaacaaccacgtcaccagggtttgcaggctgagggagggctatccctatccccactgacctcccgttccctctgagcttagctgaccttggctgctggtgtgttggggttttggtccaggaactctaaggctctggaccttggagccagccagacccaactttacccacaaggagccccctgcctgacaaggagccagttctgtgacagaccttcccagcacagcctggatatggctgtctgcccagggagcccaggaaggcttcagggaagaaggggcactgaagctgggtgctgaaggttgggtaggaaggggaaggacagcatgtgcctggggccctgcctgagactcctgcttcctgggatggaggggcccagcaggcaggccgctgcgagagtgggcctggtcaggtggagcagggaggtagatgccagccagtggctcagagtgccaagttctggggctggcattgaatcccgtgtggtctcaagaggggatcccttcacccccacaactcaaagggctgggaaatacctccccgtgaaggcgctgtcttcacagcactttcagcatgtgccggctgccagtgttttctgggtgaagcaagccaccttcctcctttttcagatgaggaaatggacccaagaggtttgggtgtcgcagcaacactagatcaaagatgggatgctggggcacatctcttgccctccctggcaggcctcagtttctcccctgtaaagcggggtgaggtcagcatctgcctcttgggctcgtggagattctgtgaggtgacttgtgtggtggttcatgtgacgcatggcccaaggtaagcccggcctggggacgccagctccaccctggtgggaggcaggcagtgtggagtccacgccctggtttgagacctgcttctgtaggtagtagaggtgccacatcctggcagggttgttgtaagaagtagctcagacctgggccgtggaagtgatttgcaggggtggaatccccatgtgaaggccttttgccctccttggtgccacctcgcctaggggaccaaagctctagtctccaaggaccacaagaggtcagaggggaaagctgtcatgagactgagctaggcacagggtcgggaggatgccgtgggccatgcaattgggccaccttctcttccaccccagccttgggcagcagagagggacttgacccagggctgggggacggcagaagccctgaatacaggggcatcagcccccagataccacaccacatagggtagctgtgggcatggctcctggactgacctggttcccatcccagcagggggccttgggcggctcaagtaactgctcctccctgagcctgtcatacctttctgtaaaatgggtagatgaatactcctggcagggctgtgtgctgttgaaatatgaaaaaagggatgtgcaagtgaccagctgggcgctcaccttgtgctgactagaggtgggtgcctacaggcatcccttcctgggagtggaatgggagtgaggtagagaccagtgcctgcttccctcctttcacctgagcgtcccgggtagggaagctgagcctatccctgcccctttggagcctgggcagtctttggtacccatcttctgccctgcctctaatgcgctgcttccctaggctggcaaggcagaggctggaggtgaaaaaggaagtggcccaacaatgccagcatgggatgaagccagggtaggggagaagcctgccttgggtgactgatggagcaagcagtccctgctgtgaagtggccagggactgctgcaagcacaggacagggctggcttcccagagaggtggttcttgggccttgaattggtcctgctgggttcaggaagtgaccaaatgaccatttttccttccttagccccctcatcttatcagctaccaccatgggcacaccctggcagggtcacagcagaccagctccctctgggcccagatgagggagggaccgaggacactgtgtttcagggcctgtagactccaggctggtcaggaaggaaacgcataggaacgtgagtgagagagtacgggtccactggccctgcctccaccacccacccgcttgctgtactatccaggaaggagtagcctgggagagcttgcgggaaccacttggggcctccctgggcctgccctgcccctattcctcttcctcccagagagcttgggctgcagggatggatgcagcctctgctttacatcccaccccgtggagaagctcccagggaagcggggagggtcatggctgcccaggtaggccgggccagtccaaggtgtcttaagggccttgagcttccctacagccctctcttctgccaggatcctttccaggtcagccagagcatgcttgtgggacatggtggggaaggaaggggagggctctgcaaccacagactccaggatctggctgttttggggtctggcctgggcctgctgggctcctggggttgcaggaccagggtctccttgggtttccctgggcaggcccagcctgctgaagcatgcctcgcctctcctctccacagccagctcattcatgcgccccaggcaggaggcggcctcagctcaccagctccccgctctgtacttcctgggtccctaccccaccctccctggctcccagcatccttacctggcagagattttccaagctaggccagaaagcagcccaatcccagccagtgtgacttccctactatcaggcagggcgtctcttccactgaggtatgaagccccatgtgggagggaggcctggagtccaccctgggaggtgggcggctcaggtggaatctcagcccagggagggcaggcccacccacggcactggtcattgccgtgatggggaggaggccaggccgctcgagcaaggccttgagggattatcaggagaagaggcctgttccaacacagcggtgtggcggtgtgatgtggtggtgtggcggtgtggcgtggcaggtaggccagtgcccctttgtgaactggacctcccagggagagtgcctcagaggagcagaggcacatgctgggcttgtccatgggcttaggccacaacgggaagccccaggtgggagtccttgtgggagttggggagggttcccccctgtcttgaacttgtctcacagttttcctctggctctgcccattccctctgctttcagaggccagcttcgtgctgggtgtggagaggcagagggagccggttgactggggctcctgggctggcctctgtggggtatctaagggttgggattccctcagctctgactccttacggcatctagcatgggactccatgttggggagggctcttatgctcagagggctgttgccatggagatgtggagcttggggtgggagggtggctactgtcagcctgagtccctctgagcagggctcttcctgctcacctctggattcttgagcacccatggagtgggcctcagcccgctgacccggggcagtcgcagaaatgagtgtacagggtatgcatcctacagggaagtgtctggtggctctgccaagctgcgagcccctcaaggtcagggaccaagcctcagcatagcccaaggtaggggtcttggtttggcgaggcagggagagaatgatggactgagcacttggaccattggaaccaggagccaaagggcatagggcgttgggggtaggaggtccatgtgggctaagcctggagtaggtttttcaccaaccccagggtttgagccctggacacaagcagggctcagcttctgcaccagagatggtcttagcaggcccagcctgtcctcacgcttttcctctgtcccaccgtgggggctgggggctctaagaggacactgctctgtgctgctgactttggagagactttacctaaccctagagcaggtgtcatctgcggtgctttccctgtgatgcactgaggaaacaggctcagaggagaacgatttccccagggccacacagcaggggagcagcgggcccaggtctggtctgcgtttgggtgccgggtggcatcagccctgtgctctttgtgcctgtgtcggagccactgacctgggccctgagtcccagcatggggaccccgatggagtgtgtgtcttgggtactgtgcagagactgctgcatcccttctgcttcgagactcgcctcgcctcgctgtcctcatctgtaagatgggagcagcagggtccctgtggctttccctcgtgtgggtctgctggtgtgggacagtgtatgaggaagggctgttggcagtggtatgctggataaatgttggggcagagtgactgctcagtcttggacaaggaccagtgcaaaagagaggggaaatgggaaagcgcccagaactgcagacagctgcctgggtcaggcgggctttccttgggtctctgagacttctcaggagccaagctggcccaggccccgcaggctcacttgcaaatattaaccccggagtggcgcctaatcctcaccttcttgctctctgagaggctgagcccccagccagactcttgcagtcgggaggaggttcccaccagtctctgtgacagccctgcccccagatctgtcttaagacagaaaggagagagagtggagaggagtggctgcctgctggaaggggcacggccagggcagatgggtgggacatggcaaccagcttgacccgggctgtgggggcccacctgacacacctactgccaccccaggtcccatctgatgccgaggctgaaggagtctcgctcccacgagtccctgctcagccccagcagtgcggtggaggcgctggacctcagcatggaggaagaggtggtcatcaagcccgtgcacagcagcatccttggccaggactactgcttcgaggtgggtcccatcacaggggttggggtggacaccccatcctctcctggcctggctggtctcctccagacatcctcctggagtccagtctgctgtggcctcagcaggggccagggtcttggggacagtggctagtagttaccgatagctttcagctcctaagagacctggtggagctggggtggaggctgtccttcctactctctaggttctctggaaatgggccagcacctgttctccatgctagcctgaagctgctggggcccccagtggatgacagtgagtaggggaaaagcctgaatttcttaagcaccagagcccatgtcttagagcctgctcacctcccaaatgcagtgtggatagcagagagtctccccttgtctgggcctgtttcccactgtgaacaatgagagcccaaatctgtcctgccctggcattctgcgacctgaggtttgaatgcagagagccagtgacccacctggggatgacctgtccagtccctcataggaaatgggggatctgaggcccagagaaggcacaaagacatcagaggtcacacagcaaggctgagaccaagccgggagcagggttactattgttgcaggtgttcctgggagttactaattgcttctgcagttattcatattgcttcctaccagtttctgggaagattcctacccccaataatcatgcataactaggagagctctcttgtagaggaatgagcctggtaatgaaaagcagccacttggggactagtgtgacaatctcctggcacccccagccctggggaaaaaacagaatggtgcctggcacctgccccataccctgtgcccactggggaccatttctggttcaggactcctggccaagccaggcttgatctgggttctgacttccttgccagggatagggtgaagatggccctgtctgctggttcacagcagggggttctgtggagggtgcaggccctcgaatgccgtgtgaggagtgtgcttcccctgcagagacccgggtctgctgctggggacagtggaaacacacagcaggaattgcccggactggctcccttacctggcaggagatgtctaagctggaccagaggttgagtgagagtcagacagagagggaaggagaagggtcagggactggggaccctagggcctggcacatccagacagtccgagtctcatttctccagtctggcataaaaaatatcaggcttatattaccattgttgtcactgctgcttgacggaagagaaccctcagagttgtcagctgaggactgaggggattctggtacctacctttagttgtctccttggttcttgtggttccgcctttagggaaagtacgctcgggttaagcattgccctctgacctgggcaaggtcttcgttcattccctcttcccatctcagggagagggaggttagagttaggaagatgctttcctattggacagagggcactgagggacgagtgaggagcctgctcgtgcaggatggggccactctccggctgctgacttgccctgggacagtggctctcaagtgtaccacctgcaaaacatgaagtagaggcgtcatatgagccttgtcctggctccttcctgaagctgtgatgcagacctgatggccagagtcccctgagcctccaaggtcttcttccatcactgcctgcccttgctgtggtcccttccctcataacactgtcttgcctgctccccacaggtgacgacgtcatcaggaagcaagtgcttttcctgccggtctgcagctgagcgggataagtggatggagaacctccggcgagcggtgcatcccaacaaggtaagcctgcgcccctctcaccaaagcatgggggattgaaggtaggctcagataggaggaaacaagagagactatctctgtggtgtgggctgggattgggggtggtcagcctgcatggaggcagggcccgagtggacaatattggtggactctgaaagagacgtttgagttgaccaggttgagacaggtgctgtgtgcctctgttttctaagctacacattgaggctgggcttggggaaatgagtgctggaccctggggtccttctgctgggaccccttgtccctactccccagcccctggctgagttctgctcatcttccccttccaccttagatgtctgcccctcctccaggtgaggacccctgtcccaggctggtgccctctgtgttcccactgcccctgggctcccccattaggtcctgggagcccccactgtaatccctgcttctgtatctgtctccctagccgacttgagggcttgaccaagtcctggtcaccatagccatctcttaagttacagtacagaccagcatattaaggaagagttaataatggcatagcctgtgacgtgtcaggcgttgtgctggcctctctcagtctcgccctctatgagatgggggttttaccttagtgccgtttcatagacaagcaacccaaggctccagttaagttgcttgcccaaggtgagtgagcttctgtgaggtcgaccagagatccagcccttgtccatcatgccctgcctcatcctgacttagggcctaggcgcccgctgccgcctccaccttcagagctcctcctgggtctgaggactctctcaggctctgggctggttgggggttgcacgtggcacccccagctgaccaccctggacccccgtgcacatacaggacaacagccggcgtgtggagcacatcctgaagctgtgggtgatcgaggccaaggacctgccagccaagaagaagtacctgtgcgagctgtgcctggacgatgtgctctatgcccgcaccacgggcaagctcaagacggacaatgttttctggggcgagcacttcgagttccacaacttgccgcctctgcgcacggtcactgtccacctgtaccgggagaccgacaagaagaagaagaaggagcgcaacagttacctgggcctggtgagcctacctgctgcctcggtggccgggcggcagttcgtggagaagtggtacccggtggtgacgcccaaccccaagggcggcaagggccctggacccatgatccgcatcaaggcgcgctaccaaaccatcaccatcctgcccatggagatgtacaaagagttcgctgagcacatcaccaaccactacctggggctgtgtgcagccctcgagcccatcctcagtgccaagaccaaggaggagatggcatctgccctggtgcacatcctgcagagcacgggcaaggtgaaggtgcgtgcaggcccctcggctcctgacacaggctgggcggcagcactgggttacctgcccttcctcacatccgtacatttcaggcctaacagaggccttggaggcaccggtcactaccagaagggctccctaaacccaaaagttctatcgtgggctgggggttttgtactcctgctctgtggctggagctgatcactgaggcctgtgtggagccagtggatgggattgcagctggtagtgagggagtgggcttgggttgaggtgccttccaccactgctgcagaggaccgaccccctgaggcgccaggggaacaggctgggtggccacggctctcccagcacacaggtcccacaacgccaccagccgcagtgagccaaacacacgtcccctgtggggtatggagttcggcagacctccccagcacgatgcacagatgagcctccctcacagctctacctcaccccacactctcacccagacacacagattgtcacacaggtagacacagtcaaaattgtactattcgagggttagccagccccaccccagagcctcacagaagcgggaatcgtctgagacccacccaggcaagtcctagttcagggccagaggtgctcaatgtccatctccatgacccctttcaccttccgctcccgaagatgggcccagcagcccaccatgcaagccgtgcctcagccccacctacccggtttggggacaaatgggctcctggaccagggtgcccctaggaaggcagtagagcatggtctgtgggcctcgaaggcgaccttctctctttacatttgccacctgccattcaggaagctggccaaagagggtgggaaaaaggggctggacttgaggcctctgcagcgtggatggaccctggtgctgggctaaggactgggcctctgccctctggacagtggcgtgttgtgagccaagtggcaggtggctgaggggcaccctgtgtcaaggtcctaggcccttagctctgggtcggggaggcacagttgggagccataccccagggcagagtccagggcacaagactcgtggaggtccctcaccctctcacctgttcctagaggccctggaaggggaggccatggctggaagcctcagcagcctctgcagcccccctccctcttgcacttgctgtatgctgcaagtgcagggctggggcggggacctcctccccatggacccgcgatggggagcagttttcctctgtagtgctcagctacctcctccctcaccttctcccccagccttcagacttggctggctaggctgcacgttgggccagctctggctgccccgtccttaacatgctggtcaacactggggacgtatgctgggaaacggaatgaatcaaggacccatgggcaccagagagggagtgatgggggctgcagaggctgcattattttctgcagttgtgtctgatgtttcagtacctggttcccagggctgggctggggctggcctgggaagcggattcctccctgaagcagcctgaaatgataggtatgtccaggtgctcgtggagggaggtgaagtcagggctgcagccaaccccaaaggccctcagtgggattggggagcagtagatagaagcatagaaagtaacttgtgctgctggggtgacaggtacctaagcccccacccctggaatacttgggaactagcccctcttccgtctccacggctagaggagtaacggagtctgggaagcaagggacttggaccagatctggccccaggtggctgtgtggccttggacaagtcattttcctgctgtgtgtgcattggtttcccccttattgggtcctggctctcaggaagttctcatcccagcactggggcctggctctcattgcgggagttcaggaaggctgcagtcctgagcgggagccctggaggagccccgggggagatgcacctctgacccccgctttagtgtattcagagaatgagaccctggaggtcgcctgctggtcaggaaggggtcctcaggccacatgatccccaggaagccaatgacagcttcccctttgcccctgctgtccctctgtgcctctgctgtgcaccctgggttcctgtgtctagatctcagttctgttttaaaggaccccaaggtcgtgcatgtcggagtgaggaatttcttgagcacagatgcctgggtccacccctcctgggcaccttgcaggctctgtgctaggtggccccctgccctgactgtcaccctcccttgaaactatgacagtttttcctattttcttcccctcccccaagccacaggttagttgtgagcacaaggaggtgggggcttctgagggagggtgttagtatctgcatggttgctagagtagggggaaggtgtgggttcgggctcctgtgctggggttttcccacaacactgtgtgtgggacctgatgggcctggggctgctaccctggattgccaggtgggcagtggcgcctccaccttccctctccagccagttgcacatcacttcctgctctcacctgcctgagcatggtggctcacgacctccccgggcagtggggctgcacagaaggcatctgtgtctggtgtgggagcccccaccagagtcataggtggatactgatggccattcttaccatgagacagggcagcctcatttgtcctctttggcactgatggtgcggggagaggcgagtcctgctgtggtcaccaggccaggcctgatcagggctgtacatggaaatgagtccattctctgtggtggtgggggcttgtggctccacgtggcatgctctcattcaggctgcctccatccatagacccggctctactgtcaccagttctaggctcctaccctggctgggggcccctgccctgcccacactccccagcagcccccaaaggtgggcacactgttcctctccgggacccccgcagcttggtgatggaacagcctcaaaatgccaggacttctctggctaggtctggaatcctagggccctccatgccaggccagctcaggtcctgctctctccacctcctgcctccccaggacttcctgacagacctgatgatgtcagaggtggaccgctgcggggacaacgagcacctcatcttccgggagaacacactggccaccaaggccattgaggagtacctcaagctagtgggccagaagtacctgcaggacgccctaggtagggagtgggccagcagcagggcagagggtggggcagggcccgccaggtcctcactccccactccctgcccacttgtccataggtgagttcatcaaagcgctgtatgagtcagatgagaactgcgaagtggatcccagcaagtgctcggccgctgacctcccagagcaccagggcaacctcaagatgtgctgcgagctggccttctgcaagatcatcaactcctactggtcagtgcggtgcccaggtctccccaccctgtcgccttccccatcctgtccttcagtgtctggcacccgcagtgtgcctgatgctgcctggcccctgagttgtactgacttgccagtcccctggcctagtcccttttgagctctcaggtggggcagcgttcagcatgttgctgtggttttgtgatggaaagaacctggacacgccagtctgccgtctctggtgatgagggagcgcccttcatgtgccgggggctattgtgggtgcttgggctgcagcgggagtgagactggcaggccctgtgtgggcccccacttggggtgggcggatggcttcacctgaggctcctcacctgtccgtgggagctaaggtgctcatgtcacagccttgtgatggggccaagcaggggcacgttgggggcctgagcaccaggcaggcctcttgctgggactagagaataaacagaaaggactagactttgaagtagaacggggtctgcagactctgccagccccagaaagcagcagggcatgcagcagtgggctgcttagacaggcccctcagcaggaccggaatcagtcccggagaaacttgcggtaaggccgacttcacggccaccagcttgctcctgggatatatgtgtgtgatggccagccagcctggtgccgagtatagcctcgttctgtggtggcacacaggactgtgcgggagggccttgctgtcagcccaagcagtgggttcatattcaccccagaggagctgcccaggtttaacctgtgtccccctccagctcagggcttacagcccccacccacccaagcctccgtccacagcctgttctgacaccactctctccccggccttacctcactccttgttaggttcatctctttcactcacctgcaccttcccctgcatacactcctgcccttcctgctccgaggccacacctggtaccctctgtcgcagccctgatcccatcaggatagggttgtgcctgtgcctaaaacatttcctgtgaatgctggggcaccctgggggcaggtgagcccaccacctcaggactgggcacacaggaaggccagagaagtgtttgctgctccccaaggacaagaaaaggcagggggaatgggcaggccaggagggttggcacccagggccttagcccctgggctatacaaggtgcttgcctgggccaaatgggcacctcaagatgggccacaaatgtgcagctttccacacccctgggccggtggaggagagcgactgtagggccttgaactctgggaacacacttcccattcccagctgggctgtgctttccccctccccctcttccaggggggctgggcatgtgactcagggaaaacatatttgtggacagtgattttccatttcctctttctggcatttatcagaggcacctctccattctggacaaggccattgatagatgtcaccactcaacacctgccccctgtccagttctgtgccaggcactgtgagagccacggctaaaggtggctcaccttcattccccgctaggtgtgcccttgatgggtcagccagcatgcattgcaggagagcctgctgagcaggctgctgggcctgtgggggaagaaatttcaagttggtcaagcctgttgtagccttggggttttagccttacgatggctctgtgagcttggcagggcaggccttgctctcagtttaggggagagaaaacccaagccttccaggagggctagggccttggtcagatcaccctgagctcatggcagagccaagtgtagactgagttcacggaccactggggcctggcctgccccaggctgggagatgcatcttttagggaaaaaagataggaaacccacttaagggttggccaggtgggcctgaccatggcaggccaggatgcccagtggaaccaggagccccattgtctagggccagctctgccggcttgctccatcaccctggggcagtcactacctccctttccctccccatgtagagaatggagagctgtgttgtcccaccgtgttcaggggtagtcccatcttcttgatctttctgagcttttaggaaatcctggattcctgtgacattattcaagcaaaggaaattagtctcaaagccagtgatgggaacccaaggaatagtggtctattcctgttttcctcacttccccctagacccagatgcctgctgtttgggttgaaaaatgaagtagacactggcagagaggtggggagggcccagaccagaagctggagaggtggttcagcactggcccttggcagttaattccggttaggacggagagccagctcctcatgcctcctcccatcccacctgcccggcccttcactgagaacccactgcccgatgggagcctgggtctccctgctcctcctcctgcctgggcacttgctccagccaccctgtattgactgctctccccagatggctgtgtcctcagagctcagacagcggggctgacctcacgcagctggcggggtagagccaaggttggaatgcaggttcctgctctgtgcactcctgtcctgggcccctgcctgacagccaagcccacctttgtctgtccctacacagtgtcttcccacgggagttgaaagaggtgtttgcctcgtggaggcaggagtgcagcagtcgcggccgcccggacatcagtgagcggctcatcagcgcctccctcttcctgcgcttcctctgcccagccatcatgtcgccctcactcttcaacctgctgcaggagtaccctgatgaccgcactgcccgcaccctcaccctcatcgccaaggtcacccagaacctggccaactttgccaagtgagtgcctcctccctcaccaggcagagttgggcagggctggtgtccacagggcaggccctgggggtgtttctgcccccaagctgagcagagaccataaacaggccctggttttgtccctgtcatcctcagtccttctccttcccgctttttaaaaaataaaatctccacaccctgtccttctactcaaggtatatgtcattttggtatgtttcttaatttttaaaggtgacgacatgagacatttttttccttctgcttttttgaattaatgtattattataaggattctcacatatcccttaacattcattaagccctgttttgaaataaatgactaatattcctccaagggggactggcccatatttccttaatccattccctgtgcttgggcacttgggttgggcaccaccatcctggtgtcaggctatcaggatgtctttgctgataaagcactattggtgtttttggctgcatccttagagcaagtgggcagaagtagaagggctgggtcgtctcactgttgttcattctcaaaacatagattgagccccatcctggggccatctgtgtgctgggctctgacggcaccaagatgaatcagtcctggtggcgctcagcacttcagccagggagacgtgtggaatgagcaggagagcagtgatagacacacacgagcctcttaggagggctctcagcttgttgggagaggagacaggaaagcctccagggtgacatgatcccccaactgcatgtcagggtgaggcgttcattgtctcaagaggagcagaggctgggcatcccagggagggccatgcactgtgccaggtcaggagaagcgggcgatgagacctaagaggacagcagggacctgaaggccagacagggctgtgggagccaccagagggttttaaacaagggagaggatggccttcctctgttctggatcctgaaaagctcaccctgacagcagtgggcagatgggttggagggagcaggatggtagccaggagacgtgaaaggagagcatagctgtggttccagcaacaatagcagaaaattcgcagggaggggagcgggtacaggaggcagtggctgcaagggacaaggttaggggtgattagaaggcaaaatcagtgggccgtgccatttgggaatgaggaagagggaggagttgacagctgccagagattctgtctcaggtgtatctgtatgggtagtggggtctccacttagggtagggagctcaggaggagggcatgggtttgggtgttgatgatgacttcaggtgtggcaggctgagtaggagggactcccaggggtggtgcctgcagatatattaatacatgcctgaaagctcattgggagacctgggttgagcagggattgagcatcatctgcataccagggcagtgaaacttggaggaaaagccgaaggacactgttaacaggcagtgtatgggggacacagaacattccaggtcctgagataaaaggttcagaaaaggatcgctggacttaccatgagcaaggagggccctggtgacctgggtcagagcatattcagctgacttggggagtgaatggagtgggagcctgccatagtggggaaagcgggtggtggtgtcccagtggagggagttcctgggcagggcctgcctgggcccagtagtgctcacccaactgccctctctccagatttggcagcaaggaggaatacatgtccttcatgaaccagttcctagagcatgagtggaccaacatgcagcgcttcctgctggagatctccaaccccgagaccctctccaatacagccggcttcgagggctacatcgacctgggccgcgagctctccagcctgcactcactgctctgggaggccgtcagccagctggagcaggtgcctgttgccgtggggcggaggtggggccaaaagctgccatcaggcttttagtgttcccccttccagagtaaccatggagggcagagagtttgcccaagtggcatgatcaggccaggtcctgtcagaacacactggggatctgtgggccccattttctctgtgggcaaatgctatgttcactcagcagtatctgccaaggctgccccactctgggtactagagctggggtgttccgcatgcactcagcctttagtggacaagcgccactgtgctgcctgccagagcatgtgagaaatagaattggatcgtgaatccgcctgtatgaagaagatgactcaagaccctgtacctccacttgtccagcaggaagtcgaaaacctttctaggattgcccttgaccatcagttgacaaggttactccctagacacctctgacactgctgcagtcacctgaagtgagccctccctagcccgagacttcactgacccccagcctcagcccacacagtgagcaactagttcttggacttaagggctgggtctaccaggaactacttcccgaatatctgttgctttctagggctccaagggaccaccttacttttgtaaggtgctgaaactggcctggaaggcccttcatgcctcctggtcccattccctagaggtgaccgctcagagcactggtatgcagccttctggacacgatctgtgcatgtgtaagcgcacacacacatgcaggcgcacacacatagagctcttttccttcttcagtttgttttaaagcaagaacatactgtgtatgctgctgtgtgcatttcttaccactgtgttgtgggcctctttgcttgtcagtgcaatctccaccacccccagggactttttaatgactgcattgtatgaatgctatttatttcaccagtcccctattgatggacacttaggttagtcctgacttttcactagaaataggtcctgttgcaatcaaaggccatcatttttgctcatttgtatccacttgcctttggctgtgagagacacaggagggagaaatggaaatgagggctgagaccctacattccacctgttccagtccctgcactgcagccaacactagtcactgtcactgccaccacttacctttcccctgtgctgtccacgtatctgcacaaccaggcaggaagaatggaaggtgatcagtattgtcacatcggtgatagggtgcaacagggatttgaaactcaactgtttgcctctcaattgcgtgctctattgcctgcatgagttttcacactttgttttctcacagagacctctgtggaagcttgtgcataaacaggtgaaggcagtgtccccaaagcctagaatcctctgccccttaagttctctaaagcgtgccagcaaggttcagatgggttcaggcactgccttctgcctgaccagcacctgagggtgcctgcagtgtgcttggaccatctccactggggctcaggtgccaaggtgggtcaggccccagcccatcccgtggagtaagtgatgtgagaggggctgtcacagaagcctctggatggagaggtggaggtgtggaaatgctgggattccatgtgtgctttcctctctgcggaggcaccagggcagggcaaactgaaggagaggcttgcactaggtcagcgtctcccactgtgggcctcctactcctgccctagaaatgtccgggagctggttaaaaatgtagatttaccgattcctgggctcacccccctcccagacccagtggctctgactggcagcaggtggggatctgcacttctgacaggctccgcagtggttttgagccatagtggctgcagcacatacagcctacccatgtggtcccaggaggtcacacctgcctcttgctgtgcctttacagagcatagtatccaaactgggacccctgcctcggatcctgagggacgtccacacagcactgagcaccccaggtagcgggcagctcccagggaccaatgacctggcctccacaccgggctctggcagcagcagcatctcagctgggctgcagaagatggtgattgagaacgatctttccgggtaagagctgccagccatgttgggtgtggtgggtgcgtgtgcagactaggcacagcccatctgtaatctcagatggggaaagaggatgcctacatagtgtttataaaacaagcctggcaagacttgagttgtacaggtcctaagtggtgaacctccatttgggaaaaatcagggaagccttcctagaggaggtgatgctataggtttgttttgttttgggaaaagtagcatttccattggtggaaaaggcattctagacagagggacaagcacaagcaaagacatgatgtgtcagagaataattgctggtcccaaatacccccagcatttccagatcccctgatatttgttaaaaatacacatgttcctggtatttcctgagcctgagtcagaatctccagaagtgtttagttgggggtgttttcaataggaattcggtggctctgccaggctttgaggctgggaacagcagaaaacataaagtgatgctgagacccagtcctggggtctgctctgcctaaataagacacacacggcagagtggaaggcaaaatgttcttgtttaagtcaaaatagagacatttctatcagttcatgttgaagcatttctgctctacccctactctcccctctcccgccagtgatccttcttaccccagcatgtgaggccgcagctgtagcagcagagttgggagtgtggtctcccccaaggtggtggcagggcaggcttttaagcaggggagggtgctgagatcaagaacctggggttaggggagcccaggaggggccagagatgcaggtccactgagtcttgcattgggtctgttcagtgagtgtgccaagtgaagacaagcagagtcacatgccaagagtttggagtggggggtgcagtagacagcccttgagaggctgagaggcagccgggcccgtgagttctgaaaagactgacctggtgtgtggcctgggcagccaggcccccactgctctccgtctttcctggctcatctgctgctctagccagttctcccaggcccgtgagcactgcagcccatctcagggagtggcacttcctctccgtctgaggctaagccaacccattccccattccaagccatatcaagccccccaagtccttgcagccttcagttccccccacccacattcttctctccaaagcccccctggaccccgccacagttgtgctttcttccaaggagctagcttctggggaggggccagggagaggccagagaaaagcgtagaatgaggaggaggccagggcaagtgcagccctcccaccaagtcatgctctccacagagcctgctctcattccttgtttttgccaggaactccagcccccgcctgccagtcaaacaagggagcggcagcaggaggctgggcaagaggaggtttcaccgggcccccacttcagttaccagtctgattaggaacaagagggaagaggcagagggaacccagtgactctgaagttggggttctcaatgcaggatccgtggatagcagagagccactgagttgtggcttagggcttagctaaggaggagttttccagagcaagccaggccccagtacccattgtcccaagatgcagctgaacagggaaggggtcttccaggcagcgcggcctgaaatgtgcagtgctggcccctaaagaagaggttctgtgcaggagcagccgcctcagcctctggtccccggattctcccactcctgccaccccagcgcatccatctccccagcgctggctcaggctgccaggccccggcaggttggcgggtgctgtcggtttggacccgccttggctgcactcacagttcttcttttccccttctttccctgtgtgtgcttgtctccctgcagtctgatagatttcacccggttaccgtctccaacccccgaaaacaaggacttgttttttgtcacaaggtcctccggggtccagccctcacctgcccgcagctcgagttactcggaagccaacgagcctgatcttcagatggccaacggtggcaagagcctctccatggtggacctccaggacgcccgcacgctggatggggaggcaggctccccggcgggccccgacgtcctccccacagatgggcaggccgctgcagctcagctggtggccgggtggccggcccgggcaaccccagtgaacctggcagggctggccacggtgcggcgggcaggccagacaccaaccacaccaggcacctccgagggcgcgccaggccggccccagctgttggcaccgctctccttccagaaccctgtgtaccagatggcggctggcctgccgctgtcaccccgtggccttggcgactcaggctctgagggccacagctccctgagctcacacagcaacagcgaggagttggcggctgctgccaagctgggaagtttcagcactgccgcggaggagctggctcggcggcccggtgagctggcacggcgacagatgtcactgactgaaaaaggcgggcagcccacggtgccacggcagaacagtgctggcccccagaggaggatcgaccagcctccgcccccacccccgccgccacctcctgccccccgcggccggacgccccccaacctgctgagcaccctgcagtacccaagaccctcaagcggaaccctggcgtcggcctcacctgattgggtgggccccagtacccgcctgaggcagcagtcctcttcctccaagggggacagcccagaactgaagccacgggcagtgcacaagcaggtcagtgctgctagtcagagggcagggctgggcacttgggcccagctggggctgtcataccccataccatgctcctcctctcggtcatttcacctccaccctcacccagctgccatcccatcccaccagcctgccacatgcgccaccaccccctccccctggcttcttcctgaatcctgtgaaccagggacactgtagccttggggaactccaggctcctctgtcagtgcccctaggggcaggctggggtcagagagaaagaggaggagagtgcattcatcttcggttccaagcctgtcgaagcgcctacccagctctgcccccacacgcccctcccaaaatgttttcacaggctggacaggccttcaggcacaaccacctggagcatggatgaccctgtcacccaaaggctgcaggcagtgtctggagtggaggtgccttgggctgacagcccagcctggccctgtcccccactcagtgcagcctgccccggtgcccccagtggcagggtcactcactgtcctcttggcagcagagtgtggtgctcaggaggccacctggcacctgtcagctctgcctttggctgccgtctgagagacagttcccgggtggggactgcctcggtaggcgctcagtcagctggaggtcccctcttcccaccgtgtcccagagttgcttgtccttgtggctcacctgggccactcccgcccctcctgcttgccctccacctccctgcagcccctcacagctgtgtttcattgtagggcccttcacctgtgagccccaatgccctggaccgcacagccgcttggctcttgaccatgaacgcgcagttgttagaagacgagggcctgggcccagaccccccccacagggataggctaaggagtaaggacgagctcagccaagcagaaaaggtaaaactggaccctggcggctcgggacagggcggggctgcctcccggcagcagctggtaggagtctctcccccaggtcccccagcaacgggtgctgctgtccttgtgaagggcccgtcacctctgagcccctgttccctgtgagaatagcagtcagtggggtctggaagaaaagcaacaagagggatggattagcagcttagacctgaggcttcccatctgcagattggaatcaccagggaattgtcttggatacagactcctgggacctctgggaaggctccttagcccaggcaactgaggcagttgagcttcctgaggacctgggggttgagggctgagggtgcccaagtgacatatagaagcccccctgagggaacttggtacctgaggaggcagaggcatgggtccccaggatggctgggagagccaccccagcctggcccccaaggcttgtgcctgcccacggcctggctcttcacccctctggtctccaccagggcctgggaaagaaacagcagttaccagcttggggggtggggtcaggctgccattgagatgttttcttccccacccccgggaaaagaatctactctaaaaatgaaactctcactctgccacacactctgccatctgctggggcaaggggatgcttcgttggtctcccaagccttccagctgtggcagctgctctggatctgggggtagtttttgtctcctactgccagctgcagtccatgtagacggaggaaccagcgcaggccccagaacggcaggcgcttctccactcccctctggatgctctcgccccgctgggccccaggaaagcctgtggcaacctctcgagcaagggtattggggtcagaatggcagaactccttctccccggcctcaggcgaggcccgtctccatgctgcatcctgccaccgccaccatccccggtccgctacatccacctgctttcaccatagttacatgaaggggaccgggggacagggaacacagtgctcccagagccagagtttggctggggagtgaggaggactggcctcactccaggctttttgcatccctgtgtcctcatggcgtctggcccctctcgatcccggcgttggcctttcctcgctcagcgcagagcacctgactcctctctgcagccacgccgcttcccagcctcgtccacatccctgctcctccctgatggttggggtctgtgctggactgaggcagatccagagcctggaccacctgcctttcagttctctctctctccatttcctcatgccactgccaccccctggctttagattcaaacagaggctgggaagctgggatcttaccctgctagtcagtcgctcttcatgtgacatggtcaccttgtctgggcctcagtttcccctcctgcagagctcccacctctcagggtgctgtcacatgtccttcatgtatccaagggttttttaacctttgtcatataaaagttcaaagccctagttacaccctcagtcctgggacttgggtctaagtcttcatccccgctgtagccatacaggtcaggctgggagtttggagtggaggccccacggtggggcacaggcacgcgtctggctgcagcccccaccagctgggctccttgggcatctccttgctatgtgaagtgggcgggtcacagccactggggcctttcaagtggggctccctcctacccttcctcccactcgggctgacgaagctgtgctctctgtgtcctgggtgctgtgcccgtggacgctgccctcctggtaggacctggcggtgctgcaggacaagctgcgaatctccaccaagaagctggaggagtatgagaccctgttcaagtgccaggaggagacgacgcagaagctggtgctggagtaccaggcacggctggaggagggcgaggagcggctgcggcggcagcaggaggacaaggacatccagatgaagggcatcatcagcaggtggggcccacacctgcctggcctggccacaggcacaggcagggcagccatcgctgccttcgaggaggcccctggtcggggagcctcctcaaaggataagctgaatgtggagagaggagggaagagagtgtctgggcagtgggagcagcgtgagcacaggcctggaggcaggaggtggcctggagggtgggcagcccatgcagaatacaaagctggggatgaggctggaccaatgacagctggctcccgacgggcctgagcctctacaaggagccataccatcttagtaagcactctcaggggcgctgagaagctggattggggggtgccaggaaagacagggaggaccccaatacagggtaagaaaagtgggaatgagtctcagttacgtatagtagatgaaggtggaagacacagcgtagcccccagattcctaccaagagtgtctgggtgtgggcgtatcagggtaccagttactgagctgggaactgttaagaggagtggtttgagtggggagggagagggggatggtgccagtctgatatcctgagttttaaggggcctgggttatctgggaaagggcttcagaggaacagcgggttttaatgctgactctcatctttttgaaggcttatgtcaggccccatgttggtgcctccatctctgtctctggctctgcctatgggtagggcatccctaccttggtgtcaggcagggagtacaatcaaccccagggtcccagtcgtggagtttacttccttctcagtaataccaggcacgggaggagagacagtgtgtcttgtttgaattggcctggtctaagaccccatcagctggacagaccaagcaggtgtgcaagagccaggaaggcctctgctccatgttttgtctatgacataagcccttcccagattcctcctatttagaccacctgtttctctgttcctgactgttgtttgctccatttacttgtagtttggttcattatgaaatagttaacatgagtgaaaccagggtggctagaaacctgctgttcacttgttctccagctctgctcttggctcaccttgtgtgtgtttccaagaatggaaatgcttttcaatttaactgccttctctacattgtgtgtattctctgatatttgcatgttctgaattcagagacttgcttaacacgttcgtttctactaaccaatcctggaatatttcctccttaatgtaaatgtcagttaggtagatagtgttcaagtattccatatccttactggcttttctatttctcccttcattccaactggtttttgctttatgtacactgaaactattcttaggtgcatatacatttaggctgtttatgtactattgttgaattaattccaactggtttttgctttatgtacactgaaactattcttaggtgcatatacatttaggctgtttatgtactattgttgaattaacctctttgtcattataaaatcactttctttatcccttgaaatattctttgctctgaaatctgccttgtctgctattaatgtagccaccccaacttccttttgattcgtgttggtatggtatagctttttttatcctcctgcttttaactcattgtcttggtccattcaggctgctataacaaggtaccttagactgggtaatttataaacaacagaatatgtattgccctcagttctgaagtctaacatcaaaatgccagcagattcagggtatagtgactctctgcttcatattatagtgcaccgttgctgtgttctcacattgtagggggtgtgagcaagctcccttgggcttcttgtataatataaaagcactaattccatttttgaaggcaaagcccataggatgtaatcacctctcaaaacccctacctattaagataatcaatcaccttgggggttaggtgtcaacatatgaatttagaaggtgacacaaacattcagagcatagcacccatctatatatatgaagtgggtttattttacgggcaccatactattgggtcttgctttcgtctaaatggttctgcctttttattggagtgttttgaccatttacatttaatgtaattattgatatatttaaatctgttgccttgtttcctatttgtaccatctgttctttttttcctgccttcttttggactgagtatttttttatgattccattttctctcctattgacttattagctttatctctttgttgctctagggcagggattggcaaactttctacaaaggagcagatcaaaagtattttaggctttgtaggccatatggtctctattgcaactgttcagctctgctgttacagcagaactatttgtgtgagatggctatttacaaaaacaggcaatggtccagatttggccctcaccctgaggctgtaatgacagggagtctgtcattgtctttgttcctctgtactttatgtatctgttttccctggctatttataagatactttttttttaaatcactggttgtcagtagttggattgtgatgttcattggtgtggttttcttctaatttcttgggtcttggatttgtatgtctgcagtcccacctccccccatttctttctctgggattcctagcacacgtgcattaggctgactcattttgtcccgtatctcactgatgctctgttatcttctttcttcattttttttctgtttcttctctttgatagtttctatgactatgtcttcaagtttgctaattatttcttcttctgtgtgtaacctgctattaatctgatccagtattttttcacagcagataattatatttttcacctcttagaatttcattttgctttaaattccatcagttttaattctcattgtgcttttacttctgttttctgaaacatgtagaatatatttataataccttgttgttttcatgtccttgtctaattctatcatctgtgacatctgagtctgtttttactgatttattttccgcctgcttatgagttttcctacttctctctgtatacttggtaatttttggttggatgccaggcattgtgaatctcacagtgaggtgctgaatgtttttgtgttcctttaaatcctttctgggggctttattctgggagacagtgaggttacttggaatctgttcaatcctctcagggtttccttttaagttttgttaggctgcgtcctgcagagcctttagtcttggcctaacgtggccctgctctgagggggtttccttccccgggtcctctgtgattcccagtgttggtgcgtcactgcactctcactggtacaacatgaactgcttctgcgattgtttcgtgttctcctttctgacggttcttgcctagcctggtaattttctcatctgcatgcggatattattcagtcagagacacaaggggaacccccactcgggagctatgtggagtttctctctgcctcttgctcctctctggcttctgccctgcaaatcccacacctcttgaccttcctgacctgcctgtctcctcaactcagtgaggctgctgactccgccttccctctgcttccaggccgttcactgggctctccttgttggtttctgttctcctagaaattattgtactgcattgcctgtattgtgtccatttttctggtttgtttgtttggttggtttttaataaagagatggggtctcgccatgttacccaggctggtcttgaactcctagtctcaagtgatcctccctccctggcctcccaaagtgctgagattataggcgtgagccaatgtgcccggccctatttgtttttaagacaagagagtaaatacaatctccttccaatctaattttccttaataaaacaaataccctcctgccaccccacccccagcacaagctttcctcagagtgataccttcctgtactggggaacctgccccggagggtcccccccgccaccaccgctcctcccagttagtgctccctgaactgctgccctgctgcccccattacagtcccgtgcagaaccggccccggcacagtggctccctgtgtgtcttctgtgagtgggctaagtgcttgcccagtgtgcggtggctgctctaggctggaggaatcaagagggcagggatggagagaagccttgggagtggagggctcatctaagagtgtgtggagcaaggagaagggaggctgaggccaaagccctgtggacccccatgtccagaggcagacaggacaaggcatctaggagacaggcagacccagagagtgtggggtctcaaagccaaaggagagtgggaaggtgggagtgcccagcagtgagagtgtctcaggaaccagccaggtggggccaggagggctcccaggcagggagcagcaggacggagccggcctcctgcccactgagcttccgcgggtggtatgtcccccagctactgctcattgttctgcctgcacacctgtccttcagatgtctcctactgatgtgcgacctcccagcccaccctccagggaacgtcactgcttcctgctctttgttccagggacctgagctttccactagcgcagctgctccgtgcagggtgtagttagttactcgtgcctcctgccttgtgaactccttgagggaaaggactagagttcattcatcttggcacctcgcgtacaactttgtgaagatggcgggggcagggtggaaaaagttctagagcctttcagggccttcgtctttccaccacctgcctagctctaggggtttgaagatctaatgcccatttccacccatcttggctcctggaagaacatcgggaaaggggcagcccgggggcctctggggctttaggagcagcgagtgtgggatgtggaggtgaggaaggaggcccagcagtgtcagttgctgggagtcggctggagggcctctgccccaggcaagtatgggaggcaagtctctgacccaaggaggggctctcctagtgtgtccctgctgtgtgcgggggtgatgggcttgttctcacaccctccccacctctgctgcctccagggccagtctgactgtctctgtctctggctataggttgatgtccgtggaggaagaactgaagaaggaccacgcagagatgcaagcggctgtggactccaaacagaagatcattgatgcccaggtgggggctccggccctttggtcagccacaagagttaaagggcctgggattaggaggggtgactagcctctccatcctcagtcatacctcactgcagacactgaggggaataagaaaccagaatctgccctgagaagtcagacctgtggtcttagtgggccacaagctcactaggacaggctgtgaaaggagagaggcagctcctcccctgccagggctcttggcgggcattgtctttcaccaggactgctgaccaaagagtggaagccaccaggagggcagtgggggtaggagtgaaggcaggctggtcagagggagcagtggggctctcgttcacaactatggcatccgggctgcattgaggggagacgtgaaaggctctgtggccccagcctcctttactcagggctgcaccgctttcctttcactcacccaggagtaggctgggccttgctcaggctgtaaactgcacagaccaggagctgtgacctctggtgtgtcatgcacacacatgtgagcaagggtgcctgccctaggggccgcaggcagcccatagacagcactagagctgctgcatttgggctgataagcaggcagcgaggctgtgtccatgatgctgcagaggcctctgcctaccttctcttgccagctgctcacagcccggagcctgcctgccaccctcatctccaggccacccccttccccgatgcttgtcgtaggtatacacagccctaaggagcctgtcccatgacccccgctcacatccccattgtccacaggagaagcgcattgcctcgttggatgccgccaatgcccgcctcatgagtgccctgacccagctgaaagagaggtacagcatgcaagcccgtaacggcatctcccccaccaaccccaccaaattgcagattactgagaacggcgagttcagaaacagcagcaattgttaacctgcctgaggagggaggaagctacccaaggagagggggactatggtggccaagggcagggtctcggcctggggaggcacccacggttgcagccccagcgcgggtgtcaggaggccgagcctcccctccctgccgctgtccaggaggcggccgcagagggagccaccagagactgaagcagcgtgaggcgaggtcaccagccgctccctgtggggtgcgggcagaagagactgcacgctggggagtggggacagcctgatggggcagggggcctgccaaaaatatgtctgttggttcctgaatgtggtgtgtccttgtcctcctggatctggccgagtgcatgtgtccccccacacctgtgccagggagggggcttcctggaggggggattcaagggctaggggcctacacctgtggcttcccctcgcctccttggggggcccgggactccctggcagccaggccctgtcatgtgggacctggcacttggcagatcagttggcaggcaggaagataggaggacacagagcaggaggtcagtgtcccctgcctgtctccatccgaagcacctgccactgcatgcagcctgttgggaccttcctggctgtgaggaactgaggattcctacccacccaccccctctgaacctgtccccagagcaccacctgctaccttcttccctgccttagttgtattgccagatagacccagtgagggccatggctttttcttgtgagctcttgtccctgtggggaggacccacagcttcccacacctcccacacaggcccaggctgatgctctagggctcccagaagccagagatctgggcggatctggccagatggctctgagcactgtatctgccttctcctggggcccagcacacccagggcacagtggtcctgtagggagtgccacctggtgctcaccctgaaagaaaaggtgatccttcctctgagtgatggtttaaaaaaagattctaacgcctgcaggccctgagaaggtggataactgtgattttttttcctttcacagtatgcattagaaacaaaagcccgcttgctcgcttgctggaacacaggggccttttaagttgagcgtgcgcactgcatgggaaatagcggccctggaggatgttagacttgctccctctccaagacagcagcagcctgcacctgccccgtgtgtgtggccggcctcctcctcacccttcccggcccccggccaaggacccaggcgctgcatacaggggaggggcgcaccccacagctggggccggttttcctcagctctaggctgttctgtagcttatctgcccctcccccactttcaagacagatgagcaggagcttgggtctctctcggcccctgtctgttcccagcccctgcagattctgagcaaaggccctgggtaagaagggtgggagtggggcctttgccagcagagccagggcagggcgagctgcaggaatcacccctctgcccctgcagctggaatgtgccacagaggccccacctgaagggtggatgtgctggaggggtggcccagagccatactgcgtccaccctgagctcggggacaggtgacagtggctgctctgggaaggggcttttagatgtaacctacaattcagttaggctagagacagatgctggtggaggaagggctgggccaccagggatcacagaccacaggaagatgggaggtggaagcagaggccctgcccccaccccttcctgtctcactcttctgtcttgtccccacccatgcgccttcgtgcctgagaccagggtggccacacaggcagggcctggctccagtctcatcctcccattgcccagtgagccctgctcttctctccccagccccctcccaccgctgcctcgtagagtgacctcggacagagcccccctagcaatacagggaggctcccggggcctggacaggcgggctcggaggctacccgctgtggccggtgccagctgcccttgcagggtgggtgagctctcaggccgagagccttatttacctagtgcaaaaactgtaaaagtgtacagactcttcacagatttttatcttaattgcaagtctgccgattttgtaaatgttcttggtgtttgactgtaatgtaactatctcacctaatggttgtacatatcctttggtcctggtgctgccgagggctggccgggactgctgctctcccaagggttttattttatttctgaatctagagaacagtattgggcaggaggaaaaggcttggtgtctgcggggggtgtcttccctgcctgtggcatttgtgtgttggctttgcagctgctgtctgagtagtggccactggggtgccttcactgggccagtcaacggggggctcctgcccaggccacagagaacctgagttcccgggagctgggccctgcctgcagccagggctggggttgccagaggccctggagggaaggacagtccctgctggggaagaacagccccggggccccctggtcaccgagactcagcctctgctggagaaagccacgccctccctgctagcacagaggcctgactgacttttttgcttaacttccatgttctgggtgatggaaactgccaaacctcctgtcagtgaggactctttccgactgcccagaaagtgggggtggaggaccgaggctacagctccacacgccccggtcccccagagcatctgccccaggtacacctccccctgcgccccgcacgactgcgggagccagactgtccagggaaacagcctctctcttttctacacactcagccacaaagccccccagctcccacaccgcgtcccagctcccctcttttgtaagtatgtgaaaaggaaaaaatgcaaacgttggagtttgggctggagctcctccctccagctgcgacttttaactatgtaataatgtacagaggaagctgttggtgttctaagactctgtgtggctgtgcaatttctgtacatttgcaattagaaatattaaagatttatttagctattttaa

SEQ ID NO: 1165 - DNA, 17794 bp, Homo sapiens
aaaggatctcctagctggccccatctgagagggcacaggcgtggaggggaggagaggcctggaatggagggataatgagctgggtaggggctgagaatggcctggaataagtggtcatggagccgagatggggggctgtggttgggaattgggaactgggatcaggatgagactgggatgggttggactgaagatgtgccgtgacacatgttgggggggacacgtgctaagcatggggctgaagctgggatgggaaagcaactggggtggatttgagggtgggatgcagatgacagtggatatgatgggatagactaggcaaggacctctcagggaaaggagacgggccaggggtggggtgttgtgtgagctgggttgggatgaaaatgggtttaacatgaggtgggacgcaccaggaatggagatcaatgaagcaatgggtggggcggaaccggattgggacggggggtgggcggggggaggtggggacgggactgggttcggggctggaaggagggctagcgccgaggttacggacggggcaggtgagggttcgggacgtgggtggggctggccctggagcggcgcgcaggggcggtgggtgaggggcgcccggggcaggccgggaagggggggcgggcctccccctgggccgggccggggcggcgctaggaccgagcgagcggagggagcgagccgggcggagccagcgccccccgccccccgccggccggctcccctcccccggccgctggctcgctcggctcgcgacgctgcagaggctccgaggcggcggcggcgactccctctttccctccctcctcctccgtccgcccgtccgtccgcgcgtctgtccgttcggcccggtccggcccgaagcatggccggcgtcagcttcagcggccaccgcctggagctgctggcggcttacgaggaggtgatccgagaggagagcgcggccgactggtgagccccccgcccccgcccccggcccctttgtccccgcgccgccgccgcgcctttgtttctctcccgccccgccgccccgccgccgggaagggagggggaccccgaaatggtgcagcgggccgggagggccgggaggggctgcctttgtgcgcgccgggggaggggccggcgggccaggcggggcactgccgggccccgagcgcccggaggcggcccaaggcgcgcggtgggagcggcggccggacgcggcccggaggcgcggggtcccgatgtggggcccggggccgcgtggccctgcgggagcccatcccccaccctaccccccgggcccgggggacaggtgtgcacggggcggccaagggcaccttcgccaccttcgagcgggcgaggtccgggcggggacggggcggggaccgagctagcggagccagcgcagcctgcccggctcagcccggcccggccacagcacaaaggaaagcgagggcgggggaggagcggagcgggctgggggccgggcgccccgcccaccggggggcctctcggagtgggccgccctccccccgaaacctgggctggagtgaggtggaaggatgtttgctgccacatggcgaccgcgaagtgactcccttaccgccgcgggtcgcggaggaggcaggggtgagctctcctcccctacctgaaggggactgcggggactaggcagctgggctggggggcaccgagctgcctaaggggccagctgagatccctgggaggaagccctctggagaacaagtgtggagggagcccccaaagacggctgaaggggtgaacagatccaccggcccccagcaaggggcactcggtccctgatgggggaggagctgggccgcccctcaccccgccccccagctgttgtctcccgctgagctgggggaggggatggaccacctgctctggggctggcggcccagggtggtggaaaaaggaaaccgaggggttcctcacagccccatcctggaatcctttaacccccccgtaatactcttcttctagggaaggtgcccatctggttcctaggcctcctctccctgctggcagatgggaacaggttcttcttgaggaaactgaggcaaagaggagggcaggtctgagggaccccgcttgggctggcctcacccgcacactgggagggcagccaggtggggactctgacctgggggcttctggaggagaggatgagatggctgggcatccatggcatggtactgcagcactggccagcagccaggcctggagggatggacgcgagagacaagctctcgtgtcctgcaggtcagtcacaggagaggccggcacaggctcagcaggcaggcggcccacccattgtcccagccctgccccaggggggctgagatcatgggaggagctctgggcaagtggccggcttggcctggtgaaggagctggctttgggataaggccccgcctggggagaagcacagctcaccccagaacacctcctttgccctccagcctggaggggtgttgtctaccaacaccccattttctcctaaaagcagagctctggtggcctattgccaaggccacacaacccctgttgccccacatcctgctcaacacaggcctgcccccacccaccccagcagcatccgtgtggccaaagcgagttattcatcactggtgtgcgtcagcccccatctgggttgtgtgtgggacacacacagatgcacacatgtaccctcgcacatgcacacattcgttcactaagggcccagataacattttgaaaaaggggtgtgaggatcactttctacacaagagaatatgaataccccagggcccagcatggaaccaggggtgcagtgaggtctgaagactcagaggcagaccctgcacataggtccagagggaggggtgtcttgggtaaattgctgtctgccccccgacccttaccttgcctccaatggggaggggtggttgggggagttcactcctaggtggcagggcctctgaagtgcaccactactctggcacagggagcaggggacccaggaaatgaggttgtgtggtgggaagggccactgttgtcctggttgtgatatgactcactgtgatcatacacaagttcctggtcctcttggaaagaaaagggattgggcccagcactacctcggatactgaaggcctttctagcaccaccatcctgagagtgatggtcctgcggggtccacctgccctcagcccccgactccagctcaccctccaccccagctcaccccccatcccagctcaccccagggtctctggaactgccacattccagctcccacctcacgctagttcagtttatctggctagatggcttttgagttggtgtcaatatcacacatacttctggtatgcggtgtgctggaccccaggacccagagagcaggatgtgctgattgactgagtcagcgttcctgccttcaccaggcttacagctgggggcagtgtctgtctccaggagttggagctggtgagatgtgtagatgcctggtcgcctaccccatcctgattccctgtggtttcgccagcttccacctggtgcaccaccaggctcggggtgcctctgatgtggttgagaagcactggtctttgtattcctgctgggatatggtgggtgctctgggaggggcagctcaggagaggctgctgggggccagcactgggctctgaagaacggaagcattccactgggaataggcgtggggtagaggagcaggtcttgccttccacgtgaagagaactacataggcagaggcttcagggtgagccctgtccagaaccctgcttgggtcagggagccgtccagtgtgtcccaagtgtgtggtgtggacagggtggtccaatggaaaggcaggctggagggtttgaactggggtatggtttctgctgggggagagctgcggctggagcaggaagaggtggccggaggtggggagccaggggctgaggatggaaggcaccccggggagcctaggcaggccaagacaggtcctctcagagggaggcttgatgtctacagcagtctctaggaactagggtccctgggctctgcattagtttctcatcagtgcatggagagagacagagcctgcttctcccagggccctttgttcccgtggtgggttagggcagcaggacaggtggtgggccagctgtgctggaagcatctgtcagggccaggctggggctgggggtaacagttggaccaggagctcccagccccacagcccacctgtgttccttcctggaggtaggaagccgggaatccaggaaggggaggggctgaggccatttggccctggccacaacctcctgagacgtcccctccatccctcccgccttcatttcctttgtcccttcacttctgtcctttctcttcttcctcctctcctggtttctccctctgcttctcccctcctctttctcttctcccttgccctccctttctgcctcccctcctcacagccccagcctcctgccttggcacctggggaataggagtttggagaaggggttgagagccctttcaaacttcagggacaaggcccttcctcctaggccccggctctcctccctcccagagggtcctcagcctgggcctgcatggggtgatggaggaggcatctctgccttcccttctgtgcaatggttgctctgtcaccgcagcctatcaaaaggagccagggcacacaaagctagggaggaggaggaaggaggaaggccaccaggtcagctttctgttagagctcagacagaaggaaaggccagcagtctcaggaagcctcagccaggactgaggcagcctaggggctggaaggcctggagctcaggcttggccaccccggggccagagtctgggcgagagtgactgcagtgacctcatccccatttcagagaggcggagattgaggctgagggcgggtccccagggtcctttgtgttcaaggagaatgcagttggggtgggccagtcgtgtgccaattgcagggttgccatggttactgggggatgcccagagctgttgggagcaccaggttctctcttctcctcctccctccccgggggaggggcagcggggaccaaggcacgtgccaggtaagttcctggcactagccaatgggggatgaggatcctggtagccagggaacggtaaccaaggaaccgtcgccttggaatctccatcacacacccgctccactgggttgtaggctgccagggccagggccgggatgctgcgcactgagctcgaccagccagcaatttctcccctcactgcctgcgcccccctgacccaggcctccagcagtaccctgctgggctcccgcctgaaccgatgcctggccctgttgtcatggctacagcaggagccctccccgttcctgtcctacccactccatgtccctctccctccccagagccgtccccacccagaattggcggcctgggccctgacagtttgacagccacccctccctctccccagggctctgtacacatatgaagatggctccgatgacctcaagcttgcagcatcaggaggtaggaattccagccattccctcgccgccttctccaccccctcctcctggttgttttcttccccacccacctggctgtaggccacctccctgcctgcaccctgcagccccacacttgtctggatctggcgggtgtccttcctccagtcatccctgtgtccccagggtggggaggaatctcagagccttgttgaatgttggacttctgaggctgagcctccaacagggaaagtgacttatctgaagccacacagctgggacactttgggggaagggccctattcaccgccttccccagagccagaaggcttgattgtgcctctgggcactggcacctggtgagacatgatgatgtgtgaagaatgagacctgagtgtgaagaacaaacacttcctcagtcctacccccaaatcaggccctgcaggagtcacaggcaaagctacatccctgtgcgccaccacccccacacataccaacacaaaactgggacccacagaccccagaggccagaagacccctgggggtgcctgtggaggcctggaggagtctttgctttgagttccaggctctttttgggaagggtttaggaggcagagagacctgacactctcctgattaccctagaagggggcttgcaggagctttcgggacactttgagaaccagaaggtgatgtacggcttctgcagtgtcaaggactcccaagctgctctgccaaaatacgtgctcatcaactgggtatgcggccggggctggggaagggggctgagggcccagagctgctcatcaactgggtatgcggccggggctggggaagggggctgagggcccagagctgctcatcaactgggtatgcggccggggctggggaagggaactgaaggcccagagcagtcgccctccccgtcggccctctgacacccgtggagagggaagcccaccctcttcccaccccggggaagatgcaccctatcgtgtagggccccccttgtcctttcctgaccccctctttgctgggtactttgcaggtgggcgaagatgtgcctgatgcccgcaagtgcgcttgtgccagccacgtggctaaggtggcggagttcttccaggtgcgtgtcaggggccagcgctcttgggggtggggacagccaccagggtctgcgtgctggggtggggatggcgggaggatggtgccgcctgagcactgccgtcttcttgcggaagggtgtcgacgtgatcgtgaacgccagcagcgtggaagacatagacgcgggtgccatcgggcagcggctctctaacgggctggcgcgactctccagccctgtgctgcaccgactgcggctgcgagaggatgagaacgcagagcccgtggttagtgtgtgtttggcacccgtgggctctgcctgcgtggcctggtgcccgagtctggcctgcccggtccctcttagctctcaccctttaggtgtcgggggttcctggggcattcagcctgcttatgctgggtccttcgacactgcagggcaccacctaccagaagacggatgcagctgtggaaatgaagcggattaaccgagagcagttctgggagcaggccaaggtatggaaccctgagcccggcctggctgagccacccctcatggaccccatggggcaggtctgagtccctcactgcagtggcatggcccatgccacgtgccccgcccccagcgctgggttagggaggggctggaggggcagggtccaggcgcctaggctcggggcctacccttgttcgcaccggggcttgcagaaggaagaagagctgcggaaggaggaggagcggaagaaggccctggatgagaggctcaggttcgagcaggagcggatggagcaggagcggcaggagcaagaggagcgcgagcggcgctaccgggagcgggagcagcagatcgaggagcacaggtgagcctgcccgcccggagcgctccaggggcccccgggcgcaccctgacgggtgctggctgcttatcgttccaggaggaaacagcagactttagaagcggaagaggccaagaggcggttgaaggagcagtctatctttgtaagttctttgccaaggctcccggtctctgggtcagggaagtgagaatggtccctgtgttcctgggccttgtggggagatcagtggctcagggacagtggtggctgttctggggagctgcatgggcacagggtgccatggagcatgaggcctggcacctcatcacgtggggctctggcctctggccgtggaaaaagactactttggagaagcttgtgctctagattggaagagaaactccatctagacccagaccctcactgaccaggctccccctcccctgccctggggtttctcggcgattagacactgttctgcactctgaggggccacaggagtgaggcaggcggcatgggtgagcctgggccagtgctgagcatctgcaggcagtgtgtaccatctccttgggagcagcatctccctgggagcagcccctttgttccaggggtactgtctgaatctccacacattgggaatggcccgtaggtcctgtggattggtccctgagaatcacagcagagtcacatctccatgctttgaatttagtattttggaaatagctaatgtcattcaggactgagcatggctcagttcaggaagggaggtgggttgatactcatctggattgggactgtaatgggcagatgcatggctgtggggactcaaacgggctccggagtcacccacaggaggctgagagagaggaggcaagacagtcctgcaggcagcagcattaagtcactccagtcacatctgcccttggatggggtggggatgatgtgtggctggtaagctccatcctcagtcattcattcaacacacacctgccacctgccacataaagaacatggtggagaacgagctgggtaagatctttttttcataagttgattcatgtattttttttttttttttttgagatggagtctcactctgtcgcccagggtagaatgcaatggcgtgatcttggctcactgcaacctccatctcccaggttcaagcgattctcccgcctcagcctcctgagtagctgggattacaggcgcacaccatcatgcctagctaatttttgtgtttttgtagagactgggtttcaccatgttggccaggatggtcttgaactcctgacctcggttgatctgcccgcctcggcctcccaaagtgctgggattatagacgtgagccaccgcgcctggccacatgtatgtaactgtggcaaaatacataaaatgtaccatttcagtcattttaaaatctgcatttcattaagcggcattaaattcattcacattgtaggataaccaccaccaccatccattaaacacaaattctgcccttccccactcgccagctcctggcaacgaccattccactttctgtctctatgaagttgactactctggagactgcctatcagtggaatcgcacggtgtttgtccttttgcgtgtggcttatttcacttagcatgatgtccttaagattcatccatgttgtagcatgcatcagaatttccttctttttgaaggctgaatcatattccattgtatggatataccacattttatttatcctttcagagtgaggttttttaaaatttttttattttttaaatttttttgagacggaatctcgctctgtcgcccaggccggagtgcagtggcgccatctcagctcactgccagctccgcctcccaggttcacaccattctcctgcctcagcctccaagtagctgggactacaggtgcccgccaccacgtccggctaattttttgtatttttagtagagacggggtttcaccatgttagccagggtggtctcgatctcctgacctcatgatctgcccacctcagccacccaaagtgctgggattacaggcgtgagccactgcacccggcctgcctcccaggtttaagtgattttcctgcctcagcctcccaagtagctgggattacaggcgcccaccaccacgcctggctaatttttgtatttttagtagagatggggtttcaccatgttggccaagctgatcttgaactcctgacctcaggtgatccacccgccggcctcacaaagtgccgggattacaggcatgagccaccgcacccagcagataaagtttattatttatttatttatttatttatttatttatttatttatttattgtctttttagtagagatggggtttcaccatgttggccaggatggtctcgatctcttaacctcatgatctgccctcctcggcctcccaaagtgctggaattacaggtgtgagccacctcacccagccaagtttatttatttatttatttttatttttttgagacagagtcttgctctgtcgcccaggctggagtgcaatggcacaatctcagctcactgcaacctctgcctcctgggttcaagcgattctcttgcctcagcctcctgagtagctgggattacaggcgtgcaccaccatgcccagctaatttttgtatttttagtagagacagggtttcaccgtgttggtcaggctggtctcgaactcctgacctcgtgatccacctgtctcggcctcccaaagtcctggaattacaggcgtgagccaccgcaccctgcctgataaagtttatttatttatttatttatttttatttatttatcttttttaagatgaagtctcactcttgtcccccaggctagagtgcaatggcgccatctcagctcactgcaacctctgcctcctgggttcaagcgattctcctgcctcagcctcccaagtagctgggattacaggtgcacggctccatgcccggctaatgtttgtatttttagtagagacagggtttcaccatgttggccaggctggtctcaaactcctgacctcaggtgatcctcccacctcggcctcccaaagtgcactgcacccagccctgataaagtttatttttttgctaacatttcaaacatacacacatgcaggtagacagaatagtgttgtgaaccccctgagctgatttattttcaccagttatcaacatttcaggtaaagtctgaaggagcttaccattattttatagtcccatctggcccttcaagtatagttcacgtgagagtgacagtggacattctagcaggtcagtgtggtaccctttcaatttcaggtcctctaaggaagggaatatgcgagagactttgggatttagcactgtgaaatgctttctcttggcttaaggagctgttgctttctctcccctgttacgaattgtgttccatatctgagttccctttttgcctggcctgcaggggagctcccgtgtatctgaaaatgctttaggcacagcagtggctttgacccatgtggttagtgcgttgatctctctcctccctctgggccttacttgtttcagtgttcacatggttggtagtttattaaagcctttgtggagggctgggctcagtggctcatgcctgtaatcccagcactttgggaggccaaggcaggcggatcatgaggtcaggagatcgagaccatcctggctaacatggtgaaaccccgtctctactaaaaaatacaagaaattagccgagcgtggtggcgggcgcctgtagtcccagctactcgggaggctgaggcaggagaatggcgtgaacccgggaggcggagcttgcagtgagccgagatctcgccactgcactccagcctgagtgaaagactctgtctcagattaaaaaaaaaaaagcctttgtggtagttgcctctggtcctttctttgaacaaggcagaggaaccaactgagattacagcaggcagtgggcagagcagcaaaggctggtgggacacaggctcatgggaaggtgaagagcctaggctgactggaaccccgtgggctgaggagtgggggagatttgattgggaaaggagagcaagggcagaggaggagtttagacttcattctgggggtcacaaagttatcactgaggtgatagccctcctgaggtgggatactacgaagggcccttctcccagtgctcctgacataagctaaaattttagattataggctcaaaaacagagcagccctgggacttcaccaccttagcagcccctcctgcccaagctgccacctgagcagcaggggacaccgactaagaagcctttggtgtgtgagtgcagttgagcaaacatgcgcccgccttgtgctggccacccacccggagaccccggtcctcatcctgcgttgctcacagcggaggggggaggtgcctccggaaacaggaacttaggatgtggtgtcatcgtggtggaagccaggagcaccctgtggggacccagaggaggaaatgacctgaacaagcctcttgttcagaggtccttccccaggaagcagtggccacgctgcagctggaaaccagagggcctggcccccgggtggggagcaggcatttgggagggaggccagtctcccatgctgaggcttggaggtgggaacgggtgtgcctgttctgggaactgactgcgtcgtgctgaggacttgatgtctacatctcacagtatgtgggagccttggggtgggggccggcagggggtggtgttggagaggtgacggctaggtcaggcaggggtgggggacgtaggccaagtgcgggcgctgcccacccaaaacaacgtgtgcagtgggcaggtgaagccagtaggcgatggtggggccgggggtgagcgggtggcacacgcctgtcttaagggggctgcggcgaggccccggtgatggctgctccgggcttgcaggtgatgtcgccagggctctgtcacctcaagagaaactgggaccctcatctcagtatgaaagttcctggtttttaagtggtggtaactaatgaacatggtttaaaaatatcataccagcaaaacaaaagccatctgtgggtcatatttagccagtgcttgctgtggctcatgggaacccctgagggattttaagctcaggaaaatcatggtctgatccgcattttggaaaggtcctttcagggcctatggagagcaaataaggcaggtagcagtgaggaaggctggaccatgatgccacggtccaggcagcaacattgggagcatggtggccccggcactagggtaggaggtccaagaagttatctgcaaaacaaggagcacttctggagggccctaggcacctgcttagatatggggatgagcaagtgagtgagtgagcctggtgcccagaggcctggcaggtcagagatgaggtggctgagggccctgagggaagagaggggctgtgtgacagggtttgacggggcagaggtaccacctctgaaacccttcctgccagattgcgaaagaagcatgggggctgtaagaaggccagaaggggccgggcgcggtggctcacgcctgtaatcccagcactttgggaggccgaggcgggcggatcacgaggtcaggagatcgagaccatcccggctaaaacggtgaaaccctgtctctactaaaaatacaaaaaattagccgggcgtagtggcgggcgcctgtagtcccagctacttgggaggctgaggcaggagaatggcgtgaacccgggaggcggagcttgcagtgagccgagatcccgccactgcactccagcctgggcgacagagcgagactccgtctcaaaaaaaaaaaaaaaaaaaaaagaaggccagaaggccgggcactggtggctcatgactgtaatccatcccaacactttgggaggccaaggcaggaggatcccttcagcccagaagtttgagaccagcctgggcaacatagggagaccccatctctaccaaaaaattaaaattagccgggcatggtggtgcacacctgtagtcccagctactcgggaggctgaggtgggaggattgcttgagcccaggaggcagaggctgcagtgagccgtgattgtaccactgctccccagcctgggtggtagggcgagaacctgtcttaaaaacaaaatcaataaataaaatacagtaaaaaagaaggccaaaagcccctgtggggggtaggtgcaccagacactgtccctttggtttctagggtgaccatcgggatgaggaggaagagacccacatgaagaagtcagagtcggaggtggaggtgagagctgggggcaccagccaggtgaggcagacagggctatctcagcttgcctggcccagccccaaccttttcctcgtgccctcaggaggcagcagctattattgcccagcggcctgacaacccaagggagttcttcaagcagcaggaaagagtcgcatcggcctctgcgggcagctgtgatgtaccctcgcccttcaaccatcgaccaggtagtcctaggccccaccccccgtccggccccactcctcaggttgcggccctgagcctctctgggactctctcagaagggaggccttgcccaagcaacccttggagaaggcgagacccttcatccagcgtgcatccgcccaccacttcccaggtggcaggaccccaagaagggccagggatggtggtgaagtcgcttgtggctgaacagtggggagtgctagggcctgtggggcagctctggcatgggctgaggcacagcgctggccacggggagcagctcggctggggtgaattaggtctggcctggaaggccggaatgcatgcgtgctgggctcttgccccgggcctgagggagcctcccggagcttgcacccaggtgtccccgttccgcttctcagtgtgctgcttccgcctctcctgaagctcttccctgccctgtctgctggtctgagtgtgcttgccccatgctggggtcccgccacaggccgtccctgctgtactgctcccaggctggctgtgtgtctggggctggtgtgaggctgcggctggcttggctgattgtgcccctggctgaaggcagcttggacatccagggccaggccctgggggcgggagaggcctcgggcaggggtgggggagactgaccctctcttgtcctctgtctctttctctgtctgtctctctcggcaggtcgtccgtactgccctttcataaaggcatcggacagtgggccttcctcctcctcctcttcctcctcctcccctccacggactccctttccctatatcacctgccaccgcaccccaaacctctcttcctccctcccatgtaggtagcagccccaggcctcggcgggggtggtaaggagggccccgcttcccagcagccccccgccctcactcccccagtctgaccgctgatctctggtgtttgcccccagggcaggcactgcctgcctcttgcccctggccttatggggcactggcctccaggggcctagcttacagggtctggagctgtagtctggcccctggtggggctggagagctcccagcccccacccagattccagagaggaggtgctggccaggccccaaggtggacaatcctgtctcacccggctcccccgccctcactgacccacctggggtttgttccacaggcagccacctggacagccaccggaggatggcgcccactcccatccccacgcggagcccgtctgactccagcaccgcctccacccctgtcgctgagcagatagagcgggccctggatgaggtcacctcctcgcagcctccaccactgccaccgccacccccaccagcccaaggtgagagagggatgctacctgcaccaggcctcccatcatcagtccctggctgggagccccaggttgccatggtaaccgttctccagggatctgggccacccatcaccaagactgcactgccctggaggcggctgtgtggggaggagccctggtgtacagtcagacctgccctctctaaagcttagcacccgccctctcaagtgggaatcgggccttggccttcctcccggagctgccaaggggcttaaagtcactggggtcactgggtaagggggcagtgggacacctgcatggaagtccctggctccctcactccttagtgggtgggcagggtctccatcctccccgaggggagccggttacatatctcctctgcctgtgctgtgacagagacccaggagcccagccccatcctagacagtgaggagaccagagcagcagcccctcaggcctgggccggccccatggaggagccccctcaggcacaggcgcctccccgggggccaggcagccctgcagaggacttgatgttcatggagtctgcagagcaggctgtcctggctgctcccgtggagcctgccacagctgacgccacggagatccacgatgcagctgacaccattgaaactgacactgccactgctgacaccactgttgccaacaacgtaccccccgccgccaccagcctcattgacctatggcctggcaacggggaaggggcctccacactccagggtgagcccagggcccccacgccaccctcgggtactgaggtcaccctggcagaggtgcccctgctggatgaggtggctccggagccactgctgccagcaggcgaaggctgtgccacccttctcaactttgatgagctgcctgagccgccagccaccttctgtgacccagaggaagtggaaggggagtccctggctgccccccagaccccaactctgccctcagcccttgaggagctggagcaagagcaggagccggagccccacctgctaaccaatggcgagaccacccagaaggaggggacccaggtgcggcagggactgcctggtgggagggatgggagggagtgggggctgagcagggtgctggccctgcattcctcatgcttgcaccagtacccccttctctgtgacccacattatttgaggggaagtccatcccaccctccctccctgggccggctctgcttttgttcccaaggcaggcatccttgtttccctggcaaccactgatggaatcattggttgctggggaaacgggctcaggcctgataggtcagccccagtcctgctgggtggggccaagtgacctgatgctttcccctgcaggccagtgaggggtacttcagtcaatcacaggaggaggagtttgcccaatcggaagagctctgtgccaaggctccgcctcctgtgttctacaacaagcctccaggtagtactgggctggatgatggggaggaatttgggtgcgggggctggatttgagtgtgggtagccaccccaccactacccaccgctcacagaggctggggacacaagcggtctgctaggtccctaactcctctccctttctaacgccacagagatcgacatcacatgctgggatgcagacccagttccagaagaggaggagggcttcgagggtggtgattagcggtggcgccagccctaggctacccttgccaaggccgcccacctgcatcagcctctggccagacggcccgccgtgcctgcattcgcagcagctccgcctggcacccactccggattccggccctggctggggacttggccgcttccctacccacagggcctgacttttacagcttttctctttttttaaaaagttgataggagacttgtacagttgactggctttcctctcgttggtagttgagacgctgttgcaaattccacccctccttccctggtccagattgtagctcttagtcctccctgctcagctggccgggttggaggcctcaccctgcttggggcctggcgtggggggagctctggtgggaaaatgtcccccacctcttttcctagttttatgtttcttgggaaaatatcactttgtattctctgtccagggcttcagatattttgcacgaattttaaaacatggcaataaatggctcgtgggctctggctccctgggaccccctccccgcccttcttttgaccccttcctgtctggcccaaaggaagtagcaggcccagctggggcccctcggctaccccccgtctcctgccgggcaggtcccaggttggaggccctaggcgcggttcaggtcagggctatggatggggcccaggggctttggtggcccctccccaactccttcctctttgcttgggttcctttttcacgtttagtaactgttttttttttttttttttttttttttttggaaagcacaaacttctgtaacgggtcgtgctcatgtctgttaataaagaaatccagatcccttcg

SEQ ID NO: 1166 - DNA, 7726 bp, Homo sapiens
gagtcccaggcgtgcggctggccatggcgctgttctacgtcgcgcggtacccgggccccgatgcggcagctgcggcggggccggagggcgcggaggccggggcgcacggcagggcccgcgcgctgctcgagcggctgcagagccgggcccgcgaacggcagcagcagcgggagcccgcgcagaccgaggcggctgcatcgaccgagccggcgaccaggaggcgacggcggccccggcggcggcggcgggtgaacgacgcggagccggggagcccggaggcgccgcagggaaagcgacggaaggcggacggcgaggacgcgggcgcaggtgggccgcggggcgagcgggctccctctggggcgccggcgactcggtgctgacgcgctgccgggtgggtgtctgcctcgcagaaagcaacgaggaggcgccaggggagcccagcgcagggagcagcgaggaggcgccaggggagcccagcgcagggagcagcgaggaggcgccgggggagcgcagcaccagcgccagcgccgaggcggccccagatggaccggccctggaggaggcggccggacccctggtccccggcctggtgctgggggggttcgggaagaggaaggcgccgaaggtgagcctcggcgggcgggagggtggtcggcgtgagagggtaggctgcgcggattcttaagtgcggcggtcgccccggaagatttcgttcagcgaatgttcccgggtcacagccgcgcctcgctgccaggtctgcagtttcatcgcctaggggtctggatcctgcacgtgcagagctcccgtttcctctgctaggcttgcccctgtcctcccgccgcgccgcgccagttctgcaagatgtgtttgcgtgaacgtgcggggtttcctgctgtgcgctcaccgcctcaggagtaagtcagaggccgttctgcaagctcctgaccgttggtgtttttgcttagcacgtgtggttttcggtaaagagatttccggcgagacaggtgaagaaagcgagaagtttgacagagtgctcgggcaccttaggtagggcaggtggaggaggttctctttgagttgggatgcaaagacttgaagccaggtcaaggttgggggttgggggtgccaggcagaggcctcgaggcagggacgccggcgtggctggggcaggcgagcgccaggtcacaggacctcctggctgcgggagggtgggtgccactgtgggttgatgggaggctacagagtgagtttgctcagggagtggcatctgcttttactgtttaacttctgaaggctgtatggaaagcgcatcctggggctgagaaggagctgaagacgacagaggtttccccagcctccctcccctagctttttccaccgtgggcttctgcgcgagagcctggaaagcgctcacctggcctctctttctttttgatggcaggtccagcctttcctgccaaggtggctggctgagcctaactgtgtcagaaggaatgtcaccgaagacctggttcctatcgaggacatccctgacgtccatcctgacctgcagaagcagctgcgggcacacggcatctcgtcctactttccaggtgccccagccccgggcaggcagctgagggaacacctccctgggcacccacacacaaggctgtgagtggccgtgggtcaggcgtccctgccacatcggtgccaagtgtggtctcagcactctcaagctcatggttcccacttgggtctcctgaggctggcgttcctctgggccttggtgccatccctctggggagcggttcccaggcctccagcagagcagcccagcccagaggtcacaggcagggaagcggcaggcctaggcctaggcgtaaacacgacttctctctcgcctttcctcatccagtccaggcagctgtgattcctgccctcctggagagcgcagcctgtgggtttctggtgggcagaggtggctaccggcctagcgacctctgtgtttctgccccaacaggcagtgggaagacactggccttcgtcatccctgtggtgcaggtctgtgtgagggtcccctttctctacagcgggtgtgcagaggacaggtaacagccttgctgacgcaggcgctccttccccctcaggccctgctttcgagagtggtctgccacatccgtgccctggttgtgctgcccaccaaggagctggcccagcaggtatgtggaccctagacctggagcgtggcaccgcccgcctcagcttccctgctgagtgcacagcgatcagcccctgggggacccagattagatctggggtcctttttgctgcagtaggtggacaccagctacctccaggccagtgacagacttctcctgcaggtgagcaaagttttcaacatctacacagatgccacacctctgagagtctccctggttacgggacagaagtctctggccaaggagcaggagagcctcgtccagaaaacgtaggttgtgtcagggtgcgggtttttcagggggtccctgctcagccctgcaggtggcctgaggcaccgtgggagcagaggaggggccaccatctttaaccacctgttcccgtgaagaggaggagctcccaccggcccccttcccatgtggggtggagtcggggctgtggggtgaggcagcgtcttgctatccggaagcccttgagaaagcttccttctctcgagctgctctctggtctgtagagctgatgggtaccgctgcttggctgacatcgtggtagccacccccggccgcctggtggaccacatcgaccagaccccaggattcagcctccagcagctccgcttcctggtaggtccccgccccaggggcctgggctttgagctcagggccgcgccacccagtcccgggctccctgtctcctgcagattatcgacgaggctgaccggatgattgacagcatgcatcagtcctggctgccgcgggtggtggcggccgccttccagagcgaggaccccgcggacccctgtgccctgctccagcgaaggcaggcccaggctgtgacagccgccaggtatccagcagcacgcccaggtgctggcctcccctgagcagagtcctctgcacacagctctccttccttaatgcccagagataagggtggcttgagctctggtgcacagaaccgcatcgtactgtcacgtgagctggacccaccttgctcctggtctgcggcagtctctacagtgcgtagcatgaggaatcctgttccctggaggttcggggcagccactggtagggtgccagcaacacccccttctcttccagcacctgctgtccccagatgcccctgcagaagctgctcttctcagctactctgacccagaaccctgaaaagctgcagcagctgggcctccaccagccccggcttttctccacagggctagcacacaggggcctggaagatacagatggggacggggattcggggaagtatgcctttcctgttgggctcacggtgagtgggataccgtgtgggcagagggttgcactgggaacctggggcccctaaccaaccctcacctccaccccgaccccctgccgtccctgtagcaccactacgtgccctgcagcctcagctctaagccgctggtcgtcctgcacctggtcctggagatgggcttctcgagggttctctgcttcactaactcccgagagaactcccacaggtgaggccccggctgggcgggggtggcagaggtggcctctggtcccagcatcacttggccgcagccttctctctgcctaggctcttcctgctggtgcaagcttttgggggtgtggacgtggctgagttctcctcgcgctacgggcctggccagaggaggatgatcctgaagcagtttgaacaggggaagatccagctgtgagttcctgggcaggggcaaggcctctgtggggtgggggtgcccactccagggtcagcctggggctctctaaaaggtgcttccttctgcaaattggcttcctgtgccccagccccatggcagccagttcccagaaaggcctgagctgccccccgcagggccggtgctgccacggcccctgctcctggcacgtcgggcccacaatgctgcgtgtcccggcaggctcatcagcacggacgccaccgcgcgaggcatcgacgtgcagggtgtggagctggtggtgaactacgacgccccccagtacctgagaacctacgtgcaccggtgagcgctggcgcagcggccactggggggtctggggctttgtgagctcctgggcgttgatgtgggaccgtcttgactggcgtggggtggggttggtgtggagagaagctgtcgttccgtcagactcttgaaggctcaggggccagtctggagatagctgcgtttgattccagggttgggaggacagctcgcgctgggaaaactggacaggccttcacactgctcctgaaagtgcaggtgaggctgcgagggtcttgggagtttctgctgttggtgggtgttaaggggctggcccaagaacccccttccaccatgagcttctctccaggagaggagattcctccgaatgctaactgaagctggggcacctgagttgcagcggcacgagctctccagcaagctgctgcagccgctggttcctcggtacgaggaggccctgtcccagctggaggagtctgtcaaggtaagggcaccagagtccggcatgaaaccctctggggagggcgtttgcagagagggcgtcgtcaccacacgtggagaaaagagggaaaaagaggaaagcgagaaggcaacagagggtcacacaggttgtcctcgagcttctggcccaagggcggggagcccctgggcaccagtggtggaaacacgtggcaccagggagggctgtcagcggggccagggcctggtttctgcatgcacagggcttcctgtcctcagggttccaggggcagagcccggggccccacagacgatgaggggacagagtgtgtggtgctgagccctcccctttcctccacaggaagagcgcaagcagagggcggcctaggctggggctcagagggccggagggactgaacgctcaccaccctgaccctccttccagagcagtgctgatcactggatcctgtatgtgaggaaaggaatcccccagtggacacagccttcctccccaagcacgtggtctctgcgccaggcagcccgggcgtcagagctcaagcacctgccccgactggagacttcagggcttgtcactttcagagtgtggaggtcaggatggctgcgggcaatgaagccttagtaaaacggtgaaaagtactcccagacggacgcgggcacccgtcatgcttttgctgagagttgggggcattaaccttgagctaatgttaaaaatcaagctcttggccaggcatggtggctcatgcctgtaattccagcactttgggaggccaaggcgggtggatcacctgaggtcacgagttcgagaccagcctgaccaacatggagaaaccctgtctctactaaaaatacaaaattagccaggcgtggtggtgcatgcctgtaatccagctacttgggaggctgaggcaggaaaatggcttgaacccgggaggtggaggttgcagtgagctgagattgcgccactgcactccagcctgggcaacaagagcaaaactccgtctcaaaaaaaaaaattgccgggcgcggtggcaaatgcctgtaatcccagcactttgggaggccgaggcaggtggatcacaaggtcaggagatagagaccatcattgctaacatggtgaaaccccgtctctactaaaaatacaaaaaaaaaaaaaaaacaactagccgggcgtggtggcgggcacctatagtcccagctactcgggaggctgaggcaggagaatggcgtgaacccgggaggcggagcttgcagtgagcggagactgcgccactgcactccagcctgggcaacagagtgagactccgtcaaaaaaaaagctctcctccccagatttgtgaaccttgtgactgttcagtggacacctcacatattgctggtgggaaggtcacgtggagacagctgggcaaagccttggggcgttaaacacagagtcactcatgacccagcacttcctctcctatgcaccttgtacaccccagatcaatgaaacctacatccacacagaaacgtacacaaatctctcagcagcactgttcacagtagccaaaaactagaaaccacatgtccgtcagctgatgaatggagaataaaacgtgggaaatccacaccaggagagaaaaaggagtgaggcaccagcataggcaccccgtggatgaacccggaacctgacgctaactgaaggaaggctccggctatagggagtgtcccaggcacagccagagattgaagggtgccggggccgggagttggtgggggttggggctggggacacagtggccagtgtgtgggtttgttttggggatgatgaaaatgttcttaggttgtgtgtggtgatggctgctcacctctataaaccttttactaaaaaccatggactgggtggatacagtgtgtgaattctctcagtccagtgctttgtttgaaaaaggtggatgatgccaacatcactaaccgccagggagacgcaggccacggccacacccggctcactggagttgtgaggatggaaacaccagcccaccccactcagttcagacctcagcttagatgcaaagaatgtctgggatggggactggcagctgattagagatgcaaccactgaacctgtggactgtgttcaaacaaatgccagcagaacacaaaaggcgactgttacaggaggcagaaagaaatgatttaggtagacggggtaaagccagtccccagcagaaaatttgccttttaacaaaaagcagctcaaaaatagctccctttctaacctcggggttcaaaatcacttctcacgacaagcagccagaaagagcagactgtgaatcacagatgagacagctcgggcacaggagtgcggggggtgtctcctgggtgatcaccaaacttcacacttccacaatgggccccagtaaaacagtggaccctaataagcacattcccgtccccttaggtgcactaagggaagctaaaagcagactgaggggtgcctgtaaccccaagaagatgtctgggagcagacccagagaccctcgcagaaaagtgtcacagagcagcacagactgagtctgacagaaactctctatacaaatagcacaccttgtcccagctaaaaccctgggccctgggaggacaagacatccctcctctaacccctcgtcactagcccatttgtaaaaaccttgacaggccgggcacggtggctcacacctgtaatcccagcactttgggaggctgaggcaggcgcatcacctgaggtcaggagatcgagaccatcctggccaacatggtgaaaccccatctctactaaaaatacaaaacttagctgagcgtggtggcgtgtgcctggagtcccaactactcaagaggctgaggcaggagaatcacttgcccgggaggtggaggttgcagtgggccaagatcagcccactgcactgcagcctggcgacagaaaaaaaagaaaccttgacatctttactacaacttagcaacccgctcaggccccctctgcaacggagagctcttcttcctttttgcttattaaacttctgctccaaa

SEQ ID NO: 1167 - DNA, 62483 bp, Homo sapiens
gtgcagtgctacctccacggtcaggccctcgggagggtcctgctgctcacagaaccgggagaagcctccctaccaccagcgctctccggacgcagggattgcccccaccaagccccagagctgggagtgggcaggacggggcaggtgagtcacccatcgctggcttaaaaatatccttgctcgccggccgccgcccaggaccgacgggggcaggccgggctgcagcaggacccgtccaggagaggtggggactcgaccaggcccccagccccttgccccgcgccctcggcccggccgccctccaagtgccccgcgccctgcgacgccgcgttcgtcccggtgtcctgaaccagaagccccgcgtcccatcgccaccgggtaaactgaggcccgggcgggcgcgctcccccgtgtccgcagcgctcacctgcctccggcgccccgcgctcggcctgtcccctcggcgctcgccggtgcgtccgtctgttcgcgcctcggccggggcgccaggtctcccgcgggcgggtgggacgctcggcggggccgggccggggcggggccgggagaggaggaacctgagcgacaggttgcggagtcacccgagagcgggcgggcgcgcgggggaggagggcgtgggatggaggcgcccccgccggcctcggacccagctccgccccgccccctgccccgcctgggctccagccccagccctctgcgtcctccccaacacccgcctggtgtgcccctccgcgggcctagcccctagagctggggcgctggggacaggcggggcgcagggccgcctccgcgggatgagcagggcgaggcctcgagctcttccttgggcagggcctagctgcgccccagcaggccgggggacgggggaacgctgccaatgggacttcgggggcagcgctggcgcattgctggggagggctccagccctggggaggtcagagcctccgccgggccaggtgcacccctcaggtgccccaggcatggggcagagtcacttcccttaccgggcccaccgcaggcccaggggcagaggcttcggtgagtgggtgggtgtcaggcaggacccagccatgcccaccccaggcctggagccctgagttcacagtgcagctgctcctccaggcccccctttctgcccagcctgggcactgagggatggggtgtcaggggaggtggggacacctcaggccctctcaggatgcctctctccttgcactgccccgtggtcaggcccaggccccacctctgcccaccacagtgggactgtctggttccgtcctcatctgcccggcttccaggatggcccttctccccagctgctgtgaccgctcagaacagggccagggtgcagtggacacagcgggtagcaccggctgccacagcagtcaactggacgaggacgaggtgaaggggcacagggcgccccaggcccatgcagggacccaaggctccggctgccggtcctgggtaggggtgggaatgagcgtggccaagagtctgggtccccgggctatggtcccagaggggcagggctagcgtgtttaccctgggctggccggagcacttcctggggaggcgccataggtgagctcggtggagggctggcaggaagtggccctcctccttcgggcccagtgcctgcccctgagcccaggcaagacctggcttcctggtttacagcctttgccgtttgatctccaggaacctgccgtgatcctgctccatgcatgagcttgccctgacccagagctcagggtcacacacgccaacccctcggtgcacccgtgccctcacccttcctggaggcagagctgggagtggccaagtgggaaacaggcgctggagaggacagctggggggtggggtccctctccactcctaaacgggtgcctgtcaacacgattttgagtgcggagcctgccctcaggagacagtccaggctggcctctcgggccccatccactccgggtcacctggagccatggcgttccctgtggaacaggtgaccactgcctttgtgtgctcgctgagactggaggtatcaggatccattaaccatgaaggcaacaggtctccagcttcagggagggggtccttccctggtctgcatggtttgtgggctgggtcctccagatggcaggtgtgcccagctggtcttctgcgagtgcaggcgctggtgagggaggtggcccgaggcgctcaggcgctggtgtgtgaagtgggtcctcagggctgtcctgcagctcaccgtggccactgggggccacagacaggtcaaaggaagtcggcccaggacaactgggtgctcccaccgcttccacgaagacaggcaggaaagactgtccaggtgccacagccacagccaccccagccgagggagccccagtggaggcccaggacagtcccgcagcctcctgccctcaggagtccaccgagcggaaggcgcccggcagccagggcccgagggcgaggccagccaggaactgaccagctggcaagtggggtgtgctctcttgcagggcaggagaactggagatggggtgggggaggtggccataattaggagaattcagggaggcatacacatctctttatttacaaaatgcggtgaagagaaaatatctagatatttgggtgtaattattccaaacatagaaaacacacaatagaatcaagtgaagggaaagctactgtaacagcttagatactttttaaggagaactgatagtaaatctgggaatgggaaaaaaacacagagctagaatttgtttagcactccgtgcaaaaggcaaaagctgataaaactggagtggacggaggctccgaatgtggccctccgctgctctctctcctgcagtctcatccccggccttagccctgacctctcctccgaagcccctgaagggagaagtgtggctaagatggaaattgctaggcagcagagctgttggcttgtttgcatttattgctttaggaacccagagtccactcttgcaccgggcctgcctgcctgtgaggcagagctggggttgctcagagcacaaggcctaccccatcctgcgtctccagcccgacttggaaacacaggtggggcctggccacggagtaaactgggatctcagaacacaaattaggaccattggggaactagggggtgatgggggatgcagtgagatgaggcctctgttctgaagggctctgtcctccctctcggccctgggggcccatgggggtctgtggaggcctggctgctaaagccagaccccactgacagggctgagtgtgcgctcctgggactcatcttgaaggcagttctgtctggtccctaccctccccgcagctgttcccaacaccagggcctccagcagtttgttctgccctggctcctgctcccactcctgccagaacagatggaaccatccaaaaccatctatggccagtcactaggaaaagtgcccttcctgtccaggaatggggaggtgacagctgggggactggtcaggcccaggaggagggccccagtgtggggtatcccgggtgtccgtagctacctggtgaaggccgcgatggcaaccacctgcaggacggcctccaggccgtgaagggccaggagcgtggcgctgagggcccagtccgcccacaacactagggcctgccaaagcaggaagtgggcagagaggagggcggtgccagccgtgagggccaggctggcggccagcggcctctcagcctctgtcaggttgcccctggtgcctggagaacagagcaaaggggagggaaggtggtgcgaggcgctccctggagcccaccgcccacaggtgcctggagggctgctgggaccagagcagctccttgccctacgttcctccggggcctggggaattccagggaaacagcctccatggccacccagaactcaggagagccagagagcatgggcaacacaggcgtgagcccctcctgggggaggtgcccctgcaacagcatggtttgatctgtctctgggtcttctgggtcggctgtgtgggcgggggtgaatttggtttctaaaatgattcaagtgcatctgccacgttttcctaattccaagtggaactgaagggatttttttgaaaaattcccaaagtatttttctctggtccaaggccagttctggaaaatttcacgagtatgtattaaaaacaaaactgcgtatttagcaaacaaatgggtcagtcactagctgagcccaggtgcctggagaccctgcagtgtgcggcgcgcttggggagggtcccgttggcctagcagcccccagcagggccaggccacaccctgtccccaccacctcagggcaggcccaggccccagaagatcagccaagaaccgggcctctgtgccgcagcggtgctcgcaccctcccagcagtgcccgccctggggggcaagctctagaggttctgggacgtaagtgcagacaagacactgacggccgggcacccctcagtgggatgggcagctgagagaactcgcctccatcctcctagtgtgtctgaggcctgataacaagaggaagggtgggggccacccttccccgcagccttggttcctcactggacatcaggcatcaggggtgtatctgtatgtgaacaagaggggcccaagattccagcctggcaggggcacagcgccctggaagtgcccattgcgttccccacggcaggacaatgtttcacaaacacgtgtgtttaggtgcacatgttacgaccatgagcacgcagagggctggaagtctgcaccccgctggccacagaggtgagctctggggagggcgaatttccatgttttacttctgcaccccttgaatcttgtacaagaacatacccttgaacaaattgtgtggttaaaaaaaggggagtgaggccaggcactttgggaggccaaggtgggcagattgcttgagcccaagagttcaagaccaaccagggtaacatagcgaaaccctgtctccggccgggcgcggtggctcacgcctgtaatcccagcactttgggaggccgaggtgggcggatcaggaggtcaggagatggaaaccatcctggctaacatggtgaaaccccatctctactaaaaatacaaaaatgagccgggcgtggtggcgggcacctgtagtcccagttactcgggaggctgagacaggagactggcgtgaacccgggaggcggagcttgcagtgagccaagttcacgccactgcactccagcctgggcgacagagcgagactctgtctcaaaaaaaaaaaaaaaaaaaaaagaaaccttgtctcgtctctaccaaaaaaaaacaaaacaaaacaaaacaaaattagctgggcgtggtggcaggtgcctgtaatcccagctacttgggaggaggggagggctgaggcaggaggatcgctcaagcccaggaggtcaaggctgcagtgagctgtgactgcaccactgcactccagcctgggcaacagagtgagacctcgtctcaaaaaaagtaggtcactggaaggggttgcagacttggggatccctagagctggagtggggaggctgggggctcccacccctccagactctgctgccttttgggacctggcagaactctccagggctctctcctcagacagctaagggcaaggggaaggaaaggggtgctggtgaatattccggagctccagatgtggtggtgggctgggcttttctgatctcagtgccattacccagtggcttctacaagacatgcttccaaacacagagtctctcccaacgatgcccccagtgttatttgtctctgggacaaaacttcttgattaatacttaatgacactgtaaggtgagcctgcaaagcaactgggtaagcagtttggataaaaaatgtctctgagaaccacactataaaataattactcttgaaaggctgtggaaacagatagcaactcttaggacaggttcttcacggtgttaacagtccactcacccaggtataaccgaactgcttctagaatccccatcagaaacagcagagcaagatcgaggaccaggtagcggtgaggatagctgaacacctgacctgaagagcagaggcgcggacggaacataagtaacctggcacagcagcagcagccacctcagcttgccttttccttttttttttttttgagacagggtcttgctctgtcacccaggatggagttcagtggcgcaatcttggctcactggaacctccacctcccgggttcaagcaatcctcccacctcagtctcccgagtagctgggactacaggcgcccaccaccacgcccggctactttttgtgtttttagtagagatggggtttccccatgttggcctggctggtctcaaactcctgacctcaagtgatccgcccacctcagcctcccaaaatgttgggattacaggcgtgagccactgtgcccgtccctgacttacttttatacgtgatcatcaggagcgtggcgaggaaatacagggcgtagtacgttccgctgagataaaacagcatttgaaggggaactgaagagagctggtgagtggttaaggatcctcaagctcaacaggcttgggagcagcctcccaggtggctgaacaagaggggctggttctgtcatctgtttggtggccacagacaccaagggaccatggagtcttggcaatggctcactgcctatctgaggcttctgtcactatgctggctgccaatgtggtcccatgagctgacaaggcctttgtgggacccccctccatgccacaacaatgcggtctgtgcactgcagcccctgccctcctgactgtggacaggactggtcaggggacagcctccacacactggcatccccagtgatgtcaccctgcctttggccccagttatgagttaagagagaaaaaataactttgtcattttctttttttttttgagatagagtcttgctctgttgcccagactggacactgtgcagtggcacaatcttggctcactgcaacctccgcctcctgggttcaagtgattcttctgcctcagcctcctgagtagctgggattacaggcgtgcaaaaccatgcccagctaattttttgtatttttagtagggacagggtttcaccatgttggccaggctggtctgaaactcctggtgtcaagtgatctgtccacctcagcctcccagagtgttgggattacaggcatgagccactgcgcccggccacttttttcagtttcttcagaggaaatatatttctgtttgggggacttaagtatctagtagccatttcctgagctgtgtacatttcctatttgtttatgctaacatgagtctatggggccaggcacagtggctcccgcctgatgccagagcttcaggaggctgaggctgcagtgagctgtgattgccacactccagcctgggtgagaggaaggctctgtccttaaaaaaacataaacaaacaaaaataaaataaaatgaatctagggacaaagtgagggatttccatcttcctgccactagcggccgagacagaggcaggtggccatcgccttgggagccggcagtgtggcgtgcttagccactttgtgcagggctgagcaggtaggggatggagccagcagaactgatccgaggaagttacatcaactctctaaatctgtcaaggaacacccccctctccaaagtggaattactagacagaacttagggaaaacgtggggtgaggccgagtgctctctgtgcagcagcaattcgggcctctgggtgctgtcctggaggggcacgcagcaggataccactgtggaggatcctctccctgaaagagaaaggggccgtgagcaaggcctgacagccaccaggatgctttcccgggtctcgctccacactgacaggaaccacccctgctttattttcctttgatctcgtatttgtagaaagcagcaaacatataccgtgggcctgccactagatagctcccgtgcctctctaaccatccttcaatgaggctaggagtctctgcctttcagaacctgaggctggagacagcgagtaccgggggcaccggggtgggaagtgaacctgggccagacccagctggccctcagggaaagcagcaccctggagcccaccccaacagctgctctcattgtctgtggctcaccgtctgtggcttctccgtatttgccacacatatatgactagatgaaaaccttttctgacttaggttgtaacaaatcttttttcatgattgatgagacatttgctttcctctgaaattttatccccaaatatccctccaaaaataaggattttccaaaccagcaatgcagctgtccagtctttttatcatgcaacctcttgggccttctcccacccccacctgagagatgacaggaagcccgaggagtgagtggagtctctttcctcctttttgattctgaggttttgcatctgaagacgcctctgactcaccctggatccacgctgacctggagcggactaattgtctgaaaagggctcaggccagttgcacgtgtgatatgtgcacgtccctccatgtgtagatacctcaatacacatctagaattgggtggaaacctctcataaaaggaggctcaagctgcaccgctgggcggcaggcaggacagcaacctgaacacagcctctgttctatttccccttcagcgccagggagggcaggacagaaacctggcgttggtgagattttgtggctgatcccacagcttcttgggcagatctggggccttctgtgccagagtttgtggaatctcacacaggcaagagttttaagccagtaaatacaggacatcggcatcagagactcagaactgggctcctggaagaggcaccacaggatggaagcaggaagccaagtgcacggcagaccacgccgcatcgcgttcccggcaggccactctttaaacccgatctgttcttttccaggccttagctaaaccaggccacctaaatacctgtcattatctgtgatgatttcgcattaattggggtttttgtcccttctgttccttttcttaaaggctggcttcttaaacacttccaatgtgtctgctagttgctcactgttatagattgaagttatggggcttgggggaaaaactgtataaaagccttaagtgatgtaacattttaataattaatatgaagggcggctataaccagatacgctgttctaacaattccagacctgcaggagctcattctgaccgaacgtagccttggctttcaggacaacattttttgtcagtgacttactataatcacaatgtggctacgaatagctgtgtcaggcagaagttaaacatggaagtgaaagagaacaagtgttttccctgatgtaatggacaagatgtgttaagaaatcttgttttggtatacacttagtttttttagagacagggttttgctctgttgcccaggctggagtgcagtggcctgatcacagctcactgcagtctcaacctcctgggctccagtgatccgccagcctcagcctcccacgtagctgggaccacaggctccctgaggtaattttttttttttttgagacagaatttcgctcttgttgcccaggctgcagtgcaatggtgcgatcttggccaactgcaacctccgcaccccaccccccccaccaccaccaccgggttcgagcaattctcctgcctcagactctcaagtagctgggattacaggcatgcaccatcacgccaggctaattttgtatttttagtagagacggggtttctccatgttggtcaggctggtcttgaaccctcgacctcaggtgatccgcccgctttggcctcccaaagtgctgggattacaggcgtgagctactgcgcctggccttccccggggtaatttttaattttttttttgtagaagggggtctcgctctgtcgcccaggctggagtgcagtggcgccatcacggctcactgcaacctcgacctcctgggctcaagtgatccgccagcctcagcctccagaatagcttggcccacaggggtgcgccaccgcctggctgatgtttacagttttttttttatagagggggtcttgctatgttgcccaggctggcctcaaatgatcctgcagcctcggcttcccaaactgtcaggcttacaggcctgagccactgcgcccaacctaaacttaatttttaaccaaatgaaaatacacaaaacaaacctggttactagaggctgtcctgcctatggagtagccattctttattccttcaaaacaatgcacctaattactagagaacacgcacgaaggtttggcacttcagcgcccgcgtatgggagttctggctgtacccacagacagcagaaggcggctcctctgcaggatggccgatttactgctttggtctgtcccttcctcctctcggaggcgagtctctcaggcaggacggctgaggcaccggcgcccgcgattttctttggcgagagttccaaggctaccgaaaccctgcgcccatcccgcccacgtgtcttcacaaaaaccacgcgcgggacaagagctgccggggactggggcccccagagccgctccgcacccaccctgcccggggccaggcgcccgcgcgcgggggagctcttcggggtgcaggacgcccgccacccaggccaggccaggccgcgcttctcgatggggtgacggagctgtctcgctcacgtagagacggtggcacggccccgtgagcgcaccgaaagcggaaaccggattgtcaccacagggaaacgccgcgcccgccgctgcaagcccggaagcccccaccccgcccgagctcacctcgccgcggggccgccatcttacccgccccgcccgccggtccgtcgcgatcccggcagcctctcggcccgcgcgctcgcgctccttcggccattttcgcgtctcctgacgaaggggcccgaccgcgccgcgtttcgggagcggacgtccgagccacggccgaggcccgattagtccgtccggcaccgctcgggcactttcggaagggaagaggtggagaaccgacgttcgggagcattcggcctcggggacattcggctcgtctcggctcggcctcgggctgactcggcttccgccggcggcgggaacgggcgaaacccgcggcactaagctctctctgagaggcagaattgcgccggccgccggcgagaatctgcctagagccgtccagccctgtcggccggggacgacagccgcctcagcctgtcaggacagtgaggagagcaggggccgagtctctcggaagccctcgtgaggactcggacctattcggactgattcggcttcccacttcggggaacttcgaccctcctcggttcaggactcggtctcggctcggcggcttcgtgcaggttcggctcctactcgggcagcctctgttcgcctcggctccgctccgcgggcggactcggctcggctctgctcggcggctggctgccttttcggtccctattcgggcggcggcttcgggcggcctcggcccagctcgggcgtcctcttcgggccccgcttcgggctccgcgaccggcgcttcgggcggtcccggacggcgccttcgggaaggctcggcggagtccggatggaggactcggactcggcggcaaagcagctgggcctggctgaggcggcggcggtggcggccgcggccgctgtggcggcggcggccgcggccgcggcaggaggcgaggcggaggagccggtgctgagcagggacgaggactcggaggaggacgcagactcggaggcggagcgggagacgccgcgggtcacggcagtggcggtgatggcggcggagcccgggcacatggacatgggcgccgaggccctgcccggccccgacgaggccgccgctgccgcagccttcgcaggcaagtgcgcccgccggcctctcgcctcgtccggttcccgcgcgcctaccccgcgcgcctgccccgcacaactgtcccaggtgaccagcccgccacacctgtccctcacacctgctccacgtgaccagcccgctccacccgccctgcacacctgcccctcacacctgctccacgtgacccgcccgccccacccgccctgcacacctgccccacgtgactagctcacccctcacatctgcctctcacacctgccccacccgcccctcacactttccccacgtacctgctccaggtgaccagcctgccccacctgccacaaatacctgcctcgcacacctgctcgacgtttccagccttccccacctgccccacgtgatcggcctgccctacctgccccgcacacctgccccacatacctgccccaggtgaccagcctgccccacctaccccaaacacctgccccgcacacctgcccctggtgacctgcctagcctcacctgacctggccctgccctgcacacacctgccccctgccccccttttctttgtggcagccccgcctcctactggtcccccctgtgcagctctgcccctgccctgccttcgtccatcctggctccccccacctgtcctggagaagccctggggtgggtgggcacctgtggtcaccaggaaccccccacttcctgagggccagttcaggcatgacctgagcgctggggagccaggggtgggcagcctgctggaggccatgatgccagaggtcagcgtggctgtgtggtggcccaggggggctgcggagccacctgtgcaggctcccctcccagtcctccctcttcctcttgcctttttccctaaggacctgctcctcctgccccgcttcctgtcgggcttcctttggggaggctgctgtggctttccagtccacatttttatataagctgcttatagtttcttgccacacaggtcagtctccttctcaggctccaaaacactgggagcccgtggcagagctcacagatgccctacggggctggtgccgtccacccacctcctgtgtcccgcccttgtgtccgtggggcatagacttccccacccactggcttcctaacgcactgtattcttccccattggagttcccgagtgtcccccagggactcacagctcagtgttgagacccttgggaggagcttcttgttgcgttgtgaggcacttttcccctacggagctttgcgggttgaggaactggatcccagtcctggtgtgctgggtatgtcagggcattgcgtgtgctctgggtgcttgttcggcctgggggctgggtgggggccagcagcgtctgggctgcccttggtcagctgagtggccctcgaaggcaaaggggtcactgctgcttgtttggttggttaagaaaaaaaagtgagggaaggctttgtgactctcaggggttggcgtccgtcgctaaactctggtttgacgttgggatttggagccatgaggttgatttcaggtttttgtcatttttgcacgtatttttctgaatgcataaaagaaaaatgatgctgttcatcatgatgtcagagaaatgtgctgacgtgtgttttcttctgaaaaatatggtagttgtgttttgatgtggtaaaagcactttaatactttttaaaaattacgaacagctgacgtcaagtggtttccaggtttaagtaactcagcaggacacgctgccgcctgaggaggctttgggcggctgctcccagggctgccatgggcctggcgttgagcactcactgtggccgcgcgccgcatgccggggcttgtggtgctgagaggcgaggatgagggaaccgtgcacctggtgtggtctggtcgtggagacagacagcaaacatgcctttttttttttttgagacggagtttcgctcttgttgcccaggctggagtgcaatggtgtgatctcagctcaccgcaacctcccgcctcccgggttcaagtgattctcctgcctcagcctcccgagtagctgggattacaggcatgtgccaccacgcccggctaattttgtatttttagtagagatggggtttctctatgttggtcaggctggtctcgaactcctgacctcaggtgatccgcccgccttggcatcccacagtgctgggattacaggcgtgagccaccgcgcccggctgcaaacaggcatttttagggcagtttggtgagtgctgggttaatggtatggtcaggactcattcaaccagtatcttttaagcatctgctgtgtgccagagattgccctggacacaggacattctagaactctgggtgacagaagagccacttgcttggcctaggagcatcacaggaagactttgcagaggcagagaggagggtgtgggggtgttggcggcagaaagtgtttctctagaaacactccagcatgtagaggctggagctgcaggacctatctgggatgacaggggcaggaggtggggtgcagctgacctctgtggtaactgccctgtgtgcagatgctgctgaagggcctgtctgcatgccagggggctgagttccatgttgtagggggtgcggtggggtggcaccaagggacataggcaggttagatgtactttttaggaggaaggggtcagagaccaagggcaatggctgtgagcatggggccgaggtcacctgacgatggtggcctgacccctgcggtggaggagaggcaggaatggagctacaagagtgggtccaggaggtgtcctcacctgcggggaggccgagagctcctcgtaggcatagggcacacctgaccagcagaacccacagctgtgccgcagaaggagatagaagccccgtggtggtttgatagagctggggctggctggggtggcgggtttgttgtatgcattttttactgcacgtaaaaggctttactggggaagaatagatttcctctctttttcctggaagagccgaatgacttagacaatggaatagaaatgtaggtcgagcgtgttcatggaagtgttaagatcttcctggttacaagggcacacacctgagggggagtcactttgtttgaagcacctgagcgaggctgttcgctttgtccattctggcttttgttgcttgttaaatgaggctccttctgttgcagaggtgaccacagtgacagtggccaacgtgggggctgctgcagacaatgtcttcaccacgtctgtggcgaacgcggcatccatctcaggacatgttctggtaagctgctccgaggggcacagcccagggcgggtggtgccacgctgggggcctccggcttccccgaggctctcccggggttcagcccgctgtgtgaacgtctgctctgtgagctggggagggacgcactggctcgctctgctctcagaggccttcgggctgtgctggaggtgggagaaattacagctgaggtagaagctgcctcggaaggccaggtgaagagccacacctgtcagatgggcttgtggcctgcgttgggcagggactcccagcaggctgctgtccggccacagttcagcctctgcccgaggcccggccctgcctgtgctccttatcctatagctgcagggccagctgaaagaagcaaggcgtttccctcccccatatcctgttctcgtagcatttatggtgcagtctcccacgcctgactgctgtctacttagaaaactgctgaaagccagttgcatttcaaatagtgtctgtgccaccttcagagcccttttgtgatcatgttttatcagcttattttatgttttatgtgtggggccttcggcgatctggggacatctggtcaaccagggcaggcaaccttgtttccaagtggcagatgccagggtgggtccagtctccagaaagggattttccctgggaccattggcacctgttacttgtagtcttttcagccttggtcacatacctgggacatcatctccatatacctgaaagcagagtggttatttgtttgttttgtttttgagacggggtcttgctctgtcacctagactggagtgcagtggtgcaatctcggctcattgcaacctccgcctcctgggttcaagccattcttgtgcctcagcctcctgagtagctgggattacaggcgtgtgccaccatgccaggctaatttttgtatttttagtagagacaggtcaccatgttgtccaggctggcctcaaactcctgacctcaggtgcccgccttgacctcccaaagtgctgggattataaggattataggtgtgagccaccacacccggcctgaaagcacagttattgttagaatggcagcaaacagaaaacttgtgaaggacttcagtaaaaacataagaaacttggaaaccccctcccctgccctcccctcccctgccctcccctcccctgccctcccctcccctgccctcccctgccctctcctcccctcccctcccctgccctcccctgccctcccctgccctgccctcccctcccctcctctcccctcccctccccttcctttttgacagagtctttctctgttgcccaaactggagtgcagtggagtgatctcaactcactgcaacctccacctcctgggttccccatgttgtccaggtagtctcaaactcctgacctcaggtagctaccatctcggcctcccaatgtgctgggattacaggcatgagccaccgcacccagcccagaaacttggcttatttctggtgggtgtgagaacacacacaagctgacccatggccacgtggcgatctgtgttttcagtcaggctgctccttcctggcagtggggtctgggcacctcctcatttcctaggaggggctgaagcccaaggcacctgtgggtgcctggaacgtgctgacgtcatggagcgggggtgtcctgcaagtgcctgaggctggttttctcccctccaggccaggaagaccagagactggtgtgttcctgtttggaaactgacaacaaagcggggcacggtctgaaataactgtgtgttcccttcctaagaaaaatactctgtgactcttaaacaaacacaagacattccttttctccagtgaagagctgcaggtctttggtgactcaggcacagcagtaggaccccctgtgtgagcccaggcgtcaggcatgtgtgttgggggtccctccactccatgataaacttctactcaagtgctctgatttgacagtgacattttcagatgtaggaaacagttgtcagctgggcgcggtggctcctgcctgtaatcccagcactctgggaggccgagatgggcagatcatgaggtcagaagatggagaccatcctggctaacacggtgaaaccccatctctactaaaaaaaaaaatgcaaaaaattagcctggtgtggtggtgggcgtgtgtagtcccagctacttaggaggctgaggcaggacaatagcgtgaacccgggaggcggagcttgcagtgagccgagatggcgccactgcactccagcctgggtgacagaacgagtctccgtctcaaaaaaaaaaaaaaaaaaaaagaaaaagaaaaaaagaaacagttgttttctcactttgcctcggttggttttgtattcagaatgaaaaccttggggcacccaaaacacggggttcagagaggcccctggaagtctctggtctgccccaccgtggggtgaacagagcctgcaggccagagtttgccggatgacttggccaaggtagggttcaagttccagcagtggtgtgtgggcatggagactctggcttcctgtggcggggtctgtgccgcctgaaggctgattttggaagcaggcagcagttgcagcagcttcagccagtgtggaaatgtggttttgaggccctggtctccagttgccatctgtaaggaggtctggagggcggtcctgcacaaggccttgtctgtggcggccaactcggtctgttggaaactctgcatgaagacggtgaccttgtgggagcggctcaggtggaagggagggtgtttcttgtttgtggagcacctttcttccttccctttgacaaatgatggcaagcattttcctcagcaccacacagacttcggcattgtctgttcttgttcttggctctgttttcaagtctttgagaggtatctttggaaaagatatggggtgcctaggtgagcgtcccttcttggtgagaacagccagagagccctgctggaggacggcccagctgggctcagtgacacgcctggtgtcactctcggacgtgacctgacggagcggtttttccttctagtctggtaggacggcccttcagatcggggacagcctgaacaccgaaaaagcgacactgattgtcgtccacacagatgggagcatcgtggagaccaccgggctgaaaggcccggcagctcccctcaccccaggtacagcggtgcctgcaccccaggcctcgggcaaaacacgtttcagaatagctagaatttatttcagggatttatttacttgtttctttttgtggtaaatttggaatatcatctattaatagattttaagtaaaagcattggaattttcctgaccaagaagtttttccgccgttgaaggaggtggcgctgccggggaggtggtgtctgagatgagagtgtactatgcttcccggtgtccggcctctcaccttcaaacactttctctgcccaaggtcctcagtctcctccaacccctctggctcccggccaagaaaaaggtggaactaaatacaactgggacccttctgtgtacgacagtgagctgcccgtacggtgccggaacatcagcggcactctgtacaagaacaggctcggctcaggtgaggactgccacttcagactccaaagttgtattcccctttgtaacccccctagcataaattgggggctgagaaagatgaaaatcatggcacctagaactagttaagaagacagggctgggcgcggtggctgatgcctgtaataccagcactttgggaagccgaggcgggtggatcagaggtcaggagatcgagactatcctggctaacacgatgaaaacccgtctctactaaaaatacaaaaaattagtggagcgtggtggcaggcgcctgtagtcccatagtcccagctactcgggaggctgaggcaggagaatggcgtgaacccaggaggcagagcttgcagtgagctgagatcacgccactgcactccatcctgggcgacagagcgagactccgtctcaacaacaacgacaacaaaaaaacaagacaaaaggtgcaggtgacacccagttcctgtgaactgagctgaggcctgggagaggcacgggacagggctgcgcccaggaaccatctgggggtgaaaagccatcgtgacccacgggacaggagacaagcgagaagaagcaggagggaggcagggctgggacgtgttcctcaagttgccaggttagcttgggacttgtagatgaaggctctggaagtgggtaccagaggtgctcagtgtgggacctggttgagcttgcactgcctgtggacagcgggtggagagatcacgtagggggtcagaggcacaggctgcaaaggcagacccgtggtggacctgtcagggccaagtatgtgggtgggtgagatcacatgagccgctggggcgctggtgctggtggaggggttgaggaggcgccaggaggtaggcaatggcagaggtgacgttcccacctgccatcatcatgactgctgcccttccttgcaggcggccggggacggtgcatcaagcagggggagaactggtacagtcccaccgagtttgaggccatggcaggaagagccagcagtaaggactggaaaagaagcattcgctacgcgggccgacccttgcagtgcctcatccaggtatcgtccgtgacctcacctgtgctcagcacacagttcagacgtggggccctctgaggcggcccagccagagggagggcacagaccacggggtcagacaaatggggtttgcagcctccacctgctgtctgtgtggccttgggcgagtgatttaccctctcatgtttcagtttccgggtctttcacgtggggatgacgatgatcgtgaccctgtgaggattgttgggagaagtgcatgaggtcacagcgcctggcacagaatagctgcagaaagggggcgtgtcaaatacacaaaaaatgaaaacagtagaagttaagataatcgcttctgtttgaatgcgtgtgaccctttcaaagtcacctaacttctcgtcagtctactaagaaaagaggacttctaattcctattccagtttagctccttgggtgttgttaaggaagcaattcctgtagagacttttgcaaatcttgaaaggaaagaggtaggtcctgccaccaataatggcattgtgaaaaggagaaggctctggaaattactgtttttgtggttttttttttttttttttgagacagagtctcaccctgttgcccaggctggagtgcagtggcttgatcttggctcacagcaacctccacctcccaggctcagaggattgtcccacctcagcctcctgagtagctgggattacaggtgcccgccaccacacctggcttttttttttttttttttaattttcagtagagatggggtttcaccatgttggccaggctggtcttgaagtcctgacctcaggtgatctgcctgcctcggcctcccaaagtgctgggattacaggtgtgagccacaatacccggcctattttttttgtattttttaatagggacagggtttcaccacgctggccaggctagtctcgaactcccgacctcaagtgagccacctgcctcgcctctcaaagtgctgggattacaggcgtgagccacaatacccggcctaatttttgtattttaatggagaccaaccatgttggtcaggttggtcttgaacttctgaccttaagtgagccacccgcctcggcctcccaaagtgctgggattacatgtgtgagccaccacacctggcctgggcattacctgatttctcacaattttttttttttttgaggcaaaggcctccctctgttgcccaggctggagtgcagtggtgtgatctcagctcactgtaacctctgcctcccgggttcaagcgatcctcctgcctgagcctcccaggtagctgggactatgggcatgcgccaccatgcccagctaatttttgtatttttagcagacacgaggtttcaccatgttggccaggctggtctccagctcctgagctcaggtggtctgcctgcgtcggcctctcaaagtcctgggattacaggcatgagccaccatgcccggccctgattttgcagaatttttatctttatgaggttgggcacggtggcttacgcttgtaatcccagcacttcgggaggccgaggcgggcagattgcttgaggccaggagttcgagaccagcctggtcaacatggcaaaacctgtctctactaaaaatacaaaaattagctgggtgtggtggtgcaaacctataatcccagcttcttgggaggccgaggcatgagaattgcttgcgccggggaggcagaggttgcactgagccgagaacgtgccactgcactccagcctgggcaacccaacaagactctgtctcaaaaaaaaaaaaaaaaaaaagaatttttatatttatgaatggtaggtaagtggtaaaagtggttgaaatcttctattattgaatgattgacatttaggggctgacttgctaatgcatggtggttcttttcacatctcaggatgggatcttaaaccctcacgctgcctcttgcacctgtgctgcctgctgcgacgacatgaccttagtaagtggccagcgtgtctggaacaggatgacttggtggggctgggggcggctgagtgggtcccacagcccttggcctctcggctgtttccctcctgccctctgccttggagagagacactgtcctcacttctcctgggttgctctgttccctcctccctgatacgtcacagtgaatcctgatgtctcgatggggaacacgtggttggcccccaagatgttgctcaaagaacatttgtggaaaccttaaataatgaaaagcggttataatgtcaccgccttaactctaaaactaaacatacacgcttttccttgtatgcatgccattttatattcctcattttgtaacatgtcagaaaaatgctactgtaaacttattcatgtgtagagcttttaacgcctttttgacgtatttccttattctaaattcttaactgcttcacaaagacccaaaataatttttctttctttttttttttctgagacgaagtctcattctgtcgcccacactggggtgcagtggcgcggtctcggctcactgcaacctccgcctcctggattcaagcacttctcctgcctcagcttcccgcgtagctgggattacaggcatgtgccacaatgcccagctaatttttgtatttttagtagagatggggttttgccatgttggtcaggctggtctcaaactcctgaccacatgtgatccgcccgcctcagcctcccaaagtgttgagattacaggcgtgagccactgcacctcaaaaaaaaaaaaaaagagcatggagagacctaccgtgttcttggggtgaaacactaaacatcctagaattgtgtagttgatatatagatttcatgtgattctagtggaaaaaacaattttgtgaacgtaaaataattttgaagttgattgggaaaagccagtcggtgagactcttagagacgctgcaggagtaaaggagccgggaggagacgtcggtcccattggcagttgagcctgcaggtagatcatttgcaggggctccaacactgaagtacttagatgtcagtctaggaaatcatgtacagggtttgtacgtggaagatactaaagaaaatgctgaagagagagaccagggaagattgaaatacgtcaaaagacgtcctgcgcccgtggattagaagactcagtaaagatgcgactttttcccaagttgattcgtaggtttaacacaatgactatcaaaatcccagcaggattctttttagatgcagacaagctgattctaaaatttgcatagaaaggtaaaggaaataaaaaagccaaaacagttttgaaacaaaaaagccaaaacagttttgaaataaaagtttaaaatgggtggaatcacattgcggggtcttaagacttacgggctcgtgacagtaatcaagatagtgtggcactggcagagggagagaccccacgatctgggtcagactagagtgtcatagtagactccagcaaatggccttggagtgacaggacgttcatcagcagagacaaaggatgacctaaacttcacacttggtacaaaaatgaattcaaaatgggtcatcgatctaaagtgaaaggtgaaactataacatttttaggagaaaacacattggaaaatcttcctgacctggagttagaactaggatttcttggattggacttcatcaaattttagaacttttggcttccgcttggggagtggtggtgtgatgagctcagtggaccaactctccagagaaataactagtgaaaattgtgaaaaaataaccccttaaggtctccagaaattgtcctaggggagtacagcaaataaacatccaagaaaatgtagtaagtcttggaaagggcagtgaggattgtgacgtttgagctacgaccagctccttccctccctttctgcccccagctccctatggtggaggctccattgtgggtggttgtgaccaagaaaacggttcccactccttgcagttcccggtcaagggatatggtatctcactgggaggggcaggccaccagcatttctcaaccccttcagctctaagttgcagtaaattcctgggaagtgtgactgaaaatctcttcagtcatccccactcagagggcagaggctttacccaggcatgggaggccaagcatacggagccccaatttccatcaacccacattgcccatagggtggggtgtccatgcagtgagaggctgctgccccccacacagaacccggctaatgcaacagaattccctctgatagactcaggcactgttcctgcctctaggtctatagtaggggctcagacattcagcccaaaagagagagaggccgtaagaacagagagctccaaagcccctcccaaaggaactgacttgatttgaaacagtatggggatgttcaagcctaaaagtgccctggaaaagaatggacattttgatggtaagcagttaagaggaggccagcagttccattagagcaagaaactaaactgtaggtcagcaggtttaccagagaggcgaggaaagccacagcgaagaacccatctgggaaaccgaccttcaagatcgaacctctcagtaaagaagccctaatttaattggctcagacagtggagcagtgtgtgccccagggcattgttgaaagtaatggagcaggcagctggcagttagttgattctgacacttgactacaccaacagcttaacagagatcaggaagagcgacagccaaaactcccaccaccaaaggtgattgcaccccacccagggccgagccctcagaggagcagcagccgaggccgccccaggagaacaggctcagtaagatagtccagctccgtacctgagtaataaacaagctgacagcagcaaggatcccagagaaaggagaactgctttccactgttgctacaatgtatcacctgcggtgtctgattcttaacaaaagatgataagacatgcaaggagccttggaccatacacaggaagaaagcaggcaacagaaattgcctggagaggtccggatgttggggttaacaggaaaaagctttaaaatggctatcctcagtatgttcagaggactgaaggaaaccacagctagagattgcatggaaggtctgaagacactgtctcctcactggagaatgtcaatgaagagatataaattatttaaaaaaaaaagtcggccgggcgtggtggctcacgcctgtaatcctagcactttgggaggccgaggtgggcagatcacgaggtcaggagaacgagaccatcctggctaccatggtgaaaccccgtctctactaaaaatacaaaacactagccaggcttggtggcgggcgcctgtagtcccagctactcgggaggttgaggcaggagaatggcatgaacccgggaggcagagcttgcagtgagcccagattgtgccactgcactccagcctgggcaacagagcgagactctgtctcaaaaaaaaaaaaaaaaagaaagaaagaaaattagccgggtgtggtgacacatgcctgtaatcccagctactcaggagactaacgcagaatcacttgaacctgggaggcggaggttgcagtaagccaagatggcgccactgcactccagcgtgggcagctagagtgaaactccgtctcaaaaaagaaaaagaggtgggatctttaggggcgcttaccatcttaatgtggtctcaccatgtgactcacacaccccgcggtgcccccacttaaggaggagttgcaagcgcagcatagcttttgcacacatgaaggtggtggcctctctcctttctcccccagagtggcccagtcaggctttttgtgccttacaaaaggcgcaagaaggagaatgaactgcccacaactcccgtgaagaaggactcccccaagaacatcacattgcttccagccaccgcggctaccacctgtgagtttgagaaaacacagctctagtttactgaggggacctgagtgcattgccttctctcgtcaccactcccacggccactgcgggattctcacttctaaagcacattgcgtggccagagggattccaacgccatcacactcctttgcagtgcgtcccccgggtgggaaggggtgtcccagtgcccagctcggtcttgcttccctgggacccggacactgttggccttgtcctgggctgtttcctagtatgagtgagcatggctgagtgcccagcacacgctcaggggacgtttcctgacaagggcgtccttggtgagggattctcagtgcgctggacgagggctgcggagagctctgtgggtctttctctgtggccgggctggagggcggcgtcaggatcccggctcgctgcagcctcggcctcccaggctcaggcactgctctcacctcagcctcccaagtagctgggaccacaggcacgtgccaccatgcccagctaatgtttttatttttttgtacagacaggatttaaatggggagaggtagcaataggagaaaatgtctttgtaataggcttttgttaactaagtctgggtttttgcatttatagagtaaggtctttctaaaacaccctgtcagctccttcctgaggccctgggtggtgggtgcaggaagagtcccacagcagcagagtctcaagatctgtcgccaggatttttttttgagctggagaggcagccttgctgtgggacacagggcagccttgctgtgggacacggctgctttttaccttcagcttggattaaagattttttcttaattcgaaccacgaagtacttaaaaatcactgaaagttttattttatgtttgttttctggctgggcagcacatttccatggttcacagtttaaacagcgaacaattggtagtggcaagttgccatcctggccatcctggttttctcctgtgaggtcttctccaaggtctgggatttcccccgtgtccttcacatgggagggtacagttaccactgcccgcccttcagcccaggcccccacaaggattggcgcccgtgggtggcacgggacctgtgtgccgtgggcgccactgcctggccgcgtgaaatgtgcttctgcctttccagtcaccgtgaccccctcgggacagatcacgacctcgggggcactgacctttgaccgagcgtccacggtagaggccactgctgtcatatcagagagtccggcccagggcgacgtcttcgcaggggccacaggtgagctgctccagtgcctgcctgacgcgtcctcagcatatccctgtctgtgacatcacatccccgacgccacattgggctgcataggctgctgggtgcctcgagaggggccttgaaccaggcgtttgttggtggggacagcgtgtgagccacgtcaggtgggcggtgcagtgtggatggggttggcgtgtggcagtgggttacttgtgacagatgccagaactggcaaagctgaaaatactctctgtctgccggctcctgcttttgactgcagttgtgcaacagaaatgcagcctagctggttgtgtgctggagaatattctagaagccacactgaggaaaatagagttagaactgatttttttttttttttgaggtggagtctcgctccatcccccaggctggagggcagtggcatgatctcggctcattgcaagctccgcctcccgggttcacaccgttctcctgcctcagcctcccaagtagctgggactacagcgcctgccaccatgcccggctaatttttttttggtatttttagtagagacagcgtttcaccatgttagccaggatggtctctatctcctgacctcgtgatgcgcccatcttggcctcccaaagtgctgggattacaggcgtgagccaccgcgcccggcctgatttttataatctattttatttcacctgatatagccccaatcctattatgtcaacgattcaggatcaccacatttcaggggctcagtagccacgtgtggccataagctactatgtgtactgaatggcgcagccatacagcgtgatatttagagtctgctgtgcggacaaccatcccgagcctccctgtcctttttctccccaacagtccaagaggccagcgtgcagcccccatgcagggccagccaccctgagcctcactaccccggctatcaggacagctgccagatcgcaccgtttccagaagctgcgttgccaacgtcacatcccaaaataggtaggtttgaaagaattcacacatgtacaggttattgtcctcagaattgcttccaatgaaagaattcctaagtgaaatgggattcattttggtttggtttgttgtttttgttgatgcattagatcagtggctggtaaagtgtggcccactgcctatgtttgtaaataaagttttactgacacacagccacgtccattcatgtgtgtgctgtggaagttgcttttggtacagcagcagggcacgcccctagaaaccagttggcctgtgaagcctgaagttctttctggtgagtttgctgttgtcctcttgagggtagacactccccagtggcaggtcttggtctctccagagctggcatagacattcggtatctggtgaaagaaagaaaaaccaaggcctaaatgtggcctaaatctttaaaatgacgatacactgtaaatgcattctaactttgatttttcgtttaactgcacttctatttttttgagactgagtctcgctctattgcccaggctggggtgcagtggcgcaatcttggctcactgcaacctctgcctggttcaagtgattctcctgcctcagcctcccaggtagctgggattacagatctcgaactcctgacctcaagtgatccatccgcctcagcctcccaaagtgctgggattacaggtgtgagccaccacatgcagccaagatttctgtataattatacgttttttgtttttttttttgagacagagtgtcactctgtcgcccaggctggagtgcagtggtgcgatctcggctcactgcaacctctgcctgccaggtttaagcaattctcctgcctcagcctcctgagtagctgggactacaggtgcacgccaccatgcccagctaatttttttttgttattgtatttttagtagagatggggtttcaccatgctggtcaggctggtctcaaactcctgacctcatgatccacctgccttggcctcccaaagtgctgggattacaggcgtgagccatcgtgcccagccatcattatacttttttaaagggtgcatatgatcaatacatgattgattgaaccctcccctgctggtggcaaatgcatgttttccatttttcactgtcacagacagcgcaagaaacttgttcatgaaaaacttaccttttcattttcatttgcttgtttcattattctctcttttgcctatctaaactctttccatctttaaagcttacctcagggctgggcgtggtggctcatcctttttttgttttttttttgagatggagtcttgatctgttgcccaggctggagtgtagacttcaggcacgcgccaccatgcccggctaatttttgtatttttagtagagatggggtttcaccgtgttggccaggatggtcttgatctcttgaccttgtgatctgcctgctttggcctcccaaagtgcttggattacaggcgtgtggcttacctgtttaatcccagcactttaggaggccgaggccaggagtttgagaccggcctgggcaacataaggagaccccatctctattaactggaaaaaaaaaaaaagtgtggggtgggtgttggtgaagtatttataccaagaaatcagcaaatgcttgaaatcagagctttttctccaggagggctggggttcgcatcgaccgcttgcccctggtacaaggtgtgcatgtggctcctggatctctgtccccaggtgcccttggtgggcagaagtcagaaatgttctcatgtgcacgtgtgcgtgtttgtgctccaaatctgtgtgtgttgaaaaccatgagtttgccccagtgtctctagttccagtgcagaacctcagggtttgtgctagttcctttgtaactttcttctccaattgtaagaaaccccgctgggcgtggtggctcacgccggtaatcccagcgctttgggaggccgaggcgggtggatcacctgaggtcaggagtccgagaccagcctgaccaacgtggagaaaccccatctctactaaaaatacaaaattagccaggcctggtggcagatgcctgtaatcccagctactcgggaggctgaggcaggcgaatcacttgaacccgggagggcagtgagccaagatgatgccaccgccctccagcctgggcgacacagcgagactctgatttagccacttccctcccctggtcattgtccacggcgctgattctgcgaacatttcagggtccagcagccgcattcagatgagttgtacaacatggagctgggtgggtggagcaggaagggatgggacatcctcctgcctgtgttgcctgctggggggatgtcaggctgagtgctcggggatgtcaggtgctggggggatgtcgggtgctggggggatgtcgggtgctgggggtgtcgggtgctggggggatgtcaggctgcgtgctgggggatgtcaggtgctggggggatgtcaggtgctgggggtatcgggtgctgggggatgtcaggctgagtgctgggggatgtcaggtgcttggggatgtcagatgctggggggatgtcaggtgctgggggtgtcgggtgctgggggatgtcagatgctggggggtgtcaggtgctgggggggatgtcgggtgctggggggtgtcggatgctgggggttgtcgggtgctggggggtgtcgggtgctggggggtgtcgggtgccggggggtgccaggtgccccgggggatgtcgggtgccgggggatgtcaggctgcgtgctgggggatgtcaggtgctggggggtgtcaggtgctggggggatgtcaggcagtgatttgttgtttgctggtcagttttttacccgacttcccaacattgcgtgagagttttcttttcttttcttttttgagatggagtctcactctgtcacccaggcttgagtccactggcaccatctcggctcaccacaacttctgcctcccaggttcaaatgattctcatgcctcagcctcccaggtagctgggattatagacgcttccacgcctagctaatttttgtattttttggtagaaatggggtttcaccatgttgaccaggctagcctcgaactcctgacctcaagggatctgcccgcctcggcctcccaaagtgctgggattacaggtgtgagccactgtgcctggcctcttttctttttgagacagggtctcattaagtcaccaaggccgaaggacggtggcgcagtcatggctcactgtagcctcgaccacctgggctcaaaccatcctcccgcctcagcttcctgagtagctgggatcacaggtgaatgtcaccatgcccatctagttctttgtttttgatttctgttttgtagaggcaaggtcctgctatgttgcccaggctggtcttgaactcctgagctcaagtgatcctcccacctcagtctcccaaagtgcagggattacaggcatgagccactgcaccgggtgatgagaatttttatttattttttatttttaaattttatttgtttatttttttgagatggagtctcactctgttgcccaggctggagtgcagtggtgccatctctgttcactgcaagctctgcctcccggcttcacacctttctcctgcctcagcctcccgaggtagctgggactacaggcgtctaccaccacgtccagctaattttttgtattttttttagccaattttttgtatttttttgtatttttttaaacacagtgaaacgcggggtttcactgttagccaggatggtctcgatctcctgacctcatgatccgcctgccttggcctcccaaagtgctgggattacaggcgtgagccaccgcgcccggctgagaatttttaacggaggccattttgaagctaggagatgtattaatttcttggtttgttttgctttccaaatgctctagtgttgacatccctgcctgcgctggcggtcccacccccgactcccaccaaagcggcacctcccgcgttggtcaatgggctggagctgtcagagccgcggagctggctgtacctagaagagatggtcaactccttgctcaacacagcgcagcagctgaagacgctgtttgagcaagccaagcatgccagcacctaccgagaagctgccacaaaccaggccaagatccacgctgacgcagagcggaaggaggtaaccttggaacaaatgggaagacacgacctgtgccgagtaaccccaggccaccctggtgcctgtgcccagctgcgcaagccccaccttggctcacaaggcccctgccccacctttctggaaaagggagctgtggagagtcatttacaaatgaagcttttcctaaagaaaagtgacagctattgttgttaaggtggttttggtttttgtaaataaggttgctttgtttcagaaagggaaacaattttgtgcgcatcggccgttgtgaatactcaccttttctaggcattattcatcctttgtcttcctgtagtgaaatgtgcttatattttatgaagtttggagaacatcatctattgagtctctgagtatcagcgactggcagggcgaatgctgagccccttcctgggagccgagctccgtccatctgctgtcacaaagccctcccagcttctggcacgttcttcagaaggcggctcctgtgcatggtgggaggctcacagggcgtagtgcccatgttttctgtagcttcctattactgcagcacaagcaaaaggtcacttaggccccttcggcctcttttcatatggagtctctacttcatatgaaccctttacttagattgaagactttgaggtaatataaaggttcaggtgggtgacatgaatagggtagatagaaattactagagccagagtaaactggagagagggtggaggtttctcagctacttctcatagcccaaacccagcagacaggtaccgtgtgtcacagggcacggggacgagaaggtgagagaggagggcgcctgtctgctcagcacagatggggagctctgaaggccacaggaaaggacagggatggattttgttgtagctgctttttcgggtacggtaacgtggactttggtttgtaaacaaaagtcaaattcatatttttcccaccaaatctatgtaagaaacgttttcccccatttcttttctactttctatttttatttttatttgtggaacaggctgtcactctgtcgcccaggctagaatgcagtggcacaatctcggctcactgcaacctttgcctcccgggctccagcgattcttgtgcctcagcctcccaagtagctgggactacaggcacccaccaccacacctggctaattttctgtatttttggtagagacggggttttaccatgttgcccaggctgatctcacactcctgagctcaggtgatccacccgcctcagcctcttaaagtactgggattgcagatgtgagccaccatgcccagcttctactttttatagaagaactttttatttatgtatttattttattatcattatttttttttcagctgctgctttattttactttattttattttttgagacggagtctcgctccatcacccaggctggagtgcagtggcacgatcttggctaactgcaacctccacttcctgggatcaagcaattatcctgcctcagcctcccaagtagctgggactacaggcgcctgctgccatgcctggctaatttttgtatttttagtacagacagggtttcaccatgttggccaggctggtcttaaactcctgacctcaagtgatctacccgcctgagcgtcttaaagtgctgggattatacgtatttatttatttatctatttaaaaaaaatttttttttttgagacggagtcttgctgtgtcgctcaggctggagtgcaatggcacaatctcagctcactgcagcttcctcctcccgggttcaagtgattctcctgcctcagcctccggaatagctgggattacaggcatgtgctaccacacctggctgattttttgtatttttagtagagacggggtttcactatgttagccaggctggtcttgaacccctgacctcaggtgattcacccacctcagtctcccaaagtgctgggattacaggcatgagccaccttgcccggcctatttattttttaatttttaaatttttctgtcattcagtgcacatcaggtacttgttatagattctactagacaagcacataacgaacagtgattatcatcccaggccgtattcaatgttaggggtttgttacggattctactagacaagcacataatgaacggtgattctcaacccaggccgtattcaatgttaggggtttgttacggattctactagacaagcacataatgaacggtgattctcaacccaggtcgtattcgatgttaggggtttgttacggattctactagacaagcacataatgaacagtgattctcaacccaggtcgtattcgatgttaggggtttgttacggattctaccagacaagcacataacaaacagtgattctcatcccaggccgtattctatgttaggggtttgtgtagtttccccaggacctgtagtggtgattgtccagaagccttccataggaggaatgcatggtcattaggtatgccacagctccaaacaccagcaacaccactcaatgactattgaggtaatgacagtgacactgcagctccacatggctggggaggtctcaccatcatggcagatggcaaagcgggaggaaaggcatgtcttaatggtgacaggcgagcagaagagctttttagattcttaattttttaaatgactgatcaatatgtgattagtgttttttgtgtttctttttttttttttttttttttttaagaggtaaggtctcactctgttgcctaggctcatggctcattgtaggctcaaactcctggaaatacgggtgcatgccaccacgcttgcctaatttatttttttattttttattttttgtagagactgggtcttgccgtgttgcccaaggtggtctcaaactcctgggctcaagagatcctcctgcctcagcctcccaaagtgctgagattacaggcgtgagccactggacccagcattaattttctttcaaggaagaaaagtgtttctactcctgaagacaaagataattttaaaatactttttcactgggcacagtggatcacacttgtaatctcagtgctttgagaggctgaggtgggaggatcttttgagcccaggagtttgagaccagcttggacaacatggtgaaaccccgtctctacaaaaaaatataaaaattagctgggtgtggtggtgggcacctgtagtctcagctacttaggaggctgaggcaggagactcacttgaacccaggaggcagaggttgcagtgagctgagatcgggccactgcactccagtctggcgacagagcaagactctgtctcaaaaaacaaaaagtccaggcgcggtggctcacgcctgtaatcccagcactttgggaggccgaggcgggcggatcacgaggtcaggagatcgagaccatcctggctaacatggtgaaaccccatctctactaaaaatacaaaaaattagccgggcgtggtggcgggcgcctgtagtcccagctccttgggaggctgaggcaggagaatggcgtgaacccgggaggtggagattgcagtgagccgagatcgcgccactgcactccagcctgggtgacaaagtgagactctgtctcaaaaaaaaaaaaaaacattagccaggtgtggtgacatgccagtcaagaggctgaaacgtgaggattgcttgagcctaggaggttgatgttgcagtgagccgtgatcacaccactgtactccagcctgggcaacagagtgagacctcgtctcaaaaaaaaaaaaaaaaaacaaaaacaaaaagaaaaaagaaattaaaaaggaaaaaaataaagaaaaagatatatatatattttgagatggtcttgctgtgtcacccaggctagagtgcagtggtgtgatctcggctcactgcagcctccatctcccaggttcaagcgattcttgtgcctcagcttcccagatagctgggattacaggtatgtgcaaccacgcccagctattttttggtattttaggagagaagaggtttcgccatgttggcgaggctggtcttaaactccaggcctcaagtgatctacttgccttggcctcccaaagtgttgggattacaggtgtgagccaccgcacctggccaaaaaaatactttaaaaaaaaaaaaaaaaaagtatacttccaaacaaacagctacttaatgctgaaatttatagaggaaaagaaagtttaaaggcaaaaaaatctataaccctgcacccaaagataatgaccgtgaacacttactgtgtgtccttttggtcttttttggtaattgaggtaaactgtatgtacagcaaagtgcctcaatctccaccataaaatgtagtgagttttgatgaatgcatgaacctggtcatgagaccatttcaatccctgcagaagcaccactcatgtccccttccatcggtcccctgccccatggacagtcactgctctcatttttttttttttcttttctcttttgaggcagcatctcactctgtcactcaggctggagtgcagtggcatgatcttggttcactgcagccttgcgccaccatgcctggctaatttttgtattttttgtaaagatggggtttctttttttttttttttttttttttttgagacagtctcacactgtcacccaggctggagtacactgatgcaatctcggctcactgtagccttcgcctcccaggtttaagtgattctcctgcctcagcctcccgaatagctgggattacaggcacatgccaccatgcccagctaatttttgtgttttaagtagagacgaggtttcaccatgtttgtcaggctggtcttgaactcctgacctcaggtgatcctcctgcctcagcctcccaaagtgctgggattacaggcatgagccaccgcacctggcctcttttttttttgagacaagtttcgctcttgttgcccaggctggaatccaatggcacaatctcggctcgccataacctccacctcccaggttcaagagagtctcctgcttcagcctctcaagtagctgagattacaggcatgcgccaccacgcccagctaattttgtattttcagtagagacagggtttcaccatttaggtcaggctggtcttgagctcctgacctcaggtgatctgcccacctcggcctcccaaagtgctgagatgacaggtgtgaggtactgcacccagttgattttctagatttcctaccacaactgatttctaattcaactccaatatgcttagaaaatatactctgatttcagttcttttaaattgattacgatttatttcggccaggcatggtgactcacacctgtaatcccagcactttgggaggccaaggtcttgaggccaggagtttgagacaagcctggacattgtgagaccctgtctgtacaaaaaaaaaaaaaaaaaaaagggtcgggtgcagtggcttacgcctgtaatcccagcagtttgggaggccgaggcgggcagatcacaaggtcaggaggtcgagaccatcctggctaacacagtaaaaccccgtctctactaaaaatacaaaacattagccaggcatggtggcaggcacctatagtcccagctgctcaggaggctgaggcaggagaatggcatgaatccaggaggcagagcttgcagtgagccgagattgcaccactgcagtccagcctgggctacagagcgagactctgtctaaaaaaaaacaaaaaactttttttttaaagggtttcactttgtcacccaggctggagtacagaggtgtgacctcggctcactgcagcctcaagttcccaggctcaagcaatcctcttgcctcagccccccaagtagctgggactatgggcatgtgccaccatgcttggctaatttttgtatttttcatagagagagggtctcactgtgttgccaggctgatctcaaactcctgagctcaagccatccacccacctcagcttcccaaagtgctgggattacaggcatgaaccactgtgcccggccaaaatgtttccttcattagccggatcactggagcccaggggtagaggttgcagcgagctgtgatcacgccactgtgctccagcctgggcaacagaatgagaccctgtctcaaaaaaacaaaaagatgtgttttatgatcatgtatatacttttcgtggtgaatattgcatatacacttgaaaagagttttattcagtcattggttttcgttttctgtaatgtcattaggtcaaggtggttcatagtgtggtccaaatcttgtttttcttcaacctaaagatgtactttcagcttttcttttcatataggtctgttggccatgaattctctgtttttgtctgtaatgtccctctttcacctttatttttgagggacgtttttgagtgacatggaattctgggttgtcacttacatatatatatttttttgagacagagtctcgctcttgttttccaggctggagtgcagtggcacaatctccgctcactgcaacctccatttcccaggtttaagcaattctcctgcctcagcctcctgagtagctgggactatcggcgtgcgccaccacacccagctaatttttgtatttttggtagagacggggtttcgccatgttgctcaggctggtgttgaactcctgggctcaagtgatccacccgcctgggcctcccaaagtgctgggattacaggcatgagctaacacgccggcctatttatttatttattattttttgagacaaagtctcactctgtcaccaggctggagtgcagtgatgccatctcggttcgctgcaacctccgactccctggttcaagcgattctcctgcctcagcctcctgagtagctggaattacaggcacacaccaccatgcccagctaattttttgtatttttttattagagacagggttttgccatgttggccagaccggtcttgaacacctgaccgacctcaggtgattcacctgcctcggcctcccaaagtgctgggattataggcatgacctacctgggttgtcactttttatcattcaccagtttaaagatgtctttccatcatcttctggccagcctgcctacctgccttccttccttccttccttcctttcctcttttcctccttccctccttccctccctccctccctctctccttccttccttccttcctccctccctccctccatccctcccttccttccttcttttttctttcttttttgagacagggtcactgtctgtcaccgaggctaagaagcagtgttgtggtcacatctcaatgcagccttgagttcctgggctcaggtgatcttcccttagcctccagagtagctaggactaccggcactggccactactcccggccaatttttagctggggtttcaccatgatgcccaggctggccgcaaactccttggctcaagcgatcctcttacctcagccttctgagtagctgggactacacatgtgtaccaccatgcccagctatttttttgtttgttttgtatagatggggtttcactatgtttctcaggctggtcttgaactcctggactcaagcaacccaccttccttggcctcctaaagtactgggattaccagcatgaaccactgctcctggctataactatttctttttttcttttttttttttttttttttttttggagacagagtcttgctctccaggctagagtgcagtgacacgatctcagctcactgcaagctctacctcccaggttcaagcgatctcttgcctcagccttccaagtagatgggactacaagtgtgcaccaccacacctggctaatactttgttgttttgttttgttttgagacggagtcttgctctgtcgcccagggttggagtgcagtggcacgatctcagctcactgcaacctctgcctcccgggttcaagtgattctcctgcctcagcctcccgagtagctgggactacaggtgcatgccaccactcctggctaattttctgtatttttggtagagaggaggtttcaccatgttagccaggatgttcacaatctcctaacctcgtgatctgcccgcctgggattacaggtgtgagccaccgtgcccagcctcaggatctgcttcttttggctactttttcccttcatcatggatcctgttatcccttcttcacacgtccagtacttcctgattgtgtgttggaattttagtttatatactgtttatatggtagagtttatatggtagagactctgaattttgttggattctgttgtcttcccctgaagagtgttgggctttgttctcgcaggctgaattcttatggatcaccctgaagaggatcagtgttgatgctgttagggcaggtctgtctggctttttcttctgcctgacacatccttagtcttggatctgcgaagctgtggttttctggatgttcctgggaagtccgtggtgtttttaagcctctaacttgtgaaggttcaaactccagactttcaggtggtgagcagcagccgcagtctctgctcagtgttctcggtcttcagccgtccatttctgctgagtcttccccacatgctgtgtcatcagctcagggtcaaacaaggacgtggggagcgtttatgtgctggatgggagtgtcctctctctgtgcttgctcctttctagggtttctcccctcattttccagccactttgtcagctctggccagggtgactgcagcctgctaccacggtgtggccgcccatgtctggtggcctggggctgcctccaggagaagccttcctggctccatctccctgctacgtcacctgtccctgctatgtcacctggctgcctctctcccctgctcatttggcagccagagtgtctgatgctgctgcgtcagctgggtccctgccctgaaaggctgggctttgaattttattagtaattttatgtatttctatgagagaaatgtggcatgaaatccctttatccttaaaatcccgtttggtagacagccaagccttttaaaacgttagaaagggcggcccctttctcagctggaagcagctgttgcagtgaacatcccgtgcatctgaaaatgtcaggagttagaagaaatgtcaggaagtgttagaagcgatgtgttccctttctctaaagctgtgtatcggacgtgtcattcataaagccattacttgaatagctgagccaggactcagaggctctgagtgtgacaccctgtcctcctcctctcagtgtgaatagctgagccaggacttagttagagtgaccgagtgtgacaccctgtcctcctcctctcagtgtgaatagctgagccaggacttacttagagtgaccgagtgtgacaccctgtccttctcctctcggtgtgaatagctgagccaggacttacttagagtgaccgagtgtgacaccctgtcctcctcctctcggtgtgaatagctgagccaggactcagagtgaccgagtgtgacgccctgtcctcctcctctcggtgtgaatagctgagccaggactcagagtgaccgagtgtgacgccctgtcctcctcctctcggtgtgaatagctgagccaggactcagagtgaccgagtgtgacgccctgtcctcctcctctcggtgtgaatagctgagccaggactcagagtgaccgagtgtgacgccctgtcctcctcctctcggtgtgaatagctgagccaggactcagagtgaccgagtgtgacgccctgtcctcctcctctcggtgtgaatagctgagccaggactcagagtgaccgagtgtgacgccctgtcctcctcctctcggtgtgaatagctgagccaggactcagagtgaccgagtgtgacgccctgtcctcctcctctcggtgtgaatagctgagccaggactcagagtgaccgagtgtgacgccctgtcctcctcctctcggtgtgaatagctgagccaggactcagagtgaccgagtgtgacgccctgtcctcctcctctcggtgtgaatagctgagccaggactcagagtgaccgagtgtgacgccctgtcctcctcctctcggtgtgaatagctgagccaggactcagagtgaccgagtgtgacgccctgtcctcctcctctcggtgtgaatagctggagtcaggacttagaggctccgaatgtgataccgtttctgtcttcctcctctcagtgccatggcttggggtggatactgcttcacactccttcagggtggcccagacacagtaggtttcattttcctttttttttttcttttctctggtggctacaaaagtgaactttttttcttttttttctttttctttttttcttgagacagagtttcgctcttgttgcccaggctggagtgcaatggcgtgatctcggctcaccgcaacctctgcctcctgggttcaagggattcttctgcctcagcctcctgagtagctgggaatacaggcatgtgccaccacgcctggctaatttttgtatttttagtagagatggggtttcttcatgttggtcaggctggtcttgaactcccagcctcacgtgatccgcccacctcagcctcccaaagagctgggattataggcgggagccatggcactcggccctattttgtccgttttcttgagacatcttaaatgaacatatagcttcaggaagccatggtagcagacaggaccacagtgctttccgtgatgtggccgtctcctagagtccagcagaccggaccttcgcaagaaaaactgctgaggagatggagaaggaaaggccaaaagcctggtattcactccagaggcagtcgctgaggagatggaggaagggtcaaaagcctgatattcacttcagaggcagtcgctgaggagttggaggaggaaaggccaaaagcctgatttatcagtccagaggcagtcgctgaggagatggaggaggaaaggccaaaagcttcgtattcattccacaggcagttgctgaggcgatttgaggaggaaaggccaaaagcctggtattcacaccagaggcagttgctgaggagatggaggaggaaaggccaaaagcctggtattgactccagaggcagtcttttgttgttgttgttgagtctcactctgtcacccaggctggagtgcagtggcagaatctcggctcactgcaacctccgcctcccgggtgcaagcgattgtcctgcttcagtctcccgagtggctggaattacaggcacgcgccaccacgtctggctaatttttgtatttttagttgagatggagtttcgccgttattagccaggctggttttgaactcctgcgttcaggtgatccaccctccttggcctcccaaagtgctgggattacagacgtaagccaccatgctcaactaggttttgtgttttttatagagacagcatcttgttttgttgccgaggctggtcctgaacacgtggtctcaagatattcgcccagtcagcctcccagagtgctgggactctaggcgtgagcccctgcttctggcccccaggccagtagtaaaaagccaaatatcatccctttcagagcatcaggacagcggttgtgctcagggaggctgggaatgggcatcgtgccctctgggggtgcggcagggtcagttggctggaggatattcatggtgctgctgccccctgctgccgtgctgagggctgacatggtgaacagtcatgggcacttgcagacgtggttgtgcccagtgctgtgtgcatgcagccgttccagcaaaggtggtggtcacttggaccattgtggtgccatcatggtacagcacccaggcaggagcaaggccgttgtgttctggtgagatgatggttctgaattagatgtggagatttctttgagatcagctccacaggtatcttacgagggctcgggggtgaggctcagaagtcctacaaggaggggcctcaacctgtgtcccttcacctgcagcaacagcaacgcggagcaacctccaggagcctggggggcgcctgggctgggcgggagtcggaggtcggcgaggggaggaaggtggtcgcatgttggcgtcctcctgccctgtaggaagtactgaatggttccccacaacagtaggatgaaaatgagtttctgttccctgatcccacgccactgcagaatgggaggaaggctttatgccggggtgtccaatcttttctcttccctgggccacactgcaagaagaggaattgggccacacattaaaaatctcataatttttttttgttttatgagacggaatcttgctctgttgcccaggctggagtgcagtggcgcgatctcagctcaccacacacaacctctgcctcccgggatcaagcgattctcttgcttcagcctctcgagtagctgggattacaggtgcgcactactgcgcccagctagtttttgtattttgccatgttggccaggctggtcttgaactcctgacctcaggtgatccgcccacctcggcctctcaaagtgttgggattataggcatgagccaccgcgcccggcccataatgttttaagaaagtttacgaatgtgtgttgggcctcatgcaaagccatcctgggctgcatgcagcccgcgggctgtgggttggacaagcttgctttgtgccattaaattgttatttgtaattagtgctggaaagtcagggtttgagaggcagacactgctgtctctgaatggaaaggtccacgtgtgggaatgaggaagccttgctcatgagcaccctgacagagcacccatgcctccagcagtgggagggcaggcgtgacgctgccgattccacattgtatctggaatgtttgttttggagatggagtttcgctcttgttgcccaggctggagtgcagtggtgcgatctcagctcactgcaacctgtgcctcccaggttcaagcgattcttctgcctcagcctcccgagtagctggggttacaggcgcttgccaccacgcctggctaatttttgtatttttagtagacgcggtatttcaccatgttggccaggctggtgttgaacccctgacctccggtgatccacctgtctcggccttccaaagtgctgggattacaggcatgagcctcggtgcctggccttttatctggaatttaaaaaaaaaaaaaatcaaatgtagcccagctgaagctattaaggggattgttgccagctttaaccatgggaaatctgcattcgtgtgtatgtaatgagctctgcagagattcaacaaggcagaaaagcagatgcccttggctgtcaagggcacagtgtccagtggaagccagccgagtggctgcagggtcttggactcactgccctggccccggcttgttgttggccatgctgccctgagcgcaaaccccattcctctagcctgtccccgtttctagtagctcgctctcaggctttctccagtctccctaacttccttttaaagtgttaaatatagtacagcacagaagggtatgaaagggagaagaatacgtaagttggacagtaacaatgtccttgactcctaggaagctcagaaataggtctgtgctgtgcctggatggtgcctccgtgcctggggatctggaagggtggagacagaccccagagcagccgcttccctgcgggggcctctcccaacaccgtaaggccgcgggtgcctcaagcagcgccgagaggggcttgtgtttcagtgacatttccttgaagtccaggtatggggtttctgtaaatgaaggcttttgcctgccttgttctccagtgtcagcctaacactcacgtgagccaaataggcccggccagacccaagacagctcagtcacctgttccgcatcaaacatcagattccagagccggactggaccaacgtcctgccgtggcccagtgagcgagggttgctggcgtctttgggatactcgggagcagcccgccatccccgtgtccccagggaactcttcagagcaccccccagcagcgtggaagcccccggaaatgcaggcttggagtcccccgagggagccaggggtgttgtggtgggaggggcggccaggtgcccgggacggggtgaggcggcgccggcggggcagcctgggaaaagcacagaggtggctttgcagtcccacttcagggggaccctgcctgacctgggatgaggtgtgtgggctttctggggcaggggcggggacaggttgtaaatctgaatttgtctgatgcttcctcagagatctgtatcatggtcatttcatagaaacggcaaactctgtcccagctcaaaaagatgctattagactaatcctttgatctctttacgtgtgcggctcagctttcagataaacctgcttgatgttttgagggttttctcttatttccgttgcttcctcgagggagagtaatccagtctaatttgcatttctcttacttttaagctgagctgctgcgccctcacgggacacagtcatggggagccctctgccccatggtgggcattggtgaagccacagtggtcccgggggcagacctcaagggtgcacagcagcagccccttgggccctgcctgcccaagccccacctggccccacctgccctgtgttggggactttgtatttcagcctccatgcagggtgacgctgggactccccagcttccggttcacggcttcagggtccagcaggttctcctgaagccccatctaccgctggcttcctgctcactctcccctctcccgctctgtctctccagaggaggccgggcctgtggaattaggcggctgcttcacctgaactcactgcagtgccgggaaaggagcctctggaactagacccaggagcggatctgcaaaggctactcagggttctcccagcggctctgaaccccgaggccaactcgccctccaatcacctggcccctgaagcaggcggaggcccctgtgcacagtgggcctgtggccccatttggttcaggagtgatggtgacacggagttggctccatcgaggctcctggcagcattacatcctctaagaataagtcataaagaaagcactccttgtaagatacacgatccaccaggctgcctccaaccacagcctcatctccatccggggtgtgtctaggttttcttttttattattattttttatcatttgagacatgttctccctctgtcacccaggctggagtgcactggtgtgacctcagctcactgcaacctccacctcccaggctcaagcaatcctcccacctcagcctctctggtagctaagaggtgcatgccaccatgcccagctaattttttttttttttttttttgtagagacagggttttgccatgtcacctaggctggccttaaactcttgggctcaagcgatgctcccgcctcggcctcccaaagtgctgggattacaggtgtagccaccatgcctggccagtatctaggttttcaagttagacttagttttatttgcagaaagaataatgaatacattattaacttattctttgatagttagaaattaataggcattttatatgtgatcttatggtcttactcttggttggctgtttctgaaggagtggctttgttatctgtaatttgtctaatttaaaaatcaattataatgaaaccagcatatgtgattcacaaggcttttttccacctggaccagagtacaccagctattgcattgccaaaagtaggtgtgttcctgttgtgtgatgtgcagatggggggcccctgcagcagggaaggcaggccaggaaaccccttcgcagtctctgctgaggggctggacccgctgcttgggcgggactccccgcagggtgctctgctgcagtctcctcctctgcccgcctgcggcccagagaactctgaatgctaatggcaatgccagctgcttggcagcatgagcttcttggggcgcctgggcaggcctgggcacttctgccctttgtgccatccgcagtcctgtgatttcctgacagtttcctgaaagcgcagaatgggacttgtcgatgtccttggctgcggaaacgcggtgtcttgtcctaaccttctgcaacgcacacacacctcttccgcagtaatgaatggttttttgtttttgtttttgagacagagtctagctctgtcacccaggctggagtgcagtggcgcgttctcggctcactgcaagctccacctcctgggttcatgccattctcctgccttagcctcgcgagtagccgggagtacaggcacccgccaacacgcctggctaatttttttgtatttttagtagagacagggtttcaccgtgttagccaggatggtctcgatctcctgacctcgtgatccgcctgcctcagcctcccaaagtgctgggattacaggcgtgagccaccgtgcccggctaatgaatggttattttaaaaaataaacgtatttcgggataattttaggtttacagaaaagttgcaaagtgagcgcagagggtcccttctgccactccgcagcctcccctctgtaacttcaaagcccacagggcatggctgttgtagctgagaaaccgtcgctgggtgtccctgtgaactccggactttgaatttcactatcaatgtcctgtttctgctctaggaccttgtccccgctgccacctgtgggagacagcctcccgtgcaccatttgcccagcaccctcaggcctgtgacggtctctcagtctttccttgtcttccatgccctgcagttctgagagggcctggccaggcagtttgtccaggtgccccgatccaggcttgtcttgtgctttctcgtgggggtggacgacaggtttcagggaggggtgctgccgcctgtctcaccccactgtggcgtccctgacatccaagtgacattacagacagctctgaccttcctcaccagagtcaggtgtctgtaggtgtctccttggtgacaggactgcttctccctttgcacatttagtcaggcagcaagtccacggccgtgggggggcttctcctagacgggaggatctggaatagcttggacttgtatttatttatttgatcatttgtttgtatccggatgggctcattttatatgtgttttaaactctgagctagaaggcaacactactttcttgtgaagcacaccatctgtccttggccctagggagctcctgccgtcggctcctgggtcccctgatgcacccctttcaacagacttttcattttggggtacgtcctgacttcctggcactgcagggtgctccagcctcctcttgcattccctgccctggcccgggaatcagccccttctccaaggagccccgggtccttttattggcaagtcttaagagagtgaggcctgggtgccaggcagggagccccaggtccttttattgggaagtcttagagagtgaggcctgggtgccaggtgggtgccaggtgggtccggtgctgctgggatgttgtcacgtggaggccctcagctgcagagcagggacgagggtgtcacctgttcagctgcagagcagggatgagggtgtcacctgtgtgtatgaacatctccgcagccacttctgtatctgtgaagagaacatgagttcatgctactgcctctgactctaattcagaccccaaagctccttctaaccttcctagaacgttatttttcagtttaaaaaaaaaaaaaagttttgcaaagggcataccgcgaaaggcccaagtggttgaaagtcccagctgaggctgaagaggcgcctgcgaggcaacaggacaggcttcccgttcagttcaggggtgctgtcctccaggaactatgctggggggcaagtacaggacgtcctggtgtgtggtgcacagggactgctggacacggagacccgtgcccttctcagcgtgggggccgctccccgggacagtgaccacgctcccgccagcctcccaccccacctgacctctgtctgtgaggggctggaccagggtcctgcctggcccggccatccacagagcaacccagaatgttaataaagcctgcagaagctgtgttctccttcgagaagcttctctgtggttacagactttttaagaaatattttgtcggctgggcttggtggctcatgcctgtaatcccagcattttgggaggccaaggcaggcggatcacctgaggtcaggagtttccgagaccagcctggccaacagggcaaaaccccgtctctactaaaaatacaaaaattagccaggcatggtggcaagcgcctataatcccagctacttgagaggctaaggtggaagcattgctcgaatctggaaggtggtggttgcaatgagctgagatcgtgccactgcactccaggctgggcgacagagcgagactccatctcaaaaaaaaaaaaaaagtttgtcatttaaagtagaggcacaggccaggcgcggtggctcatgcctgtaatcccagcactttggggggccgactcaggtggatcatttgaggtcaggagctcgagaccagcctgaccaatatggtgaaaccccatctgtactaaaaatacaaaaaaattagccaggcgtggtggtccgtgcctgtagtcccagctgtggggaggctgaggcacaagaatcacttaaacccaggaggtggaggttgcagtgagccgagattgcgccactacactccagcctgggcgacagagtgagactccatctcaaaaaaataataataataataaataaataaagtagaggcagggggcaacctaaattagcaccaaaattcctcctaatgctcctgttttctgaagtgagtgactgaatgtcggagctctgaatgtcttacaactggaaaaatgttaaagatcacgtttgcgaaggagggaggcaagcatcagaacagaacctcggagcaggtctgcacgcgtgcaggggccgtggggccgcgctggagtcgtttcctgtgctgctctgtgctgctcacagacgctgccactcacccactggccacggcccctcccgcagctgcggatgatctgggcgcatagcgggcgtgcaggtcgcggcgccaaggcctctcctaggcccagtggtcttctccgtctcagagagcattgacggcggagctcacaactgtcaagcaccttagtcatgccgcaaacattaatcattgacagcatgttgacctatgcgctgattaaaaagaaaagctccaataatgtaattccaggagaaagtacacaaacctctggtggcatcttttcaatccaccacagaaaccagctcaggtggggccgtgggggtgttggctggggcaccgccgcagcagtttgggacacatgcctgccacggtgcgcccaggctgatgcccacagccctgctcaggagtgttgggagcggtggactcctgagtttgattttctgtgctggcctggctggagtgaagctccttggagtttggagaaagatttccatgctgatttccctttgtttttgtttgtttgtttgtttgtttgttttggagacagtcttgctctgtcgcccaggctggagtgcaatggtacaatctcggggtttcaccgtgttagccaggatggtctcgatctcctaacttcgtgatccgcccacctcagcctcctaaagtgctgggattacaggcatgagccactgcatccggccctgatttccctttttttttgagatgggagtctcgctctgtcacccaggctggagtgcagtagtgcaatctcggttcactgcaacctccgcctcctgggtgcaagctattctcccacctcagcctcccaggtagctgggattacaggtggccaccaccacacccagctaatttttgtatttttagtagagactgggtttcgcaacgttgcctgtgctgaactcctgacctcaggtgatccacccgcctcggctgcccaaagtcctgggattacaggtatgagccgctgctcccggcccatactggtcttccagtgaatgaatgtagggggcaaactgcactgaggccaggaaagagctgattctggaggtgacaagaacgttctgagcagcactggggcagaggcgcagtcaagagtccaatgggagctgggcgcagtggctcacgcctgtaatcccagcactttgggaggccgaggcaggtggatcacgaggtcagaggttcaagaccagcctgaccaacatggtgaaaccctgtctctactaaaaatacacaaattagctgggcgtggtgtcaggcacctatcatcccagactcaggaggctgagacaggagaattgcttgaacccaggaggcggaagttgcagtgagctgagatcgcaccacggcactccagcctgggcgacagagtgagactccatctcaaaaaaaaaaaaaaaaaaaaagggggtccaatggggggaacttggggcctcctgcctgcacctgcctctgtccccggtgtctcaggggctctccacggccacgtcactgactggcctgttgtgtccttcttgcagcagtcctgcgttaactgcggccgggaggctatgagcgagtgcaccggctgccacaaggtcaactactgctccaccttctgccaacgcaaggtaggtctcacctacaccaggctcagtgcccccgcctcctccctcgctacgaagacccctgggtggccctccctccccttgtgctcctggtgccacacctgactcccctccctgtccctccctctgggaatccggggctcctgcctggctccgtgaagaccctgcagaaggctcacatgtgacatggccaggtagtgctctcatgtgaggccccacagttggtggccggaaaccctgagggctgctggtcagtgcttcccagccctccacacccctgcacagccacgcaagagagactgtccacagttccattattgagccctccacacccctgcagagccacgtgagagagactgtccacagttcctctattattcagccctccacacccctgcagagccacgcaagagagactgtccacagttcctctattattgagccctccacacccctgcagagccacgcgagagagactgtccacagttcttctattattgagccctccacacccctgcagagccacgcgagagagactgtccacagttcctctattattgagccctccacacccctgcagagccacgcgagagagagcgtccacagttcctctattattgagccctccacacccctgcagagccacgcgagagagagactgtccacagttcctctattattgagccctccacacccctgcagagccacgcgagagacagcgtccacagttcctctattattcagccctccgctccacagaaattcaagagaaattttgtaggctacaaacggtagttcaggattgtataactttgtctaccataatcagagtactcgggagcatttagtcactctttttttttttttttttttttttttttgagacagagtctcattctgtcacccaggctggagtgcagtggtgcgatcttggctcgctgcaacctctgcctcccgggttcaagcgattctcctgcctcagcctcccgagtagctgggattacaggcatgcgccaccatacctggctaatttttgtatttttagtagagacggggtctcaccacgttgggcaagctggtctcgaactcctgacctcaggtgatccacccaccttggcctcccaaagtgctgggatttagaggtgtgagctactgttcccagcagctttactaatctttttgatggtttttttttctcatatttatgagagatgctggtctatattttgtcctgtgatgtctttgtttcatgttggtgtcagagcaacactggcctttcagatcaattgggaagtgtgcccttctgccctccttctctattttctttttgagacagttttgctctgtagcccaggctggagtgcagtggcaagatctcggctcactgcaacctctgcctcccgggttcaagtgattctcctacctcagcctcccgagtagctgggattacaggcatgcacctccacccccggctaatttttatgtttttagtagagacagggtttcaccatgttgcccaggctggtctcaaacttctggcctcaagtgatctgcctgcctcggcctcccaaattgctgggattgcaagtgtgagccacggcacccagcctgtgtttcatctttattcagttcgaatattttatgcagttgaaaatatttgccgtgtgatttttttctgtgacctatgagttatttggaagtgtgtgctggattcaggagtagatctaaaaaagaagtatgctaatttcaaatatttctggatttcttaaatgtacctttataattaatttctactttaattacattgtggttcaagaacatacttagtgtttttcagtacctttaaatttattgagatttgtgttagggcctagcgtatggtcttatcatggagagtgttgcttgtatattctgctctgttgggtggagtattagatatcagttaggttggttgatagtattgttcaactctttcatattctcactgattttctctatttgttctaccccttatttagagtgaagtgttgaactctccagctattactgttgaattatctggtttttgtttttgtttttgagacggagtctcgctctgtcgcccaggctggagtgtagtggcgccatctcagctcaccgcaagctccgcctcccaggttcacgccattctcctgcctcagcctcccgagtagctgggaccacaggcacccgccaccacgcccggctgattttttgtatttttagtagagacagggtttcactgtgttagccaggatggtctcgatctcctgaccttgtgatctgccctcctcagtctcctttcaaagtgctgggattacaggcgtgagccaccgtgcccagctgaattatctgtttttatctgccattatgcctgtttttgcttcatttattttgggtctctgttgttaggtgcatgtatgtttagtttataattatcattcctgatgaattagctcttttatcattataaaacatccttctttgtctcaataagttttttattttttatttaattttttttttttttttcttacagagatggagtcttactatgttgaccagcctggtctccatctcctggcttcgggcgatcctcccatgtcagcctcccaaagtgctaggattataggcatgaggcactacaccagccaacagaagtttttatattaaaatttactttttctagctgggcacagtggctcacgcctgtcatcccagcactttgggaggctgaggcaggtggatcaccggtcgggagtttgagaccagcttggctaacatggtaagaccccatctctactaaaaacacaaaaattagccaggcgtggtggcgcgtgcctgtaatcccagctactagcggggctgaggcaggaggattgcttgaacctgggaggcggaggttgcagtaagccaagatcactccactgcactctagtctgggcaacagagcgagactccatctcaaaaaaaaaaaattaccttttctgatagtagcatagacactccacctgtcttatggtgaatgtttgcatcttttacttttgagacagagtctcactctgtcacccagactggagcgcagtggcatgatcttgactcacggcagcctctacagatacacgccccacgcccagctaattctttgtatttttagttgagacggggtttcgccattttgcccaggctggtctcgaccccttggactcaagtgttccacccccgcttggcctcccaaagtgctgggatgacaggcatgagtcactgcgcccagcctgcatctttttaaaaaaaacctttttggctgggtgcagtggcccacaccagtcatcccaacactttgggaggccaagaggggaggatctcttgagcccagggccagcctggccaacaaagcgagaccctgtttctattttttaattaaataaacatataaataaacaaacatcttgttacttctaattttgtgtccttggctcttaagcattcccttagagacagaatgtggttggatcttaggttttaatctagtctgatagtctctgccttttttttttttttttttttttttttgagacggactgtcactctgtcccccaggctggaatgcagtggctccatctccactcactgcaacctccatctcctgggttcaagtgattctcatagctcagcctcccaagtagctgggattacaggctcctgccaccacactcagctaatttttgtatttttaatagagacgggtttcaccatgttggccaggctggtctcaaactcctgacctcaagagattcacccgcctcagcctcccaaagtggtgggattacaggtgtgaaccaccacactagtctctgccttttgattggagtgtttaatctacttttttgttttgtttttgtttttgtttttgtttttgttttttagacaatctcactctgtcgccaggctggagtgcaatggcacgatctcagcccactgcaacctcaacgtcccgggttcaagtgatttcccttcctcagcctcctgagtagctgggattataggcatgagccaccacgtccaactaatttttgtgtttttagtagagatggggtttctccgtgttggcaaggctggtctcgaactcctgacctcaggtgatccactcgcctcagcctcccaaagttctaagattacaggtgtgagccaccgcactggaactcggcctgttttgttttttgaattgagacagagtatcactttgttgcccaggctggagtgcactggcgtaatctcggctcactgcagcctccacctcctgggtttaagggattctcgtgcctcattctcccgagtaactgggactgcaggagtgtgccatcagacccggctaatttttgtacttttagtagacacagggtttcaccatgttggtcaggctggtcttgagctcctgacctcaagtgatccgcccgcctcggcctcccaaactgctgggattataggtgtgagccaccacacccagctgttttgtttttttttttaagtggggtctctctctgtcacccaggccagagtgcagtggcacaatctcagctcagtgcaacctccgcttcccgggttcaagcaatactcctccttcagcctcccaagtaactgggattacaggcacccgccaccatgcccgtttttgttgttgttgttgtgtgtgtgtgtgatggagtctcgcacggttgcccaggctagagtgcagtggcgcaatctcggctcactgcagcctctgcctcccgggttcaagcgattctcctgcctcagcctcccaagtagttgggattacaggcatgcaccaccatgccaggctaatttttgtatttttcgtagagagagggttttgccatgttggccaggctggtcttgaactcctgggctcaagtaaccctcccaccttggcctcccaaagtgctgggattataggcatgagccactgcgcaaaacctaatctcatgtttaatgtaattatcaatgtgagtggatttgtgtttatatttgcagtttatgtttcatgttttgctcctctgttctttcactgccttcttttctgttaaatgtgtattttctagttgtgttttctagtgtaccacttcaattcttttgttgaacatttttaaacagtatctttaaagttgttattttcttactgctataggtattacaatatacattttaatttatctcagtttcagtaggaggatagaatttcctcaagcagggaaagtgtactgcagaggctgagtgtatacattcctggcaaacactatttgggccccaatataagcacttactgagctcctttcacctacagaacgaacacatcccgttcttttaaaagctgccttccagccggacctccagcccaggacaccctgtcctcaagcctccctcagatcctgttctttaaaaagctgccttcagctgggcacggtggctcacgcctgtaatcccagcactttgggaggccgaggcgggcggatcacgaggtcaggagatcgagaccatcctggctaacatggtgaaaccccgtctctactaaaaatacaaaaaaattagcttggcgtggtggtgggcgcctgtagtcccaggtactcgggaggctgaggcaggagaatggcatgaacccgggaggcggagcttgcagtgagccgagatcgtgccacagcactccagcctgggagacaaagggagactccgtctcaaaaaaaaaaaaaaaaggcagtgataattttaaaaattaattgtagaggacttggtatgtacacaaaagtatacacgagtttatgcatgttatgaagccccaacaggaatcccctgctcccagcaccgcctgggtcaagtccacccacctgctcccagcaccgcctgggtcaagtccacccacctgctcccagcaccgcctgggtcaagtccacccacctgctcccagcaccgcctgggtcaagtccacccacctgctcccagcaccgcctgggtcaagtccacccacctgctcccagcaccgcctgggtcaagtccacccacctgctcccagcaccgcctgggtcaagtccacccacctgctcccagcaccgcctgggtcaagtccacccacctgctcccagcactgcctggattgagtcacctacgtgctgtggtggcaacacttttcttttaatccttaactttggaaaatgtgagacgtgcacatgagttggatcgcccaggagaggcccgtcgccctcacctgtatcagctgctttagcgcctgccctcctggcttgtccccctctctctttgggctgagggctgagcattttaaagcaagccccacgcatcattattttcatttgtgaggcctggatcactgtaagtcagatttggattgtgttttaattggatttttagtcactgtttttatttcattacttatttttggtttttatttgttcgtttgtttttggttttgtttctgtttttgagacagggtctggctctgtcacccaggctggagtgcagcggcgcgatcttggctcactgcaacctccacttcccaggttcaagcgattctcctgcctcagcctccctagtagctggggattacaggcacccgccaccacgtccggctaatttttgtatttttagcagagacggggtttcaccatgttgttcaggctggtcttgaactcctgacctcatgatctgcctgccttggcctcccaaagtgctgagattactggcatgagccaccgtacccagcctattttaggttttctatagacagggtctcgctttgtcacccaggctgcagtccagtggtgccatcacggctcactacagccttgatctcctggctcaagtgatcctcctgcctctgtctcccaagtagcttggaccacaggcatgagccaccacacccagctaattttaaaacatttttttttttttatagagatagggttttgctatgttgctcaggctggtctccaacccctgacctcaagtgacctcaacctcccgaagtcattgtttttacagtctgtgatgttggcttttctcatttatttgtatcaggcactttcattgttagcttcttgtgaatttaaccatttttttccgtttttcaaaaactgaaacgctaacttctaattctggcttttcagataatgatttttttttcaaaagtgttttagcattatactgtaagaagcatcacattgatgtttaagatggaaaaatttgctttaaaaaagaactgagtagttctgattttaaaagtcaaccctgggcctttgcctctttgctggaagaacctgatggaagcttctgtagctcagagtcaacactgatgtgcgccctctctccctccatctgcacaggccccagggagtggctcaaacctgtagaccagagaaggaagcatctagaactcctgggggccttgtccgccgcccacatcctctcacggggggcagctcccatgaggggtgcaggcccctcaccccacacagagtctcggcaggaaccggaacccttcctggttgccccagagtggaggcccgggaggggcgggcggtgggtctgcacccgatgctgcagtttgctgatgtatgtgctttcatgctatgtagatttatagtctattaccaggtaattttaattttttttttttttttttttttgagacgtagtctcactctgtcgcccgggctggagtgccgtggcacaatcttggcttactgcaacctctgcctcccaggttcaagtgattcttgtgcctcagcctcccaagtagctgagattgcaggtgcgcatgaccacaggcggctagtttttgtatttttagtagagatggggttttgccatgttgggcaggctggtctcgagctcctggcctcaggtgatctgcccacctcggcctcccaacatgatgggattacagccgtgaaccactgcgcccggcctaattttgctcttttattataatcagctggaattctgctctctagggaataactctgtcaccatttggaagcatttatttctgctctgtgtgtcatatacgtacctatcacgcccccgtgcacggagctgcctctgtctgacgaggccgtctcagcttcagcacctggcgcttcctctagagctctgctccattccgaggtgctcgacgtagcagggaggcagagcctggttctgtgtgctgacctcacaggagctgtggcttctcccaggcaccatcccccacctcctttctctgcagccacgggctggttccagtttgctttttcatctttgccattaaaaacagaactggggcggggcgcagtggctcacacctgtcatcccagcactttgggaggccgaggcgggcagatcccctgaggtcaggagttcgagaccagcctgaccaacatggtgaaaccctgtctctactaaaaatgcaaaacattagccaggtgtggtggcgtgcacctgtaatcccagctgctagggaggctgaggcaagagaattgcttgaacccaggaggcagaggtcgtggtgagccgagattgcgcgttacactccagcctgggaaacaagagcgaaactctgtccgaaaaacaacaaaaaaacccccacagaacttgatcgtaatttacatatgtaatatttacatatttaaatgtttttctgcatgtgtgatattttttgtttacatccctaacacaaaacaactggtttggagagtcttaccctggtttgttgtttgactttttttttttttttttttgatatggagttgttctgtcacccgggctggagtgcagtggcaccatctcggctccctgcaacctctgcctcccagggctgagcagttctcctgcctcagcttcccgagtagctgggattagaggtgcctgccaccatgcccagctaatttttgtatttttagtagatacggggtttcaccatgttggccaggctggtctcgaactcctgacctcaggggatccaccctcctgggcctcccaaagtgttgggattacaggcgtgagccaccgtgccctgcctgttgtttgccttttgatccaattcctcaaaccaagagagtgtggggaaggctgtattggagcagagcccaccagagtttgggcgcacgggggctggggagggcattctcagcacctccaggtgaggttacagagggctgcaccctctggggtctgccttggggaccctgcccagaccctgctccacccactgaccctgctgacatgggtgtgtcctcccttccaggactggaaggatcaccagcacatatgcggccagtcagcagctgtcaccgtccaggcagacgaagtccacgtggctgaaagcgtgatggagaaggtgaccgtgtgaggctccatcggccgccctgggagctggggcccctcgcactcctgtgaggcttttgcaggtcgaaggcccccctgaggactctggggggacgttgagaagaggggtgtgggaaggtaaagaaacttgctggacaagtcattaacacactttaagcgaatggtgccctgggaagcgcactccccctgcccgggccccctgcccgctcgcggacagattttttatccctgggatcatgagcgtccggtcttgcccacagggcctgtgctgcgacgcacatacatacgtgttgtgtctgtcaataaagtgtaaataaggtc

SEQ ID NO: 1168 - DNA, 35461 bp, Homo sapiens
cgcggccccgcgcgccggatcggcgtgcgtgcggctggagccttaagcgtttcccccgcccggcttcatccctgctggcggcccagcgtcgttctcctcctgcgcgaggcggccaaggcctgctggcccggagccgcgcctccacccgcgcgaggtagggcttcgaggaccggcgcggcgcaggtctccggaggcctcccgagaggggctagggtcgccgggccgcgcgtgggagcgggtggggcccgggaggagacggcgccccggaggggagtgcgaggcctgggccgacggttacgggcgccgaccggcgttgcctggcctgaacgcccggcctttcggtggagggcagcttgcccctgtatgttgcgcccttccgtgggtcagaccggcggcaaggtgaggcggcggcggcagcagcagccgccttgggctcctggacgcgctcccgaggtggggcgggttggggagtggggattggagcgtgatggctggacgtcgccttctcggcgcggcaggtcccgggagacggggggacgaggcgcagtcccgccctcgggagagcggagccaccttcactgagggcgcccggtttggccccggaaaggcaggaagggggcggggaagggatggcgagctcggggtgcaccgcctgtttcttttctggttaggtatcgtccttggagaagatggaagcggagaggcggccggcgccgggctcgccctccgagggcctgtttgcggacgggcacctgatcttgtggacgctgtgctcggtcctgctgccggtgttcatcaccttctggtgtagcctccagcggtcgcgccggcagctgcaccgcagggacatcttccgcaagagcaagcacgggtggcgcgacacggacctgttcagccagcccacctactgctgcgtgtgcgcgcagcacattctgcagggcgccttctgcgactgctgcgggctccgcgtggacgagggctgcctcaggaaggccgacaagcgcttccagtgcaaggagattatgctcaagaatgacaccaaggtcctggacgccatgccccaccactggatccggggcaacgtgcccctgtgcagttactgtatggtttgcaagcagcagtgtggctgtcaacccaagctttgcgattacaggtatggtcttcgtggacactcactgtcccagaatgcgccgtgggaatcaggatttcatagagtggtgtagaggcctgctttaatctctgctgatgacctaaactcattttgaggaaacaagctaataaataaacatccctgagtttgtgcaagcgtggcagctttgcagtagtcatttgctgagacgatgcatccagcctccactcctcagccagcctgcccttttgggtaataaaacttggctcctaacgttaatacagaggtttctaagtggtgcctgcttcatggccactgtatattttagcttttgttcctatcgattatctccttattttaaataaggaaaaatgaaatatggacaaattaacttttcccttcagccgcaaaactgatgggtcacaggttttgtactatgaatgtgcagtgaaaacaagtgtcattccaaggcagcacttttatgtcttttgctaatatagctgttggtaccatagcgaaatatactcaaaaagaacactgaaaggaatattccttttgacgcttggtctttcaggacatgtagaatcttagataagtgaccttgattaagccaagaatattttaatgtcttttatatacacactggacaacacatttttgtccttaaatattgtttgaaaataggtgaagatgtcctttgctgatgttggaaattggtaaaggagaatgctgctttgcaaatgatctattctaactcagttcacagttgagaaaattaaagcccgttaggtccactctggtaaaataggactggcctccaggatttccagctctggactaacacttagcctcctttgagccttaagtctggacatcttcattgtaatgggttttatttctgacaagtagaaaggcgcataaacatgcttaagaaatgaaataggcagtaaataggaagctgctttttaatttttttaattttttttgcagaaattctttcattagcatgaacgctattataatgtcaatacctgtttttaagtcttattttaaataattttacacattatcaaagaggcttaagaataaatgttcaaaataatgtattctagacaactacaaagttttgtaaccatgcatttttatttggtatctttaaaaattaaatgctgtccttctggcatcagtgagagccaagttagcagggactttaaataaatttcataatgaattgagtattgttctatttccttcccttctctggtgtagcctccagcagtctgtgtctgtgcagaattatattaaaaatggtttccataaataaccgtatttcaaatactcttgaacacataatcatgcttctgatcctccacccaaatgatctttctaaaaatgcaaatctgatcaagtccctgctctgcttaaaatcctttaaattgctccccatcgggtaagctgactgttttacagtgtaaacccctaagtgctttttcacagggtacataaggtcctagtactttctggcctctgtccttttagttttatctaccaccacctgcattaaactttatgcaccagcaacactaagcttcttgtaatttccttaaaacgtcaggcattttctgacatttctgcccctttgctcaaagctttcctctcagtattcttctggctagcttctaggcacccttaaagacccatcccatgtccttgtcctttccttcaggaactcttacctgatctactcagcttccctcctcccccagtttttcctttttggtgataacgtaatatcctatatctcagtggttctcaaagtaaggtccctagaccagcagcatcagcatctcttcaaaatctgttagaaatgcaaattctagggttgctagatttagcagataaaaataaaatattgcagaatttggaacataaaaagtttctctgaaattcaaattcaactaggcattgccgtttttttgttttttttttctggcaaccctagcccaaccccagacctactaaatcagaaacttgggctggacatcagcagtcttggttttaacaggccctacaggtccttctaaagatggagaaccactgctatatttacatatctttaaaaacatgcacctccgtctcttaattttgtatcctcccattgagcacactgaatctgtgtgataataaatcttcttttcttcattagtgcatttttacagagtaaccccttaccccatgatagaaattgtctctgtgtaatttaggagatgtttattattcccaagagaagagaccacagtgtcctgaagttgtacatattctacagtgttctgaactgatttatgttggccaataattgtatacaggattacagtctcctgtgaccttctgtaggaatgagatattttggaaggagaaacaaaataaatagctacttagaacctttaaacacagaccagacagtcctctggattttatctagccctgaggagagctccttccctgtctgcatctcattcttagggaagtgagtgaactctgcagacaagttacatttcaaaggacactaatgagagatgatgactgagtttaaagcctgcagaataagtgagaaaggccctttaatttatactcattcgatcattatacttattgagcatctatttttgttctagacactgctagagtctactttgtctgtagattttttctttttgtgtgctcctgtttctacccccaaccactacatcttctttttcttcttcttatctctcctctgactaaaatagggaattaggttatatttttacatattcaatatatttattaaatgaacctttgtttcttgtagtgttctatctcattaagagaaaaagaacttaaagtgctttttaatttattggactttttattcattacatctaccccacgcctcacacacaattactgtgattagtaaaacaaagctgctgactctcagaaggcagttagattggcctcagtgtaactagtctcagctttgatcataaattttgtttctatattctattggtgtgtgtttattcatttcattaattatctgaaacagtgaaagataccaaatcatcttctagagcagaggtgggcaaacttactgtaaagagccaaaagaattttcggctttcccaaccatttcgtctgtcataattacttaactctgccatagttgcagtgcaaaaccagccatggacaatacataaatgaatgagcttacctgtgttccagtaaaacttcattcacaaaatcagatggcagacatatttgcagtttgcagaaccctgttctagtgaatcttataaatgaccatctcaactttatgtataattcagctgcctccttcagcacactaaaaaagagagctattgtgaccaggtaattttttagagaaaacaagccttgttaaaccttttttttttctataaatactactgcacaagaacggcatataaattcatgaggcattccatattttcatatgaaggaactttctagagtaatgttctatatcttgataagggttttagttacgtatgttcatttatcaaaactcaggaagtatatacgtacatttcattgtatgtaaattttacatgaaaaggaaaaaacatcatgaattctaggtagtgataagcctatttgctgatgtattcaggaagtattctgatgtcttcagtttacttggaaatgtactaaaaataagatgaattaatggatagaaatgtgacaaagcaattacagtaagatgttaatggtagaatgtaggtggtaggcatacctgtaaaaaatatttttaagtaaaatattttaaaaagcaagtaaactattcttgcttttagaatatatttgctaaaatattgaagggtgagatctcatactgtctgcagtttactttcaaatgatcaaaaaaatatgaatttatatggaaagagaatattgtgggagaaaatgtcattaagaatcagcgtgaagggtgggcttagggtattcattttgctatccttttgacttctctgaaagtttggaatttttcaaaataaaaagaaaaaagatgataagctgttacccaatgacatgatgctaaagctgaaataccaagacattttagtaatgtcttatcttcccagtgagtttgaaatctaggttgttaaataccaattacaacataggtaaagacaataggattcaggtttgaatatggtatttctaaagaagaatgtaatactgagtaattagtaagcattttattttattttgttttttgagacagggtcttactctatattgcctaggctggaagacggtggcaagattatggcttactgcagccttagcctcccaggttcaagcaatcctcccacctcagccttccaagtagctgggactacagacatgcaccaccatgcctgatattttttttttcttttttgtagagataggagtatcaccatattgcccaggctggtctcaaattcctgggctcaagcaatcctcgcatcttggcctcccaaagtgctgggattgcaggcgtaagccaccatgcctggccctagtaagcattttagctgtacctttatagagcaaaggctcataatagctattatcttggttaaaataatcttttctgggctgagcgcagtggctcatgcctgtaatcccagcactttgggaggccaaggcgggcagagttcgagaccagcctgaccaatatggagaaaccccatctctactaaaagtacaaaattagccgagtgtggtggcgcatgcctgtaatcccagctactcgggaggctgaggcaggagaattgcttgaacccaggaggcggaggttgctgtgagccgagatcgcgccattgcactccagtctgggcaacaagagcgaaactccatctcaaaaaataatagtaataataataatcttttctgaaatttatgagaatttaataaatgataagtgttctgtcacaaattattgggggtagaaaagatggttttatgaatcgtgttaggacaagtgctcttgggggaggggagaaggttaactcttcataatacgccagatttattatgggtagattaatgcagtagtttgttttgttgttgttgttgttgttgttgttttttgagacagtctcactctgtcgctcaggttgcagtgcagtgacatgatctcggctcactgctacctctacctcccaggctcaagtgattcacccgcctcagcctcccgagtagctgggattacaggcatgcaccaccacacctggccaattattttttatattttcaggagagacagggtttcaccatgttactcaggctggtctcaaacttctgacctcaggtgatccgcccgcctggcctcccaaatcctgggattatacgcatgccccactgcgtccagccaatacagaggatggaaaagcccgacacttccatgagattctgaatggaatctatagccccagaaggttaagaagcactgaattaaagatgtaactatgacaactgaactgggaggggggggaataactataggtgaatatctaggagatggtaaaagacttcaaagcataacagcatttaattaggtgcctgtagcctagctactcaggagactgaggcaggatcacttgagcccaggagttcaggccagtgtgagcaacatagtgagacactgtctcttaaaaaaaaatttttggccagactcggtggctcacacctgtaatcccagcactttgggaggccgaggcagactgatgaggtcgggagtttttgagaccagcctgaccgatatggtgaaaccccgtctctactaaaaatacaaaaattagctgggcgtggtagcatgcacctgtagtcccagctgctcaggaggctgaggcaggagaatcacttgaacccagtatgtggaggttgcagtgagccgagattgcaccactgcactccaagcctaggcgacagagtgatactctgtctcaaaaaaaaaaaaaaattttttttaaatgaaacagcatttaagccaactacaaacggaaatacatatctgtatatatatttttaaaaacttaagtagattaaaaagacaattttaaagaacactgaagcatgtttgcaataaatatgccagaaaaaaggttgatattctagttaaataaaattacatgcaattattaaaacctagtgaaagatgaatatggaacatgactgaattcacaaaagggggctgaaaaactcagttttacctactaatcagacttccagattaaaacaataggatacctttttctatcaaattatcaaagaaaaattaagtactaatgagcggtattaataagtgttagttatgatgggcactttcatgcactcgtaacaagcatattggacaaacatccagaaccttgggaaaatgcatgccctttgattcagtaacttctgagattgcaaagaaataatctcattcatttacccatgttatttatattttcaaaaataaactaaatgtcttttttaaaaaacagaaaaggggtcaggttttttttgttttgttttgttttgttttttgagatgaaatctcactctgatgcccaggctggagtgcagcagcaccctttcccgggttcaagtgatcctcccacctcagcctcactagagctgggactacaggcacacgttaccacgccaagctaatttttgttcatttttcttgttttttgggacagggtcagataaattatacgatattgacatgatgtaataatatacattctttacaaaccatgttttaaaaaaattgatatacaaaaaagtttatgatacaatgtagaaaagcattatccagatatatatacatcatacttctaagctgaaaaacaaacgtatacactataaaactgagaataaataagtcaaaaagttaagagtgactctctggatgatttttattttatgcctttttgtatttttaaatttttataagctagtatttaaaataatttttaaaatttatacaagtagttcatgtttatattctggtttttaggatctcaaggaatacatacaaaaaaaacatagcctaaaaacttaatattcttcccattcctcagtcctacttttcttcccagaggaaaccattatgaaataattcagtgggtatcctttctgattgcttttgatggtgatatactattttaaagttatggtagaccaataaataaagatattatacttcagccacataaccagtctattatagtttctcaagttgagtttaaaattaacaaatgtgattatgcaaattatttcagttttctctgtaacagattatgcagagaactcttgcttttagcagtaaataggactcgagtatacagcactaagtacttgacaaatctgaatatccaaaaggaaaaaacagcttaaaatagaaggtcaccagaggacctctgggtgaaagaatgtttatcctcttttcttttttatattcatttaattataaccattcttttctggtggcctgctttatctcttcagtcagatctgccttatctgtgagtggattaaatacttagcaaattaataatagaaacccaggacctttaccagctctgttctctgcttgttttaccaattgggtccaaacatagttgcaaatctgaatgcacatgttcttacgtctatttcaaaagcaagcatatgaattattttcgtattaactgacaaaaagaaatgcacggttgtacttacatttacaggttaagagattttcaagctggaccctcaggaactcttcaagggtccatgtcagtggggcatttaaacagcaaggactttaggcctcatgaacctacatttcagccaaagcacaaatatatataaaactatcattttagatcagcttttgtttatgtggatcatatctattgatatttaccatgtcataaattaaaactgataaattttttaaatatttttaaaataatagttacaaatggtttttatgaaaatttagtgaggagagttacattgttttaaatttttgcacatttctttcacttattattcagctagagtatcatatttgcttctattgtcatagcacatgtcataaagcttctggaaaattccactgtacgcttttgagaggttgagggtgaaataactctttagtgttattattaaaattttaacctcacagatgccctgaatggatcttggggcccacattttaagaaatgctgttaggcggggcacagtggctcactccagcaatcccagcacttatgggaggccgaggtgggtggatcatttgaggtctggaggtcaagaccagcctggtcaacgtagtgaaaccccatctctactaagaatataaaaattacccaggcggtagtagcacgaacttgtaatcccagctacttgggagactaggcagaagaatcacttgatcctgggaggcagaggttgcggtgagctgagatcatgccactgcactccagtctggtggacagagtgagaccctgtctcaaaaaaaaaaaaaaaaagtgctgttagattaaactgccaaatatgttcaaaccttattgctccatttcactgtgcagatagtgcatatattttatttgccaaatgttatggtaagtagtgataaaattatgttttattttttaacaaaaatgattgttttgtgggttatcattgagattatggtttaaaattagttaatgcttgtttcttccttccctcaggtgcatttggtgccagaaaacagtacatgatgagtgcatgaaaaatagtttaaagaatgaaaaatgtgattttggagaattcaaaaacctaatcattccaccaagttatttaacatccattaatcagatgcgtaaagacaaaaaaacagattatgaagtggtaattagagtttatttctctaatatgattgatttttaaaaagctgcttaactcattgtttgagatagttaagacagtatgtaagaagaattggtgccaggaataaaataaacttaaataacagatcaagaccaaggagagaaataaaatgctattatggtaagccataaaatcctacctagttcctagagatgggtcaaaaattttggctcttgagttctttcatgtctaaaaggaaattggaaatgttatattagtggtttccaaatcattgcctgcatctgaatgatttagggagctttttaaaaatacagatttctgagtagtaccttcattgccatatttgatttagtaggtatagggtaagtccaggaattcatctttttttttaaggtcctcagaagattctgatgaacagtcagttttgggattcatgattattgtcagtgaaaagaaaatagattttcctcacacctttttctaaaactatttttctattttgaactttatacagggtccctagagataagtttatgttgcacattaaatgctcccacaaataatggtgaacactaaacctgttaacagtttatagatgtagatatgtgtatgaaattgatgtaacttattgaatctctcagtctttatgtagctcttaaggaaacatcataaaaatttatggatttattttctaattggatataccaaaataattgaactattttattttaaaattgtacctttttcaaattaagattttatgacttacatgccacctttgtcaatattcctgcaagggaagggacattttaaatttttcaaacaatattgttttgacagtttttttaaatgtacaatctcttatttatctgagttcaacctgagatcacaagagagaagaatctctaagtaaaactatagaataacttcattaatggttacatctacaaggagaggggaagaagaaatggttacattttgaaaagtattaatttcatttgactttgagctattagaagtccagattttttaatctgagtaccccattttaaaaaaagaaataaaaccttgcaaaacacaccagaatacatccagtaaaggaaaatcaaggtgaaaggtcagagaaaaaaatcagtgtctattctgtgaatggttgaaagttatagaaagacagattttcaactcagtttaagtccaaactttctaataatttgatgtagcagtgtaatgggctgcattactagtgagttccttatgtgagtgtgcgagcatatgctggatgacttatctagaataatgtagaagagaattaaacattgaatgggagcttaaattagttaatttctgaggttcccttccattcttagaattctttgatttttatattgaattgagagaactagtatagtttttatttcagcaaattatagcaccattgttctcaaggcatggaaaatgtgcttttcatctttaagatactaaaccttttcactcatggcaattttttttagctagcctctaagcttggaaagcagtggaccccattaataatcctggccaactctcgtagtggaactaatatgggagaaggactgttgggagaatttaggatcttgttgaatccagtccaggtaactaaagaaaaaaactttttatattaatgttttcattttccccaaaatgcaatgattattaatgcttcaagtcactaatcacctgatcataggaaagaataataattacaaaaagatcagccatttaaatatgtggataaacaggcactcttgtgggaatataaaatggtacaacctctttagaagacatcttggcagtttcttaaaaagataaatataaatttattatatcttctagcaagtcctctactaggaatctacccaagggaagtgaaaacatatttctcacaaacatttgcatgaaaatgttcacagcagcattattcatgatagctgaaaagcataaacagcccagctgttcatcagctgatgagttgataaacaaaatgtgatgtagccctacaatggaataccatgaaatgacaaaaaggaacaaactactgatacgtatatattacaataaatgaacctcaaaaacatactaagtgaaagaaggcagatacaagggaccttatattgtatgactccacttatgtgacttgtctagaaaaggcaagtctgtagaggtagagaatagattattggttctagggctggaaatggggagtgattgcgaatggacattgagggatcttattgaagcaacaaaaatgttctaaactggatgatggtggtggttgtgcaattcagtgaacttaataaaaattattgacttgttcacttcaaatgggtgaatcttatatgtaaattatacctcagttttaaaaataaaagggatcgttaaaattgaatataattttactttgaaaaattaaccaaaaaacaaaaaaatacaaaaaaattttaaagacaacccattgtgtagcaattagaagtgcaataactttgtccttccaatttgtattttttacactttcaatattatacagtttaagaaaattataaaaaatacagagaaaatcatttgcaatttctccatacaaatacatcagttctcttttttcttgttctttccattaattatctatgcatttactttacatattaacagtactataacaataatctagatacaaatttgcattctgatttttttaattttaatggtataaatatttttccttgtttcaacatagtcctcatagttacatatttaatgactaaaataattgaatggaaatagcattatttatccagtctctactgttgaaaggtaacactgtctctatgattgtactataaataatgccacagtgaatatttttatacatatttttaggcatttttgtctttcgaaatatttttctagggtcgttgacagaattatggataatcaaagttacttgcatttttatgtcattttctatgtattgcaaaattgctttccagaaatttgtgctaagttgcactggtgatttttttttaagccagtataagatatgaaacactaattaaaggtgaacttagcacattgtggtttatgtgaacaagaaggaggcaatgtggtatagtagataaactataacttttttttttttttgagacagagtcttgctttgttgccgaagctggagtgcaggggcatgatcttggctcactgtaacctctgcctcccaggttcaagtgattctcctacctcagcctcccgagtagctaggatcacaagcacacaacaccacactggctaatttttgtatttttagtaaagacaggatttcaccatgttggccaggctggtctcgaactcctgacgtcaagtgatccacccgccttggcctcccaaagtgctgggattataggcatgagttaccacacctagccttgtatttcagcacttaattacctggacaatcacaggcaagtgatttaaccttcctgcacctcagtttccagcccaatagaatgaggctaactcttgctttgtaaagtcagtgtggggatgagctacaatgaatataaagagtctggcagggtgcctggcatattgttaaatacatagtagccagtaatgttatttaactgtatctctactcatctagagggaaatcatcattacagatgaaggaaaatgttggataaaaataatttgtctttttcttttgtttctaggtttttgatgtaactaaaactcctcctatcaaagccctacaactctgtactcttctcccatattattcagctcgagtacttgtttgtggaggggatgggactgtagggtgggtcctggatgcagttgatgacatgaagattaaggtattagtctttaagaactactacagaaggacttctaagataaatatactatacatatatatatatatatgggttttgttgttgttttgttgttgttgttgttttttcttgagatacagtctcgcactgtcacccaggctggagtgcagcggcgcagacacagctaactgcaacctccatttctcaggttcaagccatcctcccacctcagcctacaaagttgctgagactataggtgtgcgctaccatgcctggctaatttttgtattttttgtagagacagggtttcaccatgttgcctgggctgctgtcaaactcctgggctcaagcgatcctcccaccttggcctcccaaagtgctgggattacatgggtgagccactatgcccaacctaatatagaatatttttgctttatattttttattatgcagatgaatattagacattgccagcttcaaatagttaaaaatgagatgttttgattaagcaattagcacaagctttagcaaaacaacatacagttgttatatttgtatccttactgttttggtcttattaaattttacaaaatattattacccagcaaatagtctgagagaaaaatctaaaacatatcttccatattctagggacaagaaaagtacattccacaagttgcagttttgcctctgggaacaggcaacgatctatccaatacattgggttggggtacaggttatgctggagaaattccagttgcgcaggttttgcgaaatgtaatggaagcagatggaattaaactagatcggtaagttacgtttccccaaaaagtagatttcttgagatttagccataattggttaacaagtgaagacttgtgtagatgaaatgtgccatgtaatttaaatgtgaaagactatactagttgtacctacacagatactggtgttttgttttattatgtaagagccgaagtaataagttacactgagtacttatccctaaatttgcatgctcatatacgtgtggttacttttgtagatggtattttaatagaaaaccctcatttatccaaacatccagagtatggggtttattgtaaaacgtgctgttttttttaacttctgttttttagatggaaagttcaagtaacaaataaaggatactacaacttaagaaaacccaaggtatgttgttagtgcctcagttgcaagtggtttcagcttcattgcacaagatacggcactctgtggtgggatacagagacctggtgcttatctcaagggagctggctgtggagcagaacagaagcttatatgcttacctcacaagctggactgtaaatgtgttatgggagagaacagggtgcaggtatgcttagttctgccctagctgagaagattcagaggaagtggtacgggagttggtccttaaaaaagcaaaggactttccaggcagagggaaaagaggtgagagagtgcaaagcatggttagcaagtagcaaataatacagagagagtagatctgtatttttaaaagatactctggagataatgtgaaaatagctcagaagcctgcactaggtagaatcaggatgaggacaatgcaaagacattttagaggtagaattaatcaatacttgacaactgattagtataaaggggagagagaaaatacatattactattagatttctggtttttataactgaatatatggaaatgactataagaaaaataccaagtttcaggtttgggtaggaagaaaatgagatagatattgggcatatcaatctaaaagttttcgtagtgttaaacaagaagttggacgtttaggcttattgctcaggaataaagacagagctagagatgcagattgaggaatctagactgggttaggaagtaaaataaactggggagggggcagggggagtagcccaagttgtgggattcacatccctatttatcagcctttgaactgaagccttatttctgataattgtttaaatgctgagaatgcataagagaatgtggggagtgagaggggaaaagagggccaagaactacatcttttctttttttttttttcttttgttgtggagacaaggtctcagtctatcactcaagctggagtacggtattgtgatgacagctcactgcagcctcgacctctgggcccaagcgatcctcccacctcagcctccgaagtagctgggaccactggcatgtgccaccatgcccagatagtttttgtttttgtttctgttttgtagagagagggtctccctatattgtccaggctggtctcgaactcctaggctcaagcaatcctcccacctcagccttccaaagtgttgggattacaggcatgagtcactgtgcccagccatgaactacatcttgcaaatagatatatttaggtgacacagattaagagaggccactaaaggagactaaagagtgtagtaagtaaataaggagaaaacagagaaagagaattacagtaggtgggtgataaacagcaaaattaaagcagactttaaagaagagcatttggggaacactgatgcatgtttctctgcttctccatctccttgccactgaaatccctctaaaatgtgcctctaaaagatcttgtataggtctttgagaaggcacaaaaccttaaggagaaagagatcacagcagtcttcagaagccaaaactaggaaggttcgcatattgaaaaaagctcaaaagtgcctacactgcagaaaaccaagaaagaaaccagtttattgagcagaaccaagcaaaggcttaggaattctatgcttacctcacaagctagactataaatgtgttatgggagagaacagggtgcaggtgtgcttagttctgccctagctgagaagattcagaggaagtgatacgggagttggtccttaaaaaaagcaaaggactttccaggcagagggaaaagagatgagagagtgcaaagcatggttagcaagtagcaaataatacagagagagtagatctgtatttttaaaagatactctggagataatgtgaaaatagcttagaagcctgcactaggtagaggcttctaccacatcactcagagagcagtagtatagagtcaccacatcactcagagagcagtagtatagagtggttctgaaaatagaaggagtgagcgaaagaagctgtttgtcccctagatcacttcccctttccccaacttcacatggtcatttactaccctcctcaactcaggtagtagattggaggtttactccggaaagtttagagactctagccagctaacgccatactgaaaacagatttagtgcaaagtgagatcactggcccttttcatccactcaacttcaagaatagtggcagagaggatttctctctggggaagctaacttgcccaagataaaaattaacacgtaccaatatttgagtgtcccgtagcaaaaggaccagatttttgcactgtagtcctataatgaagcttataccctagcaagagctgcttttggatgcaaagttcacagtttgccttttatgccttactcttaaaacatgaatatatacagccaaggattggaggcacaaacaaacatttaaggaaagcctctgccatgagagagccccaaagaaacaacaagaaagaattgtaggaaacacagtccaggaagctgaaggaagtcagggagtgggactaatgttctcagagaaaaatgaaaatattaatagaacagggttctataaaaggaacattcagaaacacatacctcaaaaaaggctcttataaactaaaattcggtatcagattggaaagtacaattgaagacaccactcagaaaatacaacaaaaagcaaaggaactggacatgggggcacacacctgtagttccagcaactcaggaggctgaggcaggaagattgcttgagcccaagagttcaaggctgcggtgagctatcatcacgccactgcactccagcctgggtgacagagtgcagataagaccccatctctaaaaaaagagaaaaagaatacagtaagtaacatttaaaatttaaaaatcacaaattggcggggtgcggtggctcacgcctgtaatcccagcactctgggaggctgaggcaggtggatcacctgaggtcaggtgttcgagaccagtctggccaacatggtgaaaccccatctctaataaaaatacaaaaattagccgggtgtggtcgtgggtgcctgtaatcccagctactcgggaggctgaggcaggagaattgcttgaacccgagaggcagagggtgcagtgagccaagatcacgccactgtactctaccctgggcgacagagcaagactctgtctcaaaaaaaaaaaaatcaagaagtaatgatctgattatgttatttagaaatatagagataaataccagaagaaactacggaaagagctctgggagcaggaattataaatgaggaggagtagacagaaaactgcagtgtttcctttgaagccttgtagaactatatagcttattaaagtggattgctttgatttattttaaaaaaaaaattgaacgtaaaaaaatagagaaagtattgagagatcctttaaaatggttcctgtgcttaaaagtatttgtcagttatcatagtgcctgaaatgccaacattaaagatgtatttctctttttgatagtagccaatctaataggtgtgaggtgatatagctcattgtggttttcatttgcaattctctgatgattagaaatgttgagcattttttcatatgcaggttgaatatcccttatccaaaaaaatgggaccagaagtatttcagatttctgatttttttggattttggaatatgtgcagaatatgtaccccttgagcatttctaatctgaaaagctgaaatccaaaatgctcccatgagcatttcctctgagtgtcatgtcagtgttcaaaaagtttgagatttggggacatttcagatttcagatgttcatattagggatgctgaacctgtgtctgttggccatttttatgtcttttgagaaatgtctcttcaagtcctttgcccattttttaataagattattggttgttattgagtaacttcagttccttctacattttggagattagttccttatcgagtgtataatttacagagattttctcccaagctgtgggttgcctcttcactctattgttttcctttgctgtgtagaatctttttagtgtgatgcaatcccttttgtctatttttacttttattgcctatgcttttgagatcatatcaaacaaatatcaaacaaataactgcccaggccaatgtcatgaagctttttccttacattttcctttagtacttttatagtttcaggttgtacatttaagtctttaatccattttgaattgattctttataatgggtgaaataagggttgattttcattgttctgcatgtggatatccagctttcccagtaccatttattgatgagactctcctttccctattgtatgttcttggcacctttgtcagaaatcagttggccatagatatgtgtatttatttggggcttttctatcctatttcattggtgagtaataacaaatgttggcaaggatgtggaaaagagagaatccttatacactattggcattgcaaattagtacaaccattttgggaaacaatatggaggtttctcaaaaaactaaaactagaattaccatatgttccagcaatcccatttatagatatatacccaaaggaattgaaatcagtatatcaaacagatgtccatgctgccatgttcattgcagcattatgtacaatagccaagatgcagaaataacctaagtgcccatcagtgaatgaatggtttttttaagtatgccatatatacacaatggaaaactattcagactttaaaaaaaaaaaaaaacaggaaaatctgtcattctcggcaacatagctgaacctagaggacattatgttaaataaataaaccagtcacagacaaatattgtatgatgtcacttatatgtggaatctaaaaaatcaaactcaaagtcgagagtagaataatggttaccagaggctgtagagagtagtagagtagatggagaaaggggagacattggttaataggtacaaagttttagttaggaagaataagttctgctattgcacagcttggtgactatagttaataataatgcatattttcaaattgctaaaagagaggttttttgtttttgttttttgttttttttgtgtttttttgagacggggtctcatttgaccatgcagtggcgtgatcacggctcactgcagcctagacctctagggctcaagtgatcttcacaccttagcctcattagtaactgggactacaggcacatgccaccacacccagccaattttatttttattattttcaatagagacaagatttttctgtgttgcccgggctggtctcaaactcctgggctcaagcagtccacgcccctcagcctcccaaagtgctgggattacaaatgtgaaccactgtgctcagcctaaaagagaggattttagatgttctcaccacaaataaatgataaacatttgaggtgatggatatgcaaaaaaaaatgatgtatttctcattcataccaggatgtattactattcagtaataaagcagagctgagtatttaaaaatatttatcttatcagagatcattcctccaaagaaagatggacaaagtttcacaccagttagatgattcaaataagaagacatgttcttcagccatttgctgtcaagaaataagatatgtcattaaaaataaatatactacaatcaagtagggtctgcttacctctatagaagaacatccaaacaatcaaataaaagaaggaacttcatttctctatacattcaagcaagtgttttgtgcccatctggtgccaggcactgtcgtaggtgctggagtttcagtgatgaaggccttgtccttatgaagcttatattgccccactcttagtttctgaataaaggacacctaggaaactagaaaaaaaaaattcagttaaaaaataaaggcaaattaatgtacattgacatattttatttaaaataaggtgtttatgggttttttttttaaagaacaactaggattgaaaattatattttggcagtgaagggacagacatttagttccataagagatgaacgggaaaagcatgaaaagaacaagtgaccaaatttagacttaaccatcaaaaggaggaagagcgtctttgatttggaggagaaaggtgcacttgagtaaagtcagagtttttagatggcagaaagagagcatgagaattcatacctttcatacctgaggatctcacttttttcagtgaggcaagaatcaagatcatctgaacataacaaaggcaggagagctggttatcagggacttgaagagaggtaaattttgaattaaaccactagggaatacaggaaaggagtcatctaaagggttactgtgtcctattagcgattgtgtccagccatccttagaaataactttgtaacaggatcataattataagattcttaccagcagtgtccagcaacctggaaatagagcagagaaaacagtttggtttagagaagattagcaagtaaggctggccgggcgcggtggctcacgcctgtaatcgcagcactttgggaggcagaggcaggcgaatcacgaggtcaggagctcgagaccagcctggccaacatggtgaaaccccatctctactaaaaatacaaaaatattagccgagcatggtggcgggcgcctgtaatcccagctactcaggaggctgaggcaggagaattgcttgaacccgggaggcagaggttgcagagagccgagatcgcgccactgcattccagccagggcgacagtccgagactccatctcaaaaaaaaaaaaaaaaggctaaattgagaagaggtcaagggtgtgttggaacgaaggatggtgttgagtacagtcattgaaatgattgaccttggaatccaggccgcactgggaagtaagataaattaaggtgagaccagtagcctgggttgggactaatagaagctgagagcttggaggctgtgataaatgtaaagagcaaatgtaatgggaacacaggcatgaaaagcctggaagcatcaagtagagccattctagatggtaaggtctgaggtgtagcatataaaacagaaatggaagatgagattcacatctgtagttatcagccttaaatggaagctttatttctggtaacttcactggacagtataaaatagccatgtgaaaagtaaatgcagaaagcatctccattgtcaaaagaacacaaagactaagattgacatttaattatgactcaagcttaggtggaaccatagtctgttgcttattcttaccctttctcacaggaattcacaatgaacaactatttttctgttggacctgatgctctcatggctctcaattttcatgctcatcgtgagaaggcaccatctctgttttctagcagaattcttaataaggtgtgttggataaaataacatttcctgcttatcaccgaaggtacagtaaaaatcaatagttcaattatatttagcactcctagattcagatttaactaacttacagaaatatttacctgctctgttttgtgtagggttgtcaaattagatcttttttttttttaattagatctttaaatgtgctttatcaggccaggcacagtggctcatgcctgtaatcctagcacttttgggaggcggaggcaggtggatcacttgaggtcaggagttcaagaccagcctggccaacatggtgaaaccctgtctctactaaaaatacaaatttagccgggcatggtggcaggtgtctgtaatcccagccactcgggaggctgaggtaggagaatctcttgaaaccaggaggcaaaagttgcagtgagccgagatcataccactgcactccaacttgggcaacagaatgaaactccatctcaaaaaacaaaacaaaacaactttatcaaagtattatataactctaacaaattttttaaattcaaatttgggatgttttataggatattttgcttagatggcaactaaatggaatatatgatagtttatcttaaatggcagctaaaattggaaggaaattttaggcagaataaatttttggtgaagtcattaatggaaaagtagatttcattggtttgaaaaacctccaaaaggcagatgagataaaagagcagcctgtttgccacagctttgaactaaggtcatctctggtttctagtatagttgattccgttgatggaattttgcttaggaatttttttaataacgttcggtgattgaccaacaggatatcaaaaataaatgcctagcaattatattcctggttctgttttacaaatatttcaaattttgaaatagttcccttttattaatatagttactaaggtaatacgtattactatttatacaattgataattaactcagtccttacatcaacctttttgtattcataagtgattagaaaatgtttgttagattaatacgcattactattcctaagtaatctgaagtactaggaaaaagtggaattttctaattcgaatatttttctttataaaatacaacttttttgataaattgggagaaaacaccatttagaaaaaaatcacttctaggccgcgcatggtggctcacgcctgtaatcccagcactttgagaggccaaggtgggtagatcacgaggtcaggagatggagaccatcctggccaacatggtgaaaccccatctctactaaaaatacaaaaattagccggatgtggtggtgcacgcctgtagtcccagctacttgagagactgagtcaggagaatcacttgaacccaggaggcggaggttgcagtgggccgagatcgcgcagctgcactccagcctggtgacagagcgagactccatctcaaaaaaaaaaaaaaaaaagaaaaagaaaaaatcacttctatcccacatttcccctgagaaagaggataattaaacttaaatggaatggcctgtattgtcatcttccaaaaaagaaggatgagtaatatttcatctactgtaccacagttcacctagaacttttaaactattaatagcctaagagaataaaatgtaaaatacaaatgatgccaaaagtatctgtaatatgttaaaggcatttttatttttacattgtgttttgattatagatttccattgctgctcctagtggattccaattttaccctttaaaattactagaatggaggtgttggatagggccagaggttgcacaccaaaagtatcccctttggttgcccttcttttcatcagcatctagtctaccataaggagaatgtgtgcttcaacattcttaaagggagctttgatacagcgtattttttcttattgtttacagggttagattgttttaatattatattttctgtccatttttcataggcggtttacttattctatggaaccaaagattgtttagtgcaagaatgtaaagatttgaataaaaaagttgaggtaagctattaacactttttattttttaaagttttaggtggtctctggattatgaagactttttaaacagaaatgctaaactttgttaatatattttgccagcatacatagagtatttatttgtgtgccaggcactttgctacatgctttatacacattgtccctctaaattctctccacaattctataaggtatgtattatatattcacattatgcagaaaagaaaactattttaaatgaagtaatttgcccaaattctctcatttaatgcctaaatgcacatgtaatcaagatgtgaacccagatttatgtaaatccagtctgtttaactattagggtgagtggcctccattcatacatgataaataatttacagttatctaatacagtgcctgactcaacataaagacacagaggaagtttaaatggaaagtttaattcagattatttttgtcgggtatctctcttacataccaaaataaaaatgtataaatacaaaaaaaaaaaaattagccaggcgtggtggcgggcgcctgtagtcccagctacttggaaggctgaggcaggagaatggcgtggacccgggaggcggagcttgcagtgagccaagatcgcgacgctgcattccagcctgggggacagagcaagactccgtctcaaaaaaaactaataaaaaataataaaaatgtataaatagtaaaaatagaatattaatgattgcttattgcaacagcatctctgacatcatgatatggcagtctttttttttttgagatggagtctcactctgtcatccaggctggagtgcagtggtgcgatctccgctcactgcaagctctgtctccctggttcacaccattctcctgcctcatcctcctaagcagctgggattacaggcgcccaccactacgcccggctaattttttgtatttttagtagagacggggtttcacgtgttagccaggatggtctcgatctcctgacctcgtgatctgcccgactcagcctcccaaagtgctgggattacaggcgtaagccaccgcgcccagccagatatggcagtcttatatgtattccttgcttgattccaaaaagaatctgtaatggttaatagcaacaacagagacattaattcagagaaacctagaactgataaaataaataaaaagagatcataaacagtttgggaaaagagacaatgagcagggagtaaggagactgattatacattagtcaaggaaaaatgttgccgttaggcgtaatgtttagctcaaagtctctgggctgccatggcgtagaagtaagcaagattttctgttaaaaagagtgttatgttactttatcatattttatttttcctaggctttgatggtagagtaaagcatacaagcatataaaataaagacttttattttattgtctgacattttatttatataaaaatacaaattatttttaattatacagaaataaaataaattttatttatatacctacaaaatagtcattgtcctcgatactggaggtagacagtgataaatcccttgctctacatttacagtctagggtgaagaaagatatttaagccagtctgggcacagtggctcatgcctgtaatcccagcactttgggaggccaaggtgggaggattgcttgaggcaaggagactagcctgggcaacatagtgagactccacttttataaaaaataaaaatagctgagcatagtggcatgtacctgtggtcctagctgctcaggaggctgagggaggcagatcacttgaacccagcaggcagaggctacagtaagccatgattgtaccactgcacaccagtctgggtgacagattgagaccctgtctccaagaagaaaccaaaaagatatttaaatcacattgcaatgcagtatgagaagttatataagaaaagcatgtggtcttacaggaataaataactgcaatacgtaacctaggagctacagagactagggaaagtggcagtataagcaagtctttctggaagaagtgacaagctggaatctgaaaataagtaagagttagctaagagaaggaggaggggaagattgctgtaggctaaaaacagcatctgcaaaagacccagaggcatacatggcatatttgagtgagttcaggctggagcatagctttcaggaaggaaagacaagcgctgaggctagagagatggacagaagtcaaatcacagagtgtcatatttgcctggtattggatcttgtatttcatcatgggcattgaagggttaaagtgaagccactgaagggtggtaattagaggatgacatatttgcattttttaagtgtcgatccaaccgctctgtgagggatgcataagaaagtaaagctagaggcagataggccagatagaaacattttagggaagaaatggtgaagagagagaaagacatagaaatagcatcaacagtttttagtgattaaggggatgtggagggtaaaaagtcaaagaaatcaaagataactgccaggtttctggcttaaacacctgggttgggggtgagttaacctacttaaccaggaaagagtaagtaagagttagctaagagaaggaggaggggaagatgttactctttcctggtaagtacattggggaacagggagcaaattgcagaaaagttgcttgatcaattttttacataagagtttttggtgccagtccatggacatgttttatgggcagtggatagatggatctggcccagtttactttcctgagaaggaacatccagggaagtagagtctgtggttcccaggaagcaaagggaaagaagattttaggaaaagaggaagggggtcagcaagtgtcaggtgctactgaaacagcaagttaggtaagtcctgaaaaaatcacgaggctcaacaaaaagaacattattgttgatgttgatagaagcagttctactgaagagatagaaaagggcagatgagaggccctgagtgagaggtagggagcatcttctacatgtgcatctctcatatataagcacatttatgaaaatagatgtgaattctaaatggatgtgtgtggaaattgtgtatcctgtagtcactatctatttgtatttctttaaagctagaactggatggtgagcgagtagcactgcccagcttggaaggtattatagttctgaacatcggatactggggcggtggctgcagactatgggaagggatgggggacgagacttaccctctagccaggtatgtacatttgtggtctgtttttttatgtcactattttatttaaagcaatctcttgtttatagactttaacatttttcctcaaattttcttttttgtgtatctcattagttataaatattttttaagttgatggtccaactgtgttaaaaagtaattgctctagcataactgattttttattgcatcatataatccatattttctttttccaattttaggcatgacgatggtctgctggaagtcgttggagtatatgggtctttccactgtgctcagattcaagtaaaactggctaatccttttcgaataggacaggcacatacagtgagggtaggtgaaatatagctgtaacaggctaatttgtcccaatccaattctaagctgttgatatgtaaaatatacatgctatacttttctttaaacagtggtttatggctcatgcagctggtcactgtacactagcggctagagtgggatgaggaagaaacagaaacatggctcaagatccatgagataaaacgttcacttgaaaaaagaattccttaatcaatgaataaaaacatattcagattaatattttctaaaaatgaaatgcataagggttaagggattgtggatggtattattaaggaagacctttctaaatttggggggactgacttttaaacattatttgttccctaatatcagctgattttgaagtgctccatgatgccaatgcaggtggatggggagccttgggcccaagggccctgcactgtcaccataactcacaagacacatgcaatgatgttatatttctctggagaacaaacagatgatgacatctctagtacttcggatcaagaagatataaaggcgactgaatagatggatgagggagtgaaaactttgcatagaatcctcacgcaagtagatacatgttcatccaaaagtattaatagaaattctctatcagctattcagtcttaatttcactagtagtataatgggtatacatttttgtaaatagcatccccaaaccagccagccttcagttatttacaaatgtttgttcttttttcagcaaaatacttcaaatgaatagtattaacttacaaaaagtcacaaaaacttacatgagagtgaaaatttgttatgactgttttgagagtgggactcactctgaagtatgtgctgtctcatgtcttatttttgaaccatgcatatgatggacacacaatggatggacacattatatctccaacaaggtgtgggtggaaagatcaaattaacctgcttttttgaaaggaaatgattactgtcaaaccagcatggttaattgtgagcatcctcctgcagcatgccccttaagattttctacaacccaaaccaagtgtatgtattgatttctaggaacccccaaaaggagaatagtaaaaaaagatcatacttaaaatttgtattacaatttttattttaggaacttattcagacacgtaaatgttgtttaattctgtaggtaaccatttgagctgcaattcaggatcttttttataacaccagtgtagccaaaagagaaacagataagtgaattggtaagaaataagattcagagcacttgggattgtaagttataggttctgagctgaactgtttatcagccgctctttttattaaaagacagtgtcaacacttcaaaaaacgtgcttaaaggagacaacggtgagattaattgcttagaaaaagctcaaggctgactgataagttttaaaaatttggtggtcttgtagtattttgaaatacagtagtcttttaacagaatttccccttagggaggtaagtggacagaaatctttgctaaaatgtttatatcatatttattttaaaatgagagagatatatttttaaattatttattatttaccttgtggtatggtacctgtgtttagtgtttacgttctgtagctttatttaataagttaaattgatcacataaattctgctagtcacaatcagatagaaatttagtctattaattaaaattctaatttaattctcctgacagaaatctagatattcttattcttcacaaatattcctcattgtattgaaaaatgaaggagggcatgaaaagcactagggaactacttttggataactgaaagctttgtttcattgttttatttgcccctcaattgccacaaacttactgaagggctagtttcatggttcccattagagggtgcttgttcgctgctgttgaccagcccaagggtcgtgacccacaggtcggctgacccagagggcatccagcctggtgtttttctgacacatggcccaggctttgtggtctttcatgacattaatctctgaaagatcagaatgtatcccccaaaataccattagctatctttgagggtctattatgaatctgtcatccatgaattgccataaacctaagtttgcctcacctcaggcccagaccatgttttcaaagagcaacttagtaatgtatacagtagtcagtacattttatgaaatactctattttgctaaattaacctcttgcagatctcctcaggtgatcttaaattctagtcttgagaaactttgtgagcagatctgttttcagcttctttatatacctttcatggtaagtaaccatggcagtgaggatggcagagttttgttttttttttttttaatgggccaatcatgttctgagtattatgaagtttatcctttcattcatgatcaaaattgttaaagacatcacattttataaatacactgttaaatccactttgctgtaggttatagtttacctgttatataattcgtagtgctaattgtagtagaagcaaatcaatttaggatgttggaacgaaaataatcacaataactaatacagctttttaattgtgaaaactacaattaaaaattataattttaataccaaccataatattacactgtatttagaacaggcttatgtaaaatgccctcatttatctaaataagttgattttttggttattgtaatctagtaaggtttttgcatcactactggtctgtcatgaagtttttctgctggcttattcacttatttagacttcatttagggaagctatttcagaataccatctcataaaatgtatcattatcttgtttttgcaaaattcacttactttttgggcacatttacccagcatttcaaataagtgtataggcatgtgccttgtttaagtacaatttataagacttcatgtttgcaagttacatattagggtagtgattgtttatattaccagggattctacactttaccaaaaaaaattgccataagattttcctgttccattttaaattgtcttgatatttaaaaaaataacttctacattctcaggaagaaatacatgaagtaaatcatatctccatgtctgtttccagatttctctaatctttttactatcccaatacattcctaattcctataaacgtagtggcttaaatactgaatacctggcagctcttaaagatcccttaggcagatgatgataattttcagtgtttcgtcatgtttaatagaaatcaaactgacttgtgttttaaaatacaagttgtctgctagtaaagttacatgatttaggtgtgttttaggttttctgcaacaattagctgtgaacccctaatgtagctaagtttatacaaattttataatcaaaattatttatttttatttttttagagtatgtcaaaaacatatagtgtttgctttgtgaaatacatttgcttagagttataaaatatactgtgactcagaaattgtaaagtcagtttgcgttgtaaaaatgaatactaccagcatgtcaaaagaaaaataatttacatttgtaatataaagtaaaattgtatttaatatatttattgaattttaaatttgcactaacttgaaaactttaaaggttatactaatttaatgattaatgtggacccaaatacataatttggccaaaaaagtcattagaatgggtaatggttttgtgtggttttccttcaaaatgataatattgaagcaagaaccagcattttatattgataatttttttaatatttctacccagttgaggacagtggaatataagtagatatatttaaaatatctagatatttaaaaagaaagaaaaggttgtttatcccaatctgaattcattctcagcaacaagacagaaaaggtggtttgggttttgcttttaaacagtgtccccctgtctttttcaatttttcccttgaagcctttctcttgttcttcagagtacgcgctgcaggctatctgcagcatcagaatgcctgggcaggctgttgaaagtatggattcctgagcccaacccttaacttaatgattccctgtctctggagatgcaacatagaaatctctgtttttattaacaagcgcctcaggcgattcttaagcatactgaaatttgaaagcttctggtctgaacctcatgtattcacctagggcttttgctaggtgggataccatgccgaaaaattgaattaattgtatgttcttaaaattgtttttcttctactccgctgtcctcttccctcaaaatcacttttctaaaagaactctatgaaaaacttatttgtatcatacccaaattgatatatttgtctgaactctgttacataaaaattggtatgattcatatgtggaatcagtttttggactgtgacccatgcagtgttgggggacaaggagttgcttcaggagttagtgcagtgcgcctccaaggggcagtgagccatggaggcgcctgccttctcactgcagtcaatgcagccacacttgtgtatactgagtgctgcttcagatctcagtagataaaataattccacatttaaaatgattctgctattttttataaagggtttgaaagccactactataatgactttgtcacctaattgattttctactaatttttacatattcagaaacttcgtgtttttttggtggacagaatattttggaggtctccgtcgctgtttagaatgtggccacttggctgtttcacagtttttaaagctattttattgaatagtaaagcagtgaacttagcctttgttctttgtgtttctaatttaagcatatagtctatttaatttttgatatgtaaatacacatcaatacatatatatttacccatgtggccctgtgtagtcagtgcatgaggcttgcatagcccagaaaggtacattccagggttctggggaaagaattttaaaatgccatcctctaatacagacgtttataaaacttaaatgaaatgattgggcttaaccatatgcaagaaagtctgcagaaaataaatcacctagaaactataaatagaaatgtgctgctgaggctgggcacggtggctcacacctgtaatcccagcacttggggggctaagggaggcgtatcacctgaggtcaggagtttgagacaagcctggtcaacatggtgaaacgccgtctctactaaaaatacaaaaaaaattagccaggtacattggcacatgcctttaatcccagctaatcaggaggctgaggcacgagaattgctcgaacccaggcggcagagcttgcagtgagcggagatcacatgactgcactccagcctgggcaacagagcaagactccatctcaaaaaaaaaaaggccgggcgtggtggctcacgcctgtaatcccagcactttgggaggctgaggcaggtggatcacgaggtcaggagatcgagactatcctggctaacacggtgacaccccgcctctactaaaaatccaaaaatttagccgggcatggtggcgggcacctgtagtcccagctactcgggaggctgaggcaggagaatggcgtgaacccgggaggcagagcttgcagggaggcggagcttgcagcgagccgagatagtgccactgcagtggggcctgggccaaagagtgagactccatctcaaaaaaaaaaaaaaagaaagaaatgtgttgctggtatcagatatcagaccaagaacacttcagtctctctaaggatgccctgagctacctcactgttaaaggacgacatcaacacagaatgcactaaacaggaaataagctgtaatctagagaatttccattatgtgttactttttggtgactaacatggaatgttgaaaaggaagagctggaaagctcagttgttttccttgttcctctgacattgtccaggcaagagggcatcctgatcagatgagtagatttggctgagaaaaaccctagagtaaggcaggcactttgtggaggtggatgatgatggctcataaaaacgtttgttctcagtccagttcagggctctgccagcagtctttcagatctgaactgcttaaacaaaccctacagataaattggcactctgatttgtaattctgtttgtacaagtttagagcagcctagctcgagtcctcaaccccagtcctcttagaagtgaactgattgcactggatccctaaacccacaatgttgaggacacatgtgatgactccacttgctcagccagctggcctcttgcactttcccctgcccaccacttgtaactaccacttaattatcttgtgttaattgcttttgttgtgttgggtctgtatttttgtggtcagtgcctgcaggcagaaatgtgaaagcatttggtatgttgaagatacttgcttcttttttaataaaattaaaagtgcagcacgtaagtatgatactgtgtagttttttgacacaaccatgagatacaataagcagctttgacttagtgtcccaaaaagtggttcttggtctacagcagggcaaacatatatgtggcaagttctgatcacatacttttagacagaaagaataaaaaattcatattgcatggcttttgtagcctaagagcacagaatcatacacgtgtgttaggagaaacattcattctcacgcatataaactggctcctggcagagtagagcagtaagtgggatcaaaggtgaattcaccttattttcagttggtagagtatggaaaaatgtatcacttatttgaaatacctgaatggaaacccagcctctactactgtaacttaacacttgttcttcctgagcctcaaattttctttctctgtaagaatgggaattaatgcccacctacgggttgcaagtgcttacaggagctgggcaagcaacgaaggtaagagttgtagagacttcggtaaactggagcacatgattcctgggaagcaggcctagtgtaaacaatttatttttctagaaaagacagaagtttagagtatatgaaatctaatttttaagtattggttggcaactaattgactatcgtctaccataaggttatatgataattattagggcaggagagtgaatgcatcttaatatgcatggcagaactgtgtgtttccttccatctggattttcataaagctttctgatttatcagtaacgatctgaaaaatgtactgtggcatgtaacatcttttattcattttattaggcattagaggaagaatattctgtagtcctgctttattctgccatctttacctggaaatccatttttataaaatttttgtaataaaaattcacttgatca

SEQ ID NO: 1169 - DNA, 39025 bp, Homo sapiens
gcagcgcccaaagatgacgtgttctgccagcgccacgtcatgaggaagtgccggcccactgaagccgtggggacgcgcccagcggagctaatcaggtgccactgaactgaaggggtgaactagaggagaagagggtgactgggcggggagcagctgcgggagaagcaaagggacgactgagggaataatcaggagaccactgaggcgtgaagtactaggcgtgcgataactgaaggagttagtaactgggagcacagagttggaaacagcttaggggaagatggagaaggaagaaacggggaatgatcaagatgtgggcaccatgatgtggcaggaaaccgacttagatgttcagaagaagtcagtgcagatacggaggaaatgggaatgggaagaagtctgcaaagccaggagaaccgaggaaaggcttttgcctccagaggtcacattgcgttataaaactctgggtggtaaaagattataggcttagaccagtgtctttggattctaatgctggctgctctccatagtccatctgattccccagaagtcagttatagctcttcgcaaaccttggtgacttcttattttctttcttgtttatccaagattacctggctggtgtttgcttgttctggagtgatcttctgactggaaaagaactatgtcatggatcaaggaaggagagctgtcactttgggagcggttctgtgccaacatcataaaggtgagcaatggcccagagcaccggttggccttctggtcagttggataatcttatataaaaacctgttattaaagttgatgatgttaagtgcaattcatgatgttaagtggaatttagcaaggaaaccaaagagtcttagaatggtaacttccaggtctacatttctggtagacttttgtcctaactctgatattttctggaagcccaggcctcttaatgtcactgggcagcctagactgctaagtattctttatagagaactgaaatttgtttccctggaacattgatccattgttccatgtactgtcttcttgatttaaataggttaatctttgatatattctttgatctgtcagtagagctgggcccggtcactcacgcctgtaatcccagcaatttgggaggctgaggtgggcagattgtttgagctcaggagttgagaccagcctgggcaacatggcaaaaccccgattctccaaaaaattaaaaaaatagcagggcttggtggtgtgcacctgtagtcccagctactcggaaggctgaagtgggagaatttcttgagcccaggtcaaagctgcagtgagtcatgattgtgccaccacactccagcctgggtgacagaacgggactgtctcaaaaaaaagagttcagaacaagactctgtctcaaaaaaaaaaaaaaaaaaagagtttgggctctagacgcagacaaacatgggtgaaattcctgttcttttttttattttgagatggagtctcgctctgtcgcccaggctggagtgcaatggcgcaatcttggcttactgcaaccttcatctgccaagttcaagcaattctcttgccttagcctcccaagtagctggggttacaggcatatgctaccacacatggctaatttttatatttttagtagagatgggattctcatattggccaggctggtctcgaactcctgacctcaggtgatccacctatctcagcctcccaaagtgctgggattataggactgagccactgcacctggcctgaaagtccagttctatcatttagtaatcatgtgactttaacaactgtagaattatcatgagaatttatgagacattaatataaagcagttagcataatgtctagcagttcttaattattattaggattgtctttcagacatttgaagactattatctcctatcttccccaaatcttccctcagctttttctctaggaatcacagcaatattatatctgcctaagacaggtttgagattggggccagtcagcttggttttgtttttcaaccacaggctgtcaagcagcaggtagtaatgaatttatgagtcagtaacctttatacaagccccacacatgctcacaaacaaatgccaagtgatctcaagcagtccaggaaatgggaagtatctccttggggaaccactgcagtggtatgtttggaagaacaagctgcataacttgaatggattttgggggctggaaaggctgtatgtgagacagaagtagaaaaaggagaagtgttgatgaggaagcagtcagggaagagccctcccaggtgaggaaaaataggctaaggagtccatttgtgttatgggagacaactcaaagctgctccaagccaaataagggttttgttttttgtggtttcttttttgagatgcagtcttactctgttgcccaggctagagtgcagtggtgcagtcttggcttactgcaacctctgtctcctgggttcaagcgattctcccacctcagcctccccaagtagctgggattataggcaccggccaccatgcctggctaattttttttttttttttttttagtagagttggggtttcaccatgttggccaggctggtctcgaactcctggcctcaagtgatctgcccacctcagcctcctaaagtactgggattacaggcttgagccaccacgtccggccccaagtaagttttgtttggctcaaaaaaagtcttttttgtttgctttgaaaaacaatttttttttttcagacagagtctcactctgtcgcccaggctggagtgcagtggcacaatctcagctcactgtaccctctgcctccccggttcaaacaattctcctgcctcagcctcccgagtagctgggattacaggcgctcgccaccacgcccggctaatttttctttatttttagtagagacagggtttcaccattttggccaggctggtcttaaactcctgacctcgtgatccacccgcctcggcctcccaaagtgctgggattacaggcatgagccactgcgcccggctgaaaagcaaaattttaataaaaatcctgatgtttggttttcttgcaagatcaccagatccagcaatgttgtgccccagttcctgtgtgtcagcagttggctagaggtcaggaattagtgcctttttttttttttttttttttttttgagacagagtcttactctgtcacccaggctggagtgcagtggtgctatctcggctcactgcaacctctgcctcccgggttcaagccattctcctgcttcagcctcctaagtagctgggattacaggctcccaccaccacacctggctaatttttgtttttgtttttttcttttttccgagatggagtcttgctctgtcgcccaggctgcagtgtggtggcgtgatcttggctcactgcaacctctgcctcccgggttcaagcagttctcctgcctcagcctcccaagtagctggtgttacaggcatctgccaccacacctggctaatttttgtatttttagtagagacggggtttcaccatactggccagcctggtcttgaattcctgacctcgtgatctgcccgccttcgcctcccaaagtgctgagattacaggcatgagccactgtgcccagccctaattttcacatttttagtagagatggggtttcaacatgttggccaggctggtcttgaactcctgacctcaagtgatccacccaccttggcctcccaaagtgctgggattacagacgtgagccactgcacctggccctatgagttccttttttctgtggaaggtaccatcttcatttgactatgcccatcaaaatttttcctggccagacacgatggttcaaacctgtaatcccagcactttgggaggccaaatcgagtagatctcttgatcccaggagttcgagagcagcctggccaacatggtgagacccccgtctctacaaaatataaaaaaattagctgggtgtggtggtgtattcctgtagtcccagctacttggggaattgaagtgggaggacctttctcctcccgaaaggtggaggttgcaaatgacctgagataacaccaccacactccatccaccttgggtaatagagtaagactctgttttgtttgtttgtttgtttgtttgtttgtttgtttgttttgagacagagtcccgctctgtcatccaggctggagtgcagtggcgccatctcggcttactgcaagctccgcctcccgggttcatgccattctgctgcctcagcctgccaaatagctgggactacaggcgcccaccaccacgcccggctaactttttgtatttttagtagagacggggtttcaccgtgttagccaggatgggctcgatctcctgacctcgtgatctacccgcctcggcctcccaaagtgctgggattacaggtatgagccactgtgcctggcctgagtaagaccctgtttcaaagaaaaaaaattttttccttttgctttctagttggagaccaactaaaccaagcctgtatttaagagcatatggttgaaagattaactctggaagcagatggacatcagtttgaatccctatttgcctcttcttaaccgcgtgactgggccgggcgtgctggctcacgcctgtaatcccagcactctgggaggctgaggcaggcagatcacaaggtcaggagatcgccaccatcctggctaacacggtgaaaccccgtctctactaaaaatataaaaaattagctgggcatggtggcaggtgcctgtagtcacagctactcgggaggctgaggcaggagaatggcgtgaacccaggaggcagaggttgcaatgagccgagatcgtgccactgcactccagcctgggcgacagagcgagactccttctcaaaaaaaaaacagaacaaaactgtgtggcttatgcaagtcactagaactctctgagcttgtttttccacctgtaaaatgaagataatactatttactttacagacttgtatgataagatgaagtataagaagcccagcatagtatttggcatgtagtacgtgctcagtaaacacgtaaataaaaataagtaggccagctatggtggctcatgccttttttaatcccagcacttcgggaggctgatgaaggaggattgcttgagcccaggagttcgagacctggttaacatagggaaacacaccatctttttttttttttgagacagagtctcgctgtgtcacccaggctggagtgcagtggcacgatctcaactgactgcaacctccacctcctgggttcaagcgattctcctgcctcagcctcccgagtagagtagctgggactacaggcatgtgccatcatacccggctaatttttgtatttttagtagagactgggtttcgccatgttggccaggctggtctcgaatgcctgacctcaagtgatctgcccacctcagcctcccaaagtgctgggattacaggcgtgagccaccatgcccggccgaccccatctcttaaaaaaagaaaaaaaaaaaaagaaaagaaaagaaaaaaggataggtaggtgtggtggcatgtgctggtagccctggctactcagcgggaggcagaggtgggaggatcacttgagcccaggaggccaaggctacagtcagctgtgatcataccattgcattcccacctgggtgactaagtgagatcctgcctcaaaataaagtaagtaactaagtaagtaaactttaatgtctttttactgagttaaaagcacaaagtacccaattcccttcgtcagggttttcatcacatagcccaaacatatcaccttggggtgtagtgtcttcctttatccctgaagaatatgagacctgttcatcatttgtcttcctattccacaggcaggcccaatgccgaaacacattgcattcataatggacgggaaccgtcgctatgccaagaagtgccaggtggagcggcaggaaggccactcacagggcttcaacaagctagctgaggtgggtgtgtatggcagagcccaaagtgaacagtctgtggagaggtagattatagctagaaaaccaggctctgagtttgctgtggttggagagtgttttttgtatctgtctctgtgttttattgtttgcttgctagctatagatctcatcttgacattggccagacgtggttgcttttgcctctaatcccacactttgggaggccaaggcaggaggattgcttgagcccaggggttcaggactagcccgggtaacatagtcagaccctgtctctacaaaaaaatttaaaaattagccagacttgatggtgcacacctgtgcccccagctactcaggaggctgaggtgggaggactatctgagcccaggaagcttgaggctgcagtgaatagagattgtgcccctgtactctagcctgggtgacagagtgacaccatctcaagaaaaaaaaaatgacattaacaaagaagtaatcatccagtgaatgaccataaaatactggaaataagaacaaaattgcctcttcttattttaataaatcaatagtttatattttatgcctcatccaatccttattgtatgctctacgtgacttaacattaataaaattgcatctgtagcttcagtaaccttattttcacttaacattttggttttgtttatttgtttgagacagtctcactctgttgcccaggccagagtacagtgcatgatctctgctcacggcaacctccgcctcccgggttcaagtgattttctgcctcagcctcctgagtagttgagattgaacacccgtcaccatgtccaactaatttttttgtatttttagtagagatggggtttcaccatgttggccaggctggtctcgaactcctgacctcaggtgatccacccccttcagcctcccaaagtgctgggattacaggcatgagccactgcacccggccaacatttggggaggcattttttaaggtgtatatataagctttctatctgtatctttcaatgactgtagaacattttatcaagaggatctgatataatttaactgctccactattacttgacattacaataaacattataaatagtactgtttcagcctgggcaacatggtgagatcctgtctctacaaaacaaaaaaaaaaattagccaagcatgatggtgcatgcctgtggtcccagctacttacgagactgaggtggaaggatgacttgaaccctggaggttgaggctgcagtgagctgtgttcacgtcaccgcaatccaacctggtgacagagcaagaccttgtctaaaaaaaaaaagtactctttttggataaattcttagaagtgacatttctggacgaacattgagtgactactcattctgctttgccaaggctgaggggtttctcaggacacaggtctttcagtgctaaaactggtgaaagtccccggcaaaccaggacatcactctacacagaggtcatgaacattttatggtataatgcatgttataaattggaagacattaagtttaacaaaagaatggaatatgacaatcttggtgaaatttttaagaagaatggagggccgggcgcggtggcttacgcctgtaatcccagcactttgggaggctgaggtgcgcggatcatgaggtcaggagatcaagaccatcgtggctaacacggtgaaaccccatctctattaaaaatacaaaaagttagccgggcgtggtggcgggcacctgtagtcccagctactcgggaggctgaggcaggagaatggcatgaacccaggaggcggagcttacagtgagccaagattgtgccactgcactccgcctgggcaacagagtgagactccgtctcaaaaaaaataaataaataaaagaatggaaatatggtctgtagttcacaggtcccagtgtcctagcacagggacacagtttgatgccagggccgtgatatttttttccttgagtgaatggcagtgaggttctcaccagaaccttgtagaagtctttacgtttgttgactccagcttctcttttgtaactgagaggcagttttgcctaatgcttaggagcttgagctctggagtcactcagaattcattggcacccctgctttgtcactgtctggctttgtgacctgcagcgagttatgtagcttccctttgcctcagtttcttcatctataaaatggggttagcaatctctatctcagtagattatttgaagataaataagatggcacaatgaaaagcatgtagcacaggccctgacctaaaggaagtactcaaaaaattgaaacttgttattagcaactgtattgactgatgtcagtggtgggttccaacccagatgtgccatccacagtggctgccttgcaaggtctttagggcctgaggctattcaagtgtcaggttctcactggcaattttcctaagatgacagtagatttgtttgcttgtatgtttgttaaggggttagagaggcagctcttcagcttgtttcttctgttctgtttgaatgtcttctgttgtctacgtttaacctcccgctctccatctctcaacattgtcctccacctctcaacattgttctccacctttagtggtacaggattagagcagccccaaaggactaagttttcttctttttttttttttttgagacggagtgttgctctgtcacccaggctggggtgcagtggcgcgatctcagttcactgcaacctccgcctcccaggttcaagcgattctcctgcctcagcctcctgagtaactgggattacaggcctgcgccaccacacccggctaatttttgcatttttagtagagacggggtttcaccacgttggtcaggctggtcttgaactcctgacctcgtgatccgcctgccttggcctcccaaagtgctgggattataggtgtgagccaccacgcccggcctgtttttttttgagttgaagtctcactctgtagtctaggctggagtgcagtggtgagatctccactcactggttcaagcgattctcctgcctcagcctcccaagtagctgggaatacaggtgtgcgccaccgcacccagctaagtttctgtatttttagtagaaatggggtttcaccatgttggccaggctgggcttgaactcccaacctcaggtaatctgcccaccttggcctcccaaagtgctagggttataggagagacccaccacacccagccagtttcatttctttttgagttataatttcatatggtgaactgcacagattttaggttttgacaattgcatttatttatctaacccatacccctgtcaagatataggacatttcctgccgggctcagtagctcatgcctgtaatcccagcacttcgggaggccaaggcaggcaatcacctgaggtcaggagttcgagaccagcctggtcagcatggcgaaaccccatctctactaaaaatacaaaaagttagccagatgtggtggcacatgcctgtaggcccagctactcgggaggctgaggcaggagaatcacttgaacgtaggaggtggaggttgtagtgagccaagattgcaccactgcactccagcctgggtgacagagcaagactccagcttaaaaaaaaaaaaaaaaaaagatgtaggacatttccatctctccaaaaaaattccctggtgccccttctcaatcaacttctgttctacctcctccttttcctctctaggcaactaccgttctgatttctgtaactataaatttgtttttcccattctagaactccatataatggaatcagacagttgaggatttttgacatattcttcaactctgagcctgttttatcatttgtaaagtaggcatgaaaacagtagtgtcattttaaagtggttgttcaaagaatcaaatgaaattatgtgaaaaccctttgcaggctattaaatgctacacagctgtccagttgttgctttttttcttttaactcagcctctcaacctaccagaataatgaagttatgctgtgagtaataacaccttgtgtttttatattgttcgttagccaccttgtaagggatggattgtgatcccatattacaggtaaggagacttcaacctagagaaattaaatgatttgattccagtcacataagtgcatgctggagtcagggactagagcctatgtctttacactctcagtgcagagttctttcttgtagtgcacaatgccatcagcattcactaagatcacatttttcagtttcttcaatggtggttttctgcttatttgatgcattaattctgacataaacactgatgttatcctagcttcacccagctttggggaggagaaaagtctgtctcctatctccaactctgagtcaggaccaaaaagtatctcttatttccccttcccactcttccttgtatcctagctccttgccttctcccctctcagactctgcggtggtgtttgaacctgggcatcctagaggtgacagtctacgcattcagcattgagaacttcaaacgctccaagagtgaggtagacgggcttatggatctggcccggcagaagttcagccgcttgatggaagaaaagtaagatgctatcagaggggagagcatgttcttccaccacccccagccttatcctaacccttgaaattctgttatctgaggcttacttaagggacttgcaactctttttaatgttagttagatatcttgggtggcaaatatcagaaatacaagatagtctttcattctttatttctaactttttaataaaaaagggggcatttatttgaggatattgaggggtgtcacatgatttaagaacaagtacagccagcctcaagcaaaactgaaaccaggaattaaacccactaggtagaacctctgtattcatttatttccacctctctctgcagaccagttttctcttgcttcaaaagagcagcctggaatcaataaaatcccttaattgggatccctaaattctatcagatttctaccccagagccaataaactatggccaaggaagtggagttaaagaaaacattgaggaagtcattttctgctgcacagtgaaccctaaaaagttactgtactccccctgcatagtcttttgggagggataggatgatgcataagagacatttatggggaagcatcagtaccattcttagctgtcagtaagtttaggcttaacttagggaataaagccagagaggggcaaagacaaatttcagtggagactgcttgcttcaaagtatggagcccttaccagccagaattgcccgaaagtcttagttacaactgttgtgtgcccagctcctacctgtaccaggaagatgagagaacagtgagcctagaactccagtgaagatgagcctagaacaatgggtggtagggagggtagccaggcttccttctgtctatattaggatggtgagactctgggctacagacattgctccccggtccccagcagagcctgtgtggctcagagtttacacctaaggagccggggatggaggcatggggggcatatcccactaatcttacctttttaaagtgtttactatatgccaggctttgagcctaaaatatattcttactcatcctgtaatcacattataccatgacaaagatattattagccaatttttagagagaaggaaagtagttaaccaaagaagttaaggcatatatcctgggtcacacagctatcagacaggcagagccaaggtgcacacctggatctttttgactccagagctgagctatcatctactacactgtgctctgagagacagaccatattacaattcctgcaagatcaaaacgcatggcagaagagatgctaatgagattgcgctgatcagttagtagtagagaaaatggtcttcgtttatcatgaagtcctggcaaaagcaagaagaaactcagaggtgcttttccattaatgtgccacagaaccccaaggtctgaggaggtgtagaaagaacctagtgggaatggggtagggggtgctgagttgcatttacctattttatgtgttgggcttctgtgtagaatttgatttgaagaaagggttctttggctaaaagaaggtgggaaaaccactggcctgattctgtttcatcagttgggaaactaaaccctagtaaagagaagaggttgagcaaggtggctcatgcctgtaatctcagcactttgggaagccaaggagggtacattgcttgagtccaggaatttgcttgattccagcctaggcaacatggcaaaaccccatctctacaaaaaaatacaaaaaaattaactggggatggtggcacatgcctataatcccagctatgtgggaggctgaagtggggggatcactgtgatgagcctggggagtctgaggctgcaatgagctgtgatcgatccactatgctccatcctgtgcaacagatcgagaccctgtctcagaaaaaataattaaaaataagtaaattaaaattttaaaaaacagaagacaagagcttacacatggtcacacatcaaactagtggcagaactataccacaagctagcaggaggagctgaatcaaggtcttctagtatactgccttcaattaatctcccattttccaaatgtgaagcattcggtttcttcatagcatttccagatgagagaagctggctgaattcattctcactgtatgcagagtttgggagttattgtatggaagcaatataatgtcataattaagaagacaagctctggaggctgactccctacgtgcaaatcctggttctccatcagctgtccaaacaaattacctaacgtccctgtgcctcagtttcctcatctgtaaaaggggaataataagggtatataactcagaggttggtgtaaggatggaatgtgttggtacatgtaaagcacttagaccaatatctggcatttagtaaacatagaatgttagctgtcaccattatcataatatttcactagaacataacaaaagtaccccataatacagctccttcccttgaggagtttactcacttctcaaatgggacaaacttcacagatacataaaatgcaactgcccaaaaaggacacatgaggtcgtgtaatgtatagtaaagagtttgggttcttgctggacatggtggctcacacctgtaatcctagcactttgggaggctcaggcaggaggatcacttgaggccaggagtttgagaccaccttgggcaacatagtgagacctcatctttacaaaaaatacaaaaattagccaggcatggtggtgcatgcctttagtcccagctacttgggaggctgaggcaggaggatcgcttgagcccaggatttggaagttaacactgaaccatgagtataccactgcactccagcctgggtgagagtaagaccctgtctccaaaaaaggggaaaaaaaaatgtagtttggggctgagcgcagtggctcatgcctgtaatctcagcacttgggaggccgagacaggcagatcacttgaggtcaagggttcgagaccagcctggccaacatggtgaaacctcatctctactaaaaatataaaaattagccaggcctggtggtgggcacctgtaatcccagctacttgggaggctgcggtgggaggatcgcttaaacccgggatgcggaggttgcagtgagctgagattgcgccactgcactccagcctgggtgacagagcaagcctccatctcaagaaaaagaatttgggttctcaaatcagacaaactgggtttcaatcctgacaaagcacttgatggctatatgaccctgggcagtccctatctgactgtcctgtctgagccttggcactgaagtaagtttctttcagagttgttgaagggatgcaatgaaataatgcatgtagaacagggtctgacacacaggaaagcactcaaaaaactggtggtcagttattacctgagcaccttgctctctccagctcagcaggggccctatcccaatgctgcctcttttccctgatcagggagaaactgcagaagcatggggtgtgtatccgggtcctgggcgatctgcacttgttgcccttggatctccaggagctgattgcacaagctgtacaggccacgaagaactacaacaagtaagttctcagatttccctatagggagctgtttcaatctttgattccctgctggctttagggagacgtcctgggctttccttggtctggattggtgcaaggggcaatgagagagtaggttgagcagcttagagactttctccgtctgcagggcacaccagacatgattctgcaataacatgttatatgtgtgtatactgacacatacacatagtttctctttcctcctttctctgcccagcccccaccaaataagtgtgtgtgtgtgtgtgtgtgggtgtgtttttacttgacagggaatgggatcggaatacagcagttcttatccctgactttgaagacagatccttcaagaaattcttgttctgttccactcctttaacctatggataggatgaccttgggaggtcatacagatgtacaggggaatagagttcaataatccaaactctgtgatgtgtagctttgaaatataacgtgtattttggcagtggacttgttttacatcaaatctccttcctattttcctttgtttgtgccaatatcacagtagagtcttcctctgaaagccggtgtacagtagaaggggagagggttaggacggcaataggagctatttggtggctgggcacagtggctcacgcctgtcatcctaggcaggtggatcacctgaagtcaggagttcaagactagcctggccaacatggtgaaaccccatctctactaaaaatacaaaaattagccaggtgtggtggtgtgcacctgtaatcccagctactcgggaggctgaggcagaagaatcgcttgaacccaggaggcagaggttgcagtgagtcgagatcacgccattgcacttcagcctgggcgacaagagcaaaactctgtctcaaaaaaaaaaggagccatttagtatttgtcttattataaaactagttacatgtttattccaagaaaacttggaaaccacaaaaaactcataatttcacctttcagaggtatccacaattaacatttgatgtgtatttgtttttctagggaaaggctggaagggcttctctgtaatcagtgacttcaatcatcagtccctgtccccctttggtaaattattctcttcttccctcctcaggtgtttcctgaatgtctgttttgcatacacatcccgtcatgagatcagcaatgctgtgagagagatggcctggggggtggagcaaggcctgttggatcccaggtatcccgagttgttttgcatggtaattgttaaggaaaacaggcctgggccagcatggcagctcacgcctgtaatcctagcacattaggaggccgaggtgggcagtccacttgaggcaggccaggagttcaagaccagcctggccaacatggcaaaactccctcttttcaacaacaacaacaaaaaagcaggcctgtaccaaaccataaagcccctctgtgccatgtacttggccagaggtctaattaggggagcatgtggaaagatttaaggggatctcccaaatttagagattaggattggcttattacaacctgcttcagaactagagttcaccacacaccaagaaaccccagagaaagagcaaagcagatgacaaagccatgttattattcctttacaaattataccctcctggccctttggtagtgtttttccaagaatgacttttcatgaatgcagtttgttggggctagagttctttaggtctctcatgttctagttccacacaagattcaggtgtttttcttttcttttttttttttttttttggtgaggcaaagtctcactctgttgcccaggctggagttgcaacctccacctcccaggttcaagcaattcttccgcctcagcctcccaagcagctgggactacaggtgcatgccaccatgcccagctaatttttgtattttcagtcgagacaggtttcaccatattggccaggctagtctcgaactcctgacgtcgtgatctgcctgcctcagcctcccaaagtgctgggattacaggcgtgagtcaccatgcccagccgattcagggatttttcaaaaagaaaattattaattattgtcaacatagtggaatcctaattattaaaggtggagagacttttgaagccatttaaatatttggtccctctcatgttattatttatgtaacttttaatatatttgtaaactaacagcaatagtaaaataatagtagcaaaaaataacccaggagatgtgttgtgttctgtatttcattaagtcattaaccttatgtgtgagagattcaaggctgttgtccattgtgtagatgagaaaactgagttcagcattgaagtgacttgcccagggtcactctactagtaagtgccagagctgggactcatatctaaagctgtttgattttagggttcttatcctttacctctattatgtgggatcttgggaagcaggaatttttctggttcccttcccgattcgattgacctaggaaactagattaaaaatcaaaaagttacttggtgagaatagaattagataaaaaggagaggagacagtttttgaggctattttatgaatgcctctccttcctaacagctgggtgacatttctctgtcacatagttcattcattcaacaaatattttatttttatttatttatttttattttttattttatttatttttttgagatggagtctcgctctgtctccaggctggagtgcaatggcgagatcttggctcactgcaacctccgcttcccaggttccagcaattcttccacctcagcttcccaagtagctgggattacaggcgcccaccaccgtgcccagctaattttttgtattttttagtagagacggggtttcaccatgttggcgaggctggtcttgaactcccaacctcaagtgatctgtctgcctcagcctcccaaagtgctgagattccaggcatgagccatcactcctggcccatttttatttttattttgagacagggactcactctatcgcccaggctggcgtgcagtggtgtgatctcggcccactgtagtctgtgcctcccgggcccaagcagtcctcccacttcagccttccaagtagctgggactacaggtgtgtgccaccatgctcagctaattctttttttggagacagagtctcactcttgcccaggctggaatgcaatggtacaatctcggctcactgcaacctccgcctcctgggctcaagcgattcttctgcctcagcctcctgagtagctgggattacaggggcatgccaccatgcccagctaatttttgtatttttagtagagacggggtttcactatgttggccaggctggtctcaaactccccacctcaggtaatccgcccacctcggcctcccaaagtgctgggattacaggcgtgagccaccgcgcccggcggttttagacttacgttacagtggatagtggtgcccttcaccatgctaggtaaccctgagagaaaatccagttgaaaagggtcagcagtttggttttggatatcctgtacatgttgaacagagatgtcaggtcaacagttcagcgagggattggtatagtcaggtcaacagtcagacagagatgtcaggtcaacagttcagacagggtttatctctgtcgccagtatggaagccatctgtgtataggttaacttgagcaaagaggggatgagaaagctaaggagagtctgtctgtctatctgtgtatttatctatttagagatggtctcacactgtctcctgggctggagtgcagtggggcaatcaaagctcactgaagcttggaactcctggtctcaaaggagcctctcaagtacccagtactacagacgtgcaccacctacccagctaactttttatatttattttttgtaaaaacagggtctgactttgttgcccaggatggtcttgaactcctggcctcaagtggtcttcttgccctggcctcccaaaatgctgagattacaggtgtgagccactcagccctgcctgttaaggagtgtagagtgagaagaagaaagagcctaagatggcatttttgaggaactctaccctttactggctgggtagaggagaataagctttataagcaaaaacacagaaaagcaggaagaaaaccagggcagccagcattacataagccaagaaaagagggagtttgttggtgcaagttgggaaggggtagggcacccatggaaacaatggtgtcaaatgctgtagagaggtcaattaagatgtagagtgaaaatcagctgttgttaaaacaattaagagactggtggagttagcagaggtagagagcaggcaggaagatgagacagaaaaggggtatagaaatagaagcatgttttcaataaaattcttagtttggaggtactttcgtagttcattatatttttgtgctttataatgaatatgtttcaaatattcttgtatgtatgaaataaatattaaggcacaagggttgacactagaatgaaagaaagccatttgacaagcagatctaatatgcattatgcctaggactctgatcttgactcctagtccagcatgctttaccctcataccacattacagtaaccactaccttatctcctgcttcttgtccagcaagtttttccatatccttctctgtcctgcatggtttagtaacttgcctctgtggggttagttatgcagacagggtgtgggttgggcagtatcaccagggtcaggaggccaatgtctcaacccaccaactcctgaagcttggtgtgctcagactgggctaatcagggcctgaggcgttacactttatattattcgaatttagacaaacctgcatttataacaaagtcagtgcgttaattacaattaggtcctatgcttctaatagctggaattttcctgatttctcactatcaccatccaactcctcatttttctttcttccagggtatgtatgtagatgtgtgtgtgtgtgtgtgtgtgtgtgtgtgtgtgtgtgtgtgtgtgtatttttgtttttttgtttttctgagatggagtcttgctctgttgcccagggtgaagtgcagtggcacgctctcaactcactgcaacctccaccttataggttcaagcagttttcgtgcttcagcctcctgagtagccaggattataggtgcacaccaccacacccggctatttttttttctttttttttttttttgagacagagtctcgctctgtcgcccaggctggagtgcagtggcacaatctcagctcactacaacctctgcctcccgggttcacgccattctcctgcctcagcctcctgagtaactgggactacaggcgcctgccaccccgcctggctaatttttttatatttttagtagagacgggtttcaccatgttagccaggatggtctcgatctcctgacctcgtgatctgcctgcctcggcctcccaaagtgctgggatcacacccggctattttttgtatatttagtagagatgggatttcaccatgttgaccaggctgatctcgaactcctgacctcaagtgatctgcccaccttggcctcccaaagtcctgggattataggtgtgagccatagcacctggcctgtttcgttttgtttttgagacagggtttcactctgttgctgaggctgaagtgcagtggtatgaacatggctcactgcagcctagacctcctgggctcaagagatccttccacctcagcttcctgagtatctgggaccacagatactgctaccacatctggctaattttttgactttgtagagacagggtcttgccatgttgtccaggctggtctcaaactcctgggctcaagtgatcctcctgccttggcctcccaaagtgctgggattacaggtttgaaccacggcacctgaccgaggtatatatgtatttttttagcagttaaattaatagattgttttgtgagtctggaaattatagaagaaggaagtagattgagaccaaaggatagttaataaattctattccaccgtgttaccttgaacgggctacttgattccctgtaggcctctgtctttcttataaaacaatagtgttaatagtaattgctaacacttactgagcatttactctgttccaagcattaagtattccacatacatttatccttagaccctataaggtagatactgtttttatgcccattttaaagatgagaatactgagacatggagaggaaaagtaacttgtgcaagttcacatagttggcaaacctgggggccaagatttcaacctggcttcagagcctgtgttctcattcactgtggcatattgacttcctcatagcaaagctgaaatgaacaataaggcagtaaaaaagaaaaaaattagatggacatggtgacttatgcctgtaatcccaggactttgggaggctgaggcaggaaaatcgcttgagccctggagtttgagaccagccctggcaacacggcaagaccctgtctctacaaaaataaaacagttagctgggtgtgctggcacacacctgtagctacttgggaggctgagtgaggaggattacttgagcctagcaggtcgaggctgcaatgagctatggttgcgccattgctctctagcctgaacaacagagtgaaaccctgtctgaaacacacacacacacacacacacacacacactcacttttgacataaatatttataacacatgaaatcacataatgaatagtttacactctgaatcatgcttttatcattcaatgttacgagtacttttcatgacccgtgtttttaataattcttcatatcattatttataatggctgtaaaatatatcttgtgttaatttctttaaccagtcttctatttgttgggtatataggcagtttaatatttcattattacaaataatgccacaattaaatctttgactgaacttgcctgcattttttattgtttcctcaggatctgagtttgaaagtgctcatttcaccttattcttgccaagattttttaaatgtaaactgttctgaccaggtgcagtggctcatacctgtaatccagcactttaggtggctgaggcaggttggatcgcttgagctcataagttcgagaccagcctgggcaaaatggtaaaatctcgtctctaaaagtacaaaaattacctgagtgtggtggcatgcacctatagtcacagctacttgggaggctgaggtggaaggatggcttgagcccaggaggctgaggctgcagtgagccaagatcacatcactgcactccagtctgggtaacagccagatcctgtctcaaaaaataaaacaaaaaaataaacctattctcataggtaaaaactgatattttaccgttatttaatgtaaatcatttccgaaaagtcttcacgtagacagctttaactcaccattccatttagtgatggatttttgttggccaaagtctacagatgttccattttgattttgtcagtttcatctttccaccctagagttaacccctttttttttgtttttgagatggagtcttgctctgtcacccaggctggagtgcagtggtgcaatctcggctcactacaagctccgcctcccgggttcacgccattctcctgcctcagcctcccgagtagctgggactacaggcgcccaccaccacgcccggctaattttttgtatttttagtagagacagggtttcatcgtgttagccaggatggtctcgacctcctgacctcatgatctgcccgcctcggcctcccaaagtgctgggattacaggcgtgagccaccgcgcctggccaacccctttgtttttttgagacacagtctgctgtatcactcaggctggaatgcactggcacaatatcagctttttccattaagaattctgcccactgcagaattcttactgcatacctactgcctaaagtaggtagaagaaactctttgcagataaattgtaaactcagagagactgagtctctgaagtcacactgcaagttggtgggactgaaaataattttttattattattctttatatagcactttatagttcccaaagtgcactcaaatctattatttcatttgatttgaccctcatgataacctataaggtggataggacaaatgggccctgtttttttttttcccttttaattacatttattttaatgctgaatttactcctgtgccataagtttttgtttcttcagtttctttgggatatcattttcttctgggcaacctcctcttctggtttaggaacaatctgttccttttcagtaaggatcatctcaatgtggcagggagagctcatggatgggttaatccaaccatgagctctgtaggtccagcggcacatcttaggtgctttgttcacttggatatgctcaatgaccagagaatctacatttaaacccttaagttcagcattactctctgcatttttaagcatgtgcagcaaaaattcagcactctttttgggccactgaccttgtgtccagccccactgcttggcctgggcacacctgccagctccaccattgtaacgtcggaatggtacgcactgtttctgtaaagtgacatctttcaggtacttcatggcttttcgtatatgcatacccttgatggcctgggcagtttcacgaatattcttaaagtaaacacgaagattggaacctcttgatttgcatgatatcatgaggttctccgggttaagtgaatagtgaaccattttcacagattacctcaggccgcttagggaaagagcaaatgggcccattttaaagataagagaatgagaaattatatggattgtacagagtctcacataacttggagaattaagaccatgctgccaagacaagattgtcagattaccagagaaatctgaaccagagcccttcttattgctcaattataagtgaatactgtttcctctgtgatgatgatacggaaaagaaagctctctctgtggtttgccttaaaggactgagagagatgagcaacttggctgggtgcagtggctcacacctgtaatcccagcactttgggaggccgaggcaggcagatcacttgagctcaggaattcaagaccagcctggccaacatggtaaaaccccgtctttactcaaagtacaaaaattagccgggtgtggtggtggctgcctgtagtcccagctacttgggaggctgaggcaagagaatcacttgaacccgagaggtggaggttgcgggagccaagattgcgccactgcactccagcctgggtgacagcgcaagactccatctccaaaaaaaagatgaataacttgcctaaagacacacaactagtaagtgtagagtctggttttgaacactcagcccagatctttctgctttcctgaccatgcgtccagaaacatgttcccaccaagaaatttttgtcttctggaccctttccaagatgtaactctaactacctggacattctgaattctgcttctgggtagttggtaggacaggtaaacagcattcttggagccaacagacaccagccatgcaaataccctctttctgtggacaggatagttttacttaagataaatgcttccactcaccagttttcttcaattctatctcctttctgaccatctctgtgcttgggaaagtagctcttatcaaacacaggagaactgatcatattgctgtttatttaaaatccggtgtaatgtggaatttttgcaatgtttcaggatccatatgacttaaataagattttaaaaataaattagctgagcatggtgttgcacacctgtggtcctagctacttgggaagctgaggtaggaggattgcttgagcatggaaggtggaggttgcagtgagctgagatcacaccactgcactccagtctgggcaacagagggagaccctgtctggaaaaaaaataaaatatgttttctgtttttttttgttttgagacagagcctcgctctgtcactcaggctggagttcagtggcataatctgggcttactgtaacctccacctcctgggttcaagcgattctcctgcttcagcctcccaagtagctgggactacaggcatgcggcaccacacccagctaatttttgtacttttggtagagatggggtttcaccttgttggccaggctggtctcaaactcctgatcgcaggtgatctgcctgcctcagcctcccaaagtactgggattacaggcatgagtcaccacgcctggccaaaaaaagttatttacataaattcaaacaataacagaagtacataaagtaaaaagaaatagtcttttcttccttacttcttatccaatccactgttaatagtatgatgtatctttttagactttgttctttatgtatacttatatgcacgtgtgaatgtttgaatgtgtgtgtatgttttatactatatattctctgaaacttgccttttacatttaacattagattttggacatctttccaaatcagtgcatttagatttatctttatttttagaatgcagttgcatagtatttcatcaaatactgggccataggatgtatgtatgtattttaaaaaacaagatgtttttagcaaaagacaacagatatttttgtgggtgcatctggttttaggcctgaggctaaatgactttcagcaaattattcatctttgagcctcagtttccttatctataaaatgaggatagaaataccttatgtatctgctgagcatggtggctcatgcctgtaatcccagcactttcagaggccgaggggggggcggatcacgaggtcaggagatcgagtccatcctggctaacatggtgaaaccctgtctctactaaaaatacaaaaaaaaaaaaaaacaaattagcagggtgtggtggcgggcacctgtagtcccagctactcgggaggctgaggcagaatggcatgaacctgggaggcagagtttgcagtgagccgagatcgtgccactgcactccagcctggggaacagtgtgagactctatctcaaataaataaataaataaataaataccttatgtatcagaacatgtcaaaaaaggcaaaaaataaaaaagagaaaagaattttacattgtattctctaaaaaaaaaaaaaaaaaagaaataccttatgtagttgtgaagatttaaattcattcattaatttagcaaacattttttgagggccttctgtgtagtattggctagtgtatttgatggtattgtataaactgagaagcctatatatggaagttcaccatgagaacactacagaaagagaatactacaggatgtgtgcctctctttgtctcttcttgctcatcttagtgatatctctgagtctctgcttgataagtgcctctataccaaccgctctcctcatcctgacatcttgatacggacttctggagaagtgcggctgagtgacttcttgctatggcaggtaggtcatttccaagtactattatgtttgtgtcatggggaaaccaactgtatccacagaatggatcagagtggtccatccccactcccaaacaggctggggccagagtacttctggggaaagctaaaatctggagaagcatctctaggctgtgtctcataatatttgatgtccattcctcatctgtcgctggctttgcgaatccaactatagtgaaaacttcattgtgccgcttttcaaggaatgggacttctgtcttgcatccctgagcgtaagctcttgccttggtaacctgccagggaccctagcccctctgggttggaagcttgccttgcagttactagtccctccccttcaggataaagggccatacctatgcaagcatggtaaacaatatgcaaacactcaagtctctatcccctgttaacttggtccctggagagcacataactaggggaagtccttgttctgggagagactccatttggaagcagctcacatgataaagctccagaaattttaatggaccacaatcttaaaagtgagctaacgcagggcgtggtggctcacgcctgtaatcctagcactttgggaggctgaggcaggcagatcacttgaggtcaggagtttgagaccagtccagccaacatggtgaacccctgtctctactaaaaatacagaaattagcctggcatggtggcaggtgcctgtagtcccagctacttaggtgaatgaggtgggagaatcacttgaacctaggaggcagaggttgcagtgaggcgagatcgtgccactgcactccagcctgggcaacagagtgagactctgtcgcaaaaaaaaaaaaaaaaaaagaaaagaaataagtacaatgtgcacctattggttctgtggcccactgtgctgctcagatcacgtttgggaagtttactgatgggctgaattttaagagactacagagtcagttactcagtgtacagaattagttacattgacaaacttgaggacttactggaagaggccaaactggaaagcaaggaatctcatgtcttacaaaaaatgaggaaaggatagtggtctgcaaaagggaaataagtgacaatgtattcccttggaaaaaagtgttgagttccttctttatgctggaaatatggcagtgagtgagtcagaaatgatccctactgtcttgaaacttatagtttgctagcaaagacaaactctgaacaagtcattacaactttgggaactgataacaggcagctctaatctagccttgaaatacttgaaagaatgtcactttgaagaagaaacaaacttgttccagaaaaaatacctgggaccttagtagaagttgtagggaaggtgacattggtttagcataaaaagccaaacaggctatcggacaactagttatcccccatgaggtactgaattcctcaccactagagatatcaggcagtggctgtcaagagtgttccaaaggggattcttcatcagtgattattattaaagtacacctggctctttgctatgcatatgttatctcatttaatctaaacagtaccctgaaaattaggtattcctattatccagttttacatttgaggaatctcaggccaggtgaaattacccctgctcaaataaatggtaaatggttggagccaaaattcaaagccaggcagtctggctccagagctcatgctctcaaccactgtgccctgctgctggtacttaaaaataacaatggcagctaccatttgttcattggtgacctttatcagacagtatgtcttccagatgccctctaagggccaagagccaataacataatccagatgttatttcatagtcctaaaattggctcttagaaaaatcctggtggaaatgttgatctagtctcgttttagttctgctttaccacaggcaggtgatctggctgcctcaagtgacgcctccccctactagtgaatgaatcagggccagcagcagctgcagctacagctcaggatgcctgtaacattgtcatctctgggcttctgggtcctgcttagcctgctttttccctggaggactgaccagggatgcggcccagcaacatgttactaaatcatactctcctccctacctttcccagacctctcactcctgcctggtgttccaacccgttctgtggccagagtatacattttggaacctcttcgaggccatcctgcagttccagatgaaccatagcgtgcttcaggtaagaaagagttcagggctggccagatgggatgggatggaagaaaagattagcattgattgacaaccaccttactatataccaggcacttcctaataagatgatgataatgatgatagtagctaccacctactgagtatctactacttgtcaggcactgcgaacattttacatgctgcaactcatttaatgttcccaagaacccaatgagggaagtcttattagcccctcccttatgtaagtaagcaaacagaaatgatttagttaaggacacataatcagtaagaggtaggaataggatttgagctacaggtcttttatcttttaaagactcaggaggaaaaggcttctcagagaaactggccattattcctttaaagtattaccctaataaaagatcgtagcagtagggattaagaactaaatagcattgtctttccattgtgtaaacctatgttgtgtcaagacttgaagtttgactttcagttttcatcaccaaatcttgaaacaggttttattagcagtcacctgtatatgattaggtctctttataataatggtagtggtagctaacatatgaggatctacgagggcacttaggtgatttcatgtaagttttcttatttaacctaacaacccagcagttttggtgtcctcatttttcatatatggaaccagaggggcagagagacttaagtaactgtcccaaggaacctgaattttatctttatttatttatttattttgagatggggttttgctcttgttgcccaggccggagtgcagtggtgcgatctgggctcactgcaacctccccctcctgggtttgaacgattctcctgtctcagcctcccaactagctgggattacaggcacacgccaccatgcctggctaatttttgtattttcagtagagacagtgtttcaccatgttggccaggctggtcttgaactcctgacctcaggtgatccgcccaccttggcctcccaaagtgctgggattacaggcgtgaagagcctgaattttaaaatcaaagctggtgctgcttcttcagtctggagagataatgccaggaggaaataatgatgtgagtcagggattcttaatctccttggtattggggtccctttgaataatctaatgaaagccacagaccatctccctagaaaaatcgcagatcactcaaatgtggaattttgcatagaattgtaaacttatcatggaaacacatagaatactttttttttttttttttttgagacggagtttcgctcttgcggcccaggctggagtgcaatggcgcaatctcggctcaccgaaacctccgcctcccgggttcaagtgattctcctgcctcaccctcccgagtagctgggattacaggcatgcgccaccaatcccaactaattttgtatttttaatagagatggggtttctccatgttggtcaggctggtcttgaactctttacctcaggtgatccgcccgccttggcttcccaaagtgatgggattacaggcatgagccaccaagcccggccacacatagaatactttaagggggttcacataactgctgaaatctgcccctgaatcccaagtccataactcctgctataagtaaatcaaatcacaaagacttgatcatgtatttaattacttagtctcagaatatgaggaaattaaaagaagtttagaattagtgaaaagaaaaacagcaaaggcacaattatccactgtcagtggggaatgaatatcagatttttccatatgaccaaagctccctctaaaaactaaaactttacccttttttgatggaaaaatttctaaaatgtatcttgtacataattcattgaaatctatataccaggcacttgctaataatgatgatgattaggataatcacgtgctattttttgtttttttttttttttagcagggtctcactctgttgcccaggctggagtgcagttgtgcaactttggcttacttcagcctcccaagtagctaggactatgggcacacaccaccatgcctggctgatttttgttattttttgtagagataagtcctcactatgttgcccaggctggtcttgaactcttaagctcaagtgatcctcctgcttcggcctccccaggtgctaggattatagacatgagccaccatgcctggccgtcatattctaatgattatgataatagtaattatcatctttaaacacttcattgtacaacaatatccttgaggggtagggctgtttgctctaagttagatggtcccagaatacctgggtttgaggtttcatgtatatttttctgtgtcctccctctttcatttcctactgctgtcaacagttaattttgacagtatctctcctcttccatagtatttactgttttaaatcagctatagacaaggaaaccagatagtcaagcttgttggaattatgtatataaaatgagagtgaactggctctgcatgaagcccaaaggagcttggtgcatgagtttttgtgtttttacctctaattgggctgctcagaagtcttttatagtaatttcacgtttctcagatactttgcatatggttgtcagaggagttaactcaagtttcattcattccataagtatttattgagtagtatgaatcaggcactgtattaggcacaggagagtcaacaggtagccagagggacaagatctctacctttgtggaacttgtattcttgaggagacagaaataaacaagtaaacaaatatataagttccgattgtaataaggcagtgaagaatacagagtgatgtgctagaaagtaatgaagagaatgcaaagagactgaggttaaagtttgggtcttggaagaacaaaaaagaggtcaatgtgccaagggagaagggcaggaaatgaggctagagtcagaccttggctcatatagagccttgtaggtcatggtaacaaagctgaaggactttaatcaggggatgacgggatctgagttgcattttgtaaaaatcattcagaattttcaacgggctggagttaaagccaagagacagaactcctgcagtagtccaggtgagagaggatgcgcctcgaggtagggtggtggcagtagggaaggggaggagtgaagacgggataaaaacaaatgttgaaatagaaacaagtgaaactagctatatcaaggtgataatataactccccagagaaaggaattaattcagcttacctgaacacagttctctgctattcatctttagtggaatttcttttcaggataatacaaactgcaacacaaaattaaacattacttaagaggtttattgttagtggcaatgttggtaatgtaattatgaaactcttgtttctttttttttgaaatggagtttcgctcttgttgcccaggctggagtgcaatggcgtgatctcggctcactgcaacctccgcctcccaggttcaagcgattctcctgcctcagcctcccaagtggctgggattacaggcatgtgccaccacatctggctaattttatatttttagtagagatggggtttctccatgttggtcaggctggtctcaaacccccgacctcaggtgatctgcccgcctcggcctcccaaagtgctgggattacaggcgtgaaccaccgcgaccggcctgaaactcttgtttcttgtaggctaaaacaaataagtacaaataataatgttattaggaaccaagacacttaggttgtggccatagcaattggttgtatagttctgctgtttcctgggatggggtggaaggtgtttgaggtcaactattaagtgttccatttttacctatggatcatatttgcaaacttttttttttttttttttttttttgagacggaatctcactctgtcgctggagaacagtggcatgatctcggctcactgcaacctctgcctcccggattcaagcaattctcctgcctcagcctcccatgtagctgggactacaggcacgtgccaccacgcacaactaatttttgtatttttagtagagacagggtttcaccatgttggccaggctggtctcaaaatcctgacctcaggtgatccacccaccttggcctccgaaagtgctaggattacaggcatgagccgctgcgcccggcctatatttgcaaacttttattgagttcttaccacatgtcaggcatccttccagtattgagttcttaccacatgtcaggcatcctttcagtaaattctgtgaactgctttaaggcagatactattattattgcctctgtttttagagcaaggaatccaaagttataatagagatactgattatcttgaagccttctccagcaggagcccttggaggtcctggccaggctttctctaccccagaagcttcaaagctctgtttctagaaatcatatcaccttggcagatgcactaaggggagaatccagactaacagcatcctcaccagtttgttctcagaccagagaggtctttccaggcttttctcatgtctcccttttacagaccctgtatcatggccaaactggactcttcccagttacctgttccatgccctccagtttcctacctgtatgtctgtgctcttgccccatcacccaaattcccattttaaaatctgagctgctctgtctctaggccctgcccaatgtgtccctattctctgcaggaagccagggcaaggggctaggctctggacctagagtagcttactgagaggaaggcagcgggtggatcgtaagggaagcagggacttggctacaagttgtggggagccagaccttggtatctgaatggaccatgacagtctccaggtggtcacctagccagtcttaaaggctggcaaagggagatcttgactatgatgcagtaggacttgtcagcaaagaggcagggacaaatagagaatcaggccagggagggggtgtgcggcagtgcagagcagctgatcctcaatcacaagttgcatggatggtaggtccttgagaggtcactgatggagatgagtaaaaagtgttcacctcatctccaaggatgatattagagagggaaaagacacatgttcccacgaagcttcctgtagtacatttgtcacaatttaaacgggctggattgaacattatatttcttctgctcttcaggttgtcactatcttctcctcaggataaaagcttgagttatgtatgtatgcatatatgtatgcatgtggaaatggggtctcgccatgttgcccaggctggtcttgagcagctgggctcaagcgagcctcccaccttagcctaaaagcttgagttaatgtctcagacattcatgactttgaatattggcactgcctacatagctatatgactgtacagttacttaacccctcagagtatcattttcctcacctgtaaaatgagagaagtagcgtttacagtaatacctaccttgcaggtttgtgatagggattcagtaagctaacacatgtcaagtgctgagtgcagtggctggaacagagttcattttccaagaatggtggccaatattgttccccacatgtgtgtctcttggcctctcctcagactcctctctggaaaagcaccctgcacatcctgtccccagtacaactccccaggcaaggagactctgagggtgcttcagaacatcatgtttctggtaggaggtgcccttctctgcctgagagcagccctcagaaatgcattcctcatgctgctgacctgggctggctggttgcagcttggggaaggacttttcattggctaatgttttgaagccaaggacctgcagcctctctccaggtgccaacagagtggtagaggacttttagatttaagtactggagggactattacatcttgttctctgattctaccaaggagagaataagagcagagagggataatgcccaggaggaatttagattcataggttagaaccacatttctcaaagtgagcttcttggagcccttgcaccaagattggataaggtctgtacaaaaagtctctaaggaaagaattaacgccctcacttaccctgattggtcattatacaaggatagtagacaaatggtcagggagagaaaagttgacctctaggacttctgttagcttggatttcccaagggtaagtacttgagaagaactggaaacacctctgagattgaaagggtagattcagaccatgtggaagctggatagacaggtatccagatacaggccaccagcttttccacccctagaaagtagagcttatacacaggcacgagatacacttcacattgtcctctcaagaagttatcttagtggagaagccaagggaacttcagccatctcagcctcgctgtcattttctgtaaaatgacgagcagacaccctcccaactctgctatctgaacaatgaactgctaattcctggcagacaggggccaggctctgcctgggctacagcccccattgctggcatgcactctgatgccatctggaagaagcttgcgcctcatgaagtggctttagctagctccatatttcctccctctgttgctgagcgtcccccatcctttctgttctgccagaaacttagactacttagcccagtccacaagtggcggtgatagaacagctaacagttaatagccaagcagtaggctgaaaattcattatctcatttttcctcaaacaacccagtgaggtgggtactcttatcccggttttgcagagtaagagagagccttagagaggtgagggaggccttaggaacttctcaaaccccagtgctccaggtggacttactctggccttaacaggctcttcggttccatgcatctttgctcattactcccactgccagaatattctccctgccccccacacacctcacctctgtttgaatcctcctcattggttaaagggccagctcaaattctgtctgtccatgaaggtcactgctccgtgatgttcatcagccacacttgctttctcctctgaactgcatgacccttaccacatcctattttgcatcgtggcactctgtgtgcatggctgtacaatcagcctgtaagcacctggattgctgggatcgtgtcctgcgcatctccatatcctcaaaaaaaatcctgtatgtagcacccagggagcctcctgaccaaggcctggaagaagcccttccagcaagacggagagctctacggcaactgttcaagcccgaagtcctcatagctccacatgtaattcattgtaatagcagaagagaagtattcttgaatgcctgggattattcaggagccgggggggacagtccagaattctcatttgtcatccttattcatgcagtaaacctttattgctgagagacagcaaatcagttccctgctccatgtctgtctccagcagaaagtacctccctcacagctccattgtgagggtcaagtgaggcaacagatgaagtggttgtgcacatgtaagatattctttaaaccatgaagacagagcagtcaaggtgcttacaggctgattaggacaaaaacatgtatacaagtttatcgtaatacaaggtagaatgtgggaagggtcatcagggtataggataccataggaaaatagagtttctcacacatggaataggtttggcaggaggagctctagtgcaaaggctttgcaggtcagttagactggcaggaacagagaggatcagtgaggcacaggaaagccttggttctgctccaaagggattttccgctcttctgtatcaggagcatcctcactgctctcctgggatcacgtggtcagtcagttgagtgtttcacatgtacagggcaccccaagtgctggagaggaagaagcccagtctctgccctctagtacttgggatgataactgctgccagggagtatgatcaccacctggtgtcagagctggttgcaagaggcttgaaggctctcaaacttccaagggcttattttctaacagaaagagtggattgtgaacactaacacttattctactatgcagaatgcaataagtggcttaagagagttgaacctgcttctcagaatgttcataggggggtcatttgctggaaggatcaggctggtcttcatacaggaggcaagtctggagctctgaaaaatagcctagggagtggggaggatggtaccctcagaggaaaacctggggagatcaaaggaagtgacccaagggacatgtccccgacaagaataggacctttcttgcagcggagaatagacaataacaacttgtaaaattgctgtttctgtctaagagcctgctaatatcctagagaggattttgcatatgttatctctaatccttaaaaccactcttcaaggtaggcacaacccccactttacagatgaagaaatgaggttaggacaggatttgcccaaagacacaaagccagttgatgggggaatcagaagtcagacccacatttgtttggttccaagagcatgagaaaaactttaagaagtacagacgcttccacacaaaacaaaccaagatggacccagaattgccactgccctgcctgtacaacatgagcaccacccactgcatacctactcccaagccttttcaaatctggtacctactttccactgttccacttcacttggcccaccctgtgccccaccccctacctcctccatcccagtttcacccactcctaaaaatgatctccccaccccaatccccacttttctctagcagaaggcccgagacatgtatgcagaggagcggaagaggcagcagctggagagggaccaggctacagtgacagagcagctgctgcgagaggggctccaagccagtggggacgcccagctccgaaggacacgcttgcacaaactctcggccagacgggaagagcgagtccaaggcttcctgcaggccttggaactcaagcgagctgactggctggcccgtctgggcactgcatcagcctgaatgaggctggccacctgccactttgccctgccctctgcctccagggctccactccccttccttttcttggtgaaaggcacctcctttcctgataatgaatggtgttccctttgcttggctggggagccccccaggccaggtttgctggccatagatacctttgggctgcctgggacaggctcctgaggaggattgagggtgaaagtctcccacgagtacactaaacctaggtctggtcaccaatagggtttggagagcaaagggccacaactcatcagctgcctgtctcttagatgcactttctttttccaccagcacatccttcaacacacagaatttcagggaagagttctccccaaaaccctagctctttacccttccattttagccttccacccagcttccacaaaagatttggctctaccttggatctgctagtaaataactaataggcaggcagttatttgggtaaggaaaaaaggggtgggagagacagaaaatttgcccatctgctgctcctcccccttggctctccacctgggatttgctattgaatctctaccctctcccaccacacagtactgattgctcactgaaagactcagcacccccaatggtgcgcggaagccaggcgggcgattacaatccaattacctattgtcgactcagcccacacaagcttttctcctcctcttgcagggcatggggccaggctccactcccaaatgagactggccccctccatggttcagggtaacagaagggcctgtaggccctggtgaactgaatccagcacaggcctcccctgtaacacaacaggactgagcagaaccaaacacttcttccaactgactctgctccctgccctcaccatctcaaactctgattcccactccactcttcgaggtttctctcagctttttgacctggctccctaagtaggccctagatgatttattcttggcatggcaaagcttgttctaggtcctctgcttgtgagggtcaaagctgtgtcctttcccttacctccctctgccaggacttgctgcagagctgctgagaggattagtgcctttgaagagctgtctgcctgagcaactctatttcaggtgccccacaccggcaagtaccagccagcaacaccaaccaaatgctactctctttaaagtccattttccttcttctttttttttttttttttggagacagcatctcaccctgtcctggctggtctcgaactcctgacctcaggtgatccgccggcctcaccctcccaaagtgctgggattacaggcatgagccaccatgccagacttcccattttactttctgcaagctgtttccctagcagctccctctaggggagaggtgaaatcttgcaagttgtagcaagagcacacaggaaacccctaactttcctataccccacccgcctcttcccctttctgtcccgggatacctggcggcaagagacttcttggctattgtccatgctcccagaatcaagcataaatgccagacacggcgattgagaagccaatcagtgaaccctttggcaaagcccccatccacacctggcactcccctctaccaatccctggcacagggttcctggagagcaggtgctgtacattttacagctttacaatggggctgttgacagccataattagggaggcatgaattatgcggctataatgcagagccctacaattaaggcgggaatgaggggctggaggcagcaaacggaatctgccctatgagcgtggctgttgagtcctgtctcctgggtctgactttccgtaatatgattggggtacagtagaggtgattaatggggctggcatctctctttggcctgaggttctgtattctgggaaaggtacacagggtggagtagggagaagctgccccaggaggcgatgtagtggtggaaagaagaggcagagaggtcgtcgtcgtcgcccagcagcaagggctgcaaaatagtagaactcgtggttgctttggacaggtgtgatttgtgcaagccaggttcaacccttgcctcaagaaatcagatgggaccaatttagtgtccttccacctgtgagccaagcccccatttgaggacatctatcgtattcttgtgtgctgggtctcaaatagaatttttaaagattcttagatgtaaaa

SEQ ID NO: 1170 - DNA, 16439 bp, Homo sapiens
gtggactctgagaagcccaggcagttgaggacaggagagagaaggctgcagacccagagggagggaggacagggagtcggaaggaggaggacagaggagggcacagagacgcagagcaagggcggcaaggaggagaccctggtgggaggaagacactctggagagagagggggctgggcagagatgaagttccaggggcccctggcctgcctcctgctggccctctgcctgggcagtggggaggctggccccctgcagagcggagaggaaagcactgggacaaatattggggaggcccttggacatggcctgggagacgccctgagcgaaggggtgggaaaggccattggcaaagaggccggaggggcagctggctctaaagtcagtgaggcccttggccaagggaccagagaagcagttggcactggagtcaggcaggttccaggctttggcgtagcagatgctttgggcaacagggtcggggaagcagcccatgctctgggaaacactgggcacgagattggcagacaggcagaagatgtcattcgacacggagcagatgctgtccgcggctcctggcagggggtgcctggccacaatggtgcttgggtgagtggctgtggggctgcatgtggaaatgggaggctgtgggctgctgggctgagattcttgggaaacggttgaaaggatggatggatctcttacttgcaggcttctggggcagcttccttctatgttctgcccccctcctatgccaccctggagtccctctgcctgtctctctcctggtctctttatgatttgccctggctcttctctaccagggtcagagatggtcccactaagtgcaggtatgttgttcttgcaggaaacttctggaggccatggcatctttggctctcaaggtggccttggaggccagggccagggcaatcctggaggtctggggactccgtgggtccacggataccccggaaactcagcaggcagctttggaatgaatcctcagggagctccctggggtcaaggaggcaatggagggccaccaaactttgggaccaacactcaggtaaagtcacccccagacctgctacctgccacctccctccctccaagcccacatgctccgcgtgcctccctggtccctctggatcctactctcagtctcaccctctctgcagggagctgtggcccagcctggctatggttcagtgagagccagcaaccagaatgaaggggtaagaggaaggggctgggaacaaatgaagaagccactgggtgcaggctacagagagctggggaaagacaaagaggaaagcaagatgggggagtggagggattggggtgagaggaagagatggggctgggcgaggtggctcacacctgtaatcccagcactttgggaggccaaggcacgtggatcacctgaggtcaggagttcaagaccagcctggtcaacatggtgaaaccctgtcttcactaaaaatacaaaaatcagccggtcatagtggcatgcgcctgtaattgcagccacttgggaggcggaggcaggagaatcacttgaacctgggagatggaggttgcagtgagccgagatcgcatcactgcactccagcctgagcaacagagtgagaccctgtctcaaaaaaaaaaaaaaaaaaaaaaggaggaagagacgggcctgggcctggggaggaggcagatgggaaggggaggtgggagaaacacattaggagaaaggaagccaagccccaaagaatgggagaggcctggcctgtgtccatggccgaggccaacgtctccaaactcaccgtccccaaactcaccatccctttccctcgacagtgcacgaatcccccaccatctggctcaggtggaggctccagcaactctggggtgagtggagaggggcaacccaggagttgtgcaccaggaggaaatggagaagttctgctccccttagactgggcatcatggaatatggcctgggtggagagggagggaggaggggcccgtcttggtgctctgtctttaatcccagccctgctcccttcctgcccctcagggaggcagcggctcacagtcgggcagcagtggcagtggcagcaatggtgacaacaacaatggcagcagcagtggtggcagcagcagtggcagcagcagtggcggcagcagtggcggcagcagtggtggcagcagtggcaacagtggtggcagcagaggtgacagcggcagtgagtcctcctgggtgagtttggcacctctgtggaaggctgagatggggtgaggccctagtggtccctgccgggagagggctccaagtttctctgaaagctgccgctgcccgaggatgggcggcctcgctgatagtcgtcaccctgaggctccctcagcctcctgttccccacccatgctgtgcccctgatgcgcgcactatcgtttctgccagagccaccccactgcttctgactctgtatccctattttccactctgtgatggtggggacgttatcccgcctgtctaagctcttgcagtcaagtccacttggcaagtctcaggagaccgtggggtggcggagaaagagggggacatgggagaatatgacacttgtctgggaagctcccaggagaatgggggcaggactgtgatccgggagacctacggacgctgacagagcgacggtgcagacgacattcacacatggggcccctgcacgatgggtgtgagggcaggaaggggcgctgtgaccccgcagctgccaccccagggccccgggcctcactgactccagagccggcagtctctccagcctcctggtcaatggcctgtccaaccccttggctgacggcctctcccatcccgtgtcttggagtcgagctggagagggagccacatctggcttcctcgggggtcgggaaaagtgtcagacaggaggaggtgcgtggacacaataagccgaataacctgagctgctctcatgcgccgctccccgtatgatcctcctctcccccatctagggcagttctgggaatggtgaccaaggcagctacggccgctcccaggtgagggctctagggtcccttccacttgctgccccctggtggcaggatcgcggctactgcgcggccgggctccaggggttcccacccccggcctgcggtgggcagcagctcaggttctccaaatcattgcgtagttccgaataccctcggccacacctggccttctccatgctcggaataacttcctgcagcgaccaacaggctaaagagggggaaggtctggaggttggaaagaggactggaatctgattggggttccaacaaatctgtaacaccgctgggaacgactgggtcccctttaggtcctttaggacagcgtttgaaatcttgctttcccctgcagggatccagcaccggctcctcctccggcaaccacggtgggagcggcggaggaaatggacataaacccggggtgagtggctggcgtgaatctcccaccaaccgcgggaaggaaaaggagagcagctggtttcactcgcaggatcggggagccaaggctccgcggagatggggctggatggccgcggaggtggagcggaagcggctcgccccagggttaaaatgctgccattttggggctgggactggtctgggaggggactgagggaaagtctcccctttctctccccggcagtgtgaaaagccagggaatgaagcccgcgggagcggggaatctgggattcaggtgagagccaaagtctcttaagtctcctggggactgcagttcctgcccaggactgtgcccactcctcctaactcaactctgctcaaccccctcctgccttgtctgcagggaactgactatttcggcagaagaaaccaaatgcactcctaaaaatgctaacgatttccaaagtactaattaattgcaaatcttgctgtgatatacctcaccttataccacagatggggctgggagaaattccatgtaaaccggtccttttagaagcacaattgtcttaaatgtcctctatccagccggggaacagactgtggtgaactctgggggattcagagtgctttggaaaaacattccccccagttatgctggaaatgtgggctttatgtcagcacctgtggtgctgagagttagtgtcacggagatcttgtgaaagtgcaggttgctctaacagggctgggtggggctgagcctgttagccgcgttgctaacaagctcctgggtgaggcgttggtgggaaaggacccacgtggccaggggcaaggccagaccggaggtgctggggctgagtagagacatctctttttagataatctatgagggatactaaccttttatgggaacaaactggtttttttaaaaaaaaatttcttcccatttgtaaccctctttctagtttgtgtttttttcctttttgagatggagtcccgctctgttacccaggctggagggcagtggtgcgatctgagctcactggaaactccacctcctgggttcaagcgattctcttacctcagcctcccgagtagctgggattacagacgccagccaccacctctggctaatttttttttgtatttttagtagagatggggtttcaccatgttggccaggctggtctcaaactcctgatctcaggtgatctgtccgcctctgcctctcaaagtgctgggattacaggcatgagctactgcactcggacttttctagttttttaatatacctcagttttaagtatataagtagtcaaaaagcagccatcttttcctctatggtttttgctcttggtgtaccgctttaaggtaattttcttctagcactatgcatactcctgcaatttcactttttcagtttaactgggatgcatctggactttgttttcctatatgctgtctagtcccacccctccatctaaccagacttaccctacgctttgtatccgagctgtgtcctcctttatgaggggaaaactggttaaaaacagagaggaggaaattgatgagctagaactaaaattttcccccaaaatacttcactgatattcccattcccatgtattcaatcacttcaaccactgatttaaaatgcctcttgtaaataccttagtattttggggagtttctgggaattctgtcggacaggactgctttatttatggtagctttagagtatgttactatctacctcttatcttcacttaccatttatcttttccagtgttttcttacctattcttaaactttcattctcctaaaaaaatgtcagtgtttggaccagttccaaaagagagtgccattaggattcttagaggaatcatattaaatcaatacattaattttcgggggtggcctcaggatcttcagcaggggtctgtgtttctttgtctcaccctgcagggcttcagaggacagggagtttccagcaacatgagggtaagaggatggtagatgtggggtcagagactgtgccggtagtaagtggggtagaggtctgttctccaggagcaatactggcagacaggtggtcccacatccctgccaggtctacctgagagctctgggaacgaggaagtactgatgggtctggccatgtttcacagcagataaagcaggactccagaggagcccacctctcccttaagaggggaccagccagtctactctatgccgcctcagcccccactggctctccagctagcatctcctttttttactaatgccaatcagcccagacagggtccttcagtttgaatcaatttagtgtaacagcctggcccactccagctccaaagccaggggagaattcggatgctttgctggcaaagccctccctgatggattttgggcggcttgcagaaatgaacataaacagagatggcgatgttatctatggacatcgtaagtgagcagccacccgacccacaggagcttgaaacgagatctcagggcagatggaacttccccgagagaaggacctctttctcaggcctctgggaagtcctctgtcatgctcatgtctcagtcccccgattcaggaatccctcgccgacaccctgcttccttgccctctcgtccccctgcccgcctgcctccccatcaactcctctccgttttctgtctccctaggaaataagcaaagagggcaatcgcctccttggaggctctggagacaattatagggtgagcctaggggcaggcagggttggctttaggagaagggatggtgaagcatgctaagatcctgggaaaagaaacaaaaatatcagtttcttcttgcaagctgctctgaatctgcgtccagtgaccatcaagagaccaaaacagggttctgggatccccatctccatctttggttcattcattccttccttccttttgatttggatcggagccatgttacttttgtaaggggagaaaacagataaaagtaacagaagaatggtcaaggggatttccatacttagggaggcagtgttgagaaggagaaagtcactgagctttgaggtagaagatgaggtttcgaaagccagctctggccaggcaccagcataactgtaatcccagcactttgggaggctgaggtgtggggatcatttgagcccagaagtttgagaccagcctgagcaacgtaggaagaccctgtctctactttttaaaaagaaaataataggccatgtgcagtggctcacacctgtaatcccaggtagctaggattacatgcctcagcctcccaagtagctgggattacaggcatgtgccaccatgcctgactaattttgtatttttagtagagatggggtttcactatgttggccaggctgttttcaaactcctgacctcaggtgatccacccacctcggcctctcaaagtgctgggattacaggcgtgacccacgatgcccagcctcaaaaaaatttaagatatatattaaaatcaccaccagctctatcatgtcatctgtatatcttcaggcaagtcagctaacctctccgagcctgagcttcctccagtaaaatgaggacagtgaaacctgactcacgcagccttcagttactgtacagctttccatgtcaccaccagaccaaggtgttgtggagtccagactctggagacagatgctgcataaggcatggtgcttggcgtgccgtgggactacacgttagctaatctcatttgcttgaggtgttttggggacagaccaggatggaggcaagagtctgaatattgagattcaggggactgggtggggttccatgggagcaatccattctaagaaagctttcccaagtgaactttttggtgctgtgtaaggaagagaaggcagctttatagagaggaggacaggaagcctggaccgaggtggggatgaagcaatccggggcaggttgacaggtggcaggcatgataggaagcataagccttggacatcggtcccccttttccccacccaggggcaagggtcgagctggggcagtggaggaggtgacgctgttggtggagtcaatactgtggtgagtggaggcaacactccaccttgggctgggaccatggtgtcacacaatcctcgcctcccctcctgccactcagatctcccgactctggctcacaaagtgggttcttctctcatcccatatctccttggttccatagaactctgagacgtctcctgggatgtttaactttgacactttctggaaggtgagttctgcgagatggctctgttcactcgcatttggaaaaccaacccctgcccttggccccacagtctggggtcctctttctaaaccaacagtcagcagtggcccttgacctctctcggccaattaccttatgactcaatttggccattcttctttttgtttcctccatagaattttaaatccaagctgggtttcatcaactgggatgccataaacaaggtaagggctggacatcttcgtcggagagggctatagggaagaaagctaaacctccgctctgtgagctggggaaacagtgatgctggccactgaggaagcatttaggccagtgctaaaaacaaaaactaaacacactgggggtggaggagggaggacagaggagacctgaaaagagggggagaatctggagcagctgagattgaggttgagcagaggggacgggcttctttgctgtttcagcatatagacccgagcaggtcctgaacctcactttcccctttgagatggggaaggttaaggggagagtagattgactcctagagggcacatggaatgaggagtgaggtggagctaagaggccccaagaggaagggcacccagagaaaggaaccagcactggccgagagcctcaggggtgacaggcattagtctctcccgcacaaacaaaaacacagctggggcgcagaacccctccctccttcctccctgcctacccttccgtcttgcaggggaacccctggccaggctgctttgatacctgagtagcacaggcacctctagagtagagggggctggagtggaagggaggggaggaaggacaggtggacaacccatgcagacacacccccggcagaagctgcgattcgtgattggaggatgggtttttgagacactctatttttttttttttttaagaatatgaattaattgtcaaagtttaaacatggagagacttcacataatgatttggatttctggtttctttcaaaaactttggtaacactgggttccatttccatggggtggggttaggctagagctgagaaacagctgctgcttggcccaggtggggggtgttgggaatgggtgggggggtcactccctagtggccagactgtccctacctgtcacagtcattttagccacctgactggcccctgtgagcagtggagtttctggcctttaatgtaaaagagagaagactgggctcaggaaaatctaagtctgaccttttaggaaggagattgaggagacaggagagtacagatgttcccacccagctacagtggattcatgttctctgtttcttttcttttttctttttctttctttctttcttttgttttttttttttttggtgagacggagtctcgctctgtcacccaggttggagtgtagtggttcgatctcagctcaatgcagcctctgcctcctgggttcaaaatgattctcctgcctcagccgctccagtagctgagtttacaggtgcccgccaccacacccgggtaatgtttgtatttttagtagagatgggctttcactatgttggccaggctggtctcgaactcctgacctccagtgatctgcccaccttggcttcccaaaatgttgggattacaggcatgagtcactgcatctggcctctctgtttcacagagaacggtttctggtaggagcaagactctttcctgggtcacagggaacttagggtctgatgggagagccggggcacatacagacacttcccagagagccaggatagacaccctgccagttttgcccatctagggcggcagtcgagggagtgatcgcagtgaggcaggatccatctgggccagctcctcaaggggcagatctcctagaaagcagggcagggcagaggtgggcaggggagagaatggagccccattcttcacagtggggtgagggagctgaggacttcagccagagtgaggagggagcagaggggaacgcagtgtaatgttcctgacgatgcagggggttcttaagcccaagccaggatatctgggtttgtttggatagcagtggtgggcaaaaaggtccctgtaggtttctggagcaggggtctcttatacccttgtgctggctcacaatgccctggaattcctatttctcaagctctctcttagaacctatttctggccaggcgcggtggctcatgcctgtaatcctagcactttgggaggccgaggctggcagatcacttgaggtcaggagtctgaaaccagcctggccaatgtggtgaaaccccatctctactaaaaatacaaaaattagccaggcgtggtggtgtgcgcctgtagtcccagctacttgggaggctgaggcaggagaatcgcttgaacctgggaagcggaggttgcggtgagctgatatcgtgccactgcactccagcctgggcgacagagcgagactccatctcaaaaaaaaaaaaaaaaaaacaaaaaaaaacctgtttctttgcccaggaccagagaagctctcgcatcccgtgacctccagacaaggagccaccagattggatgggagcccccacactccctccttaaaacaccaccctctcatcactaatctcagcccttgcccttgaaataaaccttagctgccccacactcctggcctctgctcctttcttacgtctccgctgttatccagggtggtgtggaaggggtggctgcagccccacagcttcgggaaacgggctggaggaggcccggcaggtggaaaggggacactctgaggcaggtcctagtcttgaggttttgctagaattaggttctgctggaggctggggaacttgggatagaaaacattgtatgctctgggacagggagagttggttagtgcctctctctctccctgtgtttcccaaaatggtttcctggtgtccctaaagactctcagctcctcccatccccaaccttagtcacaatgacattctgaaggttgagatagggcagtagcaggaggaggggtgggtgagtgggcccaggctctctgctaacctgctccccgcctttcatccacagaaccaggtcccgccccccagcacccgagccctcctctacttcagccgactctgggaggtaggagaattcttgctgtttgaagaactgggggcctggccctcctgactctccccaagcctccctcaaggcagccaccctctgctccaaccacctgtttcaaaactccccccctttttttttttgagacagagtctcgctctatcacccaggctgaagtacagtggcactatctcggctcactgcaaactcctgcctcctgggttcacgccattctcctgcctcagcctcccgagtagctgggactacaggcgcctgccaccgtgcccggctaattttttttttgtatttttagtagagacagggtttataccatgttagccaggatagtctcaatctcctgacctcgtgatccacctgcctcggcctcccaaaatgctgggattacaggcgtgagccaccgcgcccagccaactccccctcttcatttttgagacagctcatccaaatcttatcaccaaatcttatcaccaataccatctcaagtgctgacaccctcaatctcccacgtgcttaccttcctccaaccccaagccacacccaaaagctccttcctacccgagatctggaatccccccaatttgctgcatagaccaccccgtgggttctgcctccccggcccactctgccctccttctccctgcaggatttcaaacagaacactcctttcctcaactggaaagcaattattgaggtaaggggggcaggacttctcagctctgggacacagggttcggggccctgggcgagccgctgacccaggtgtctgtcccagtttcttcccctcccttcccactttcccaggctttgtgcaatcccgagtgggggcggggtgagagggagaagccgtgagtcactgaggagcagggtgggaggacctccctagcataaaagccgaggccgagggctggggcctccacaagcacatgaacatgaagccggccactgcctctgctctgctcctgctcctgctgggcctggcctggacccaggggagccacggctgggtgggtaccgcagggtgcacaggtgcggggagatcgtattgaggggaagaaggggcctaggctgcggcatggggaggacagctgaggtggaacgggagggcggtgtgcaggggtcaggtccctgtctagtggaggcagctgctgagggtctgaagacctgggtcagggaggatggggagaacctctgggcggtgccaaagaccacactccaattctgcatggccagtagcctttgagaaacaggacccgtgggcactgagacaaaggctgcctgctcccgtgtctacgtgtgccaagtatatgaggctggacaggtggggccctgcaaagggggaggtcgaggcgctccagctaagtgcagtcatgcatgcatgtgtgaacagggtggcgtgttgtctgatgtttcacgaagaaccaggatgctgatctctaactgtaactaatttaatttttaagtagaccaagcaaaaaatatctggaggcccatggtcaaccagtttgtgacctcagggttagggcttgcagtggggtttaggttcaaggtcaggtatggataaggcagaattaatgctggagtcaggacttcactgtcactctgtgtgtgtgtgtggcagggcggacggtccaagtggagaagccgtgatggcaggaactgaacttcttttcaacgcttagagtttctcctcttgcgctggggctggggggggtgtccggtgcatctgcagtgtcttaagttgctttatctgttttcttgtatttctcttcttttgcttcctgtggtccagagctaacctaagcacgcagcttctgcagataacaacccctccttcaagcaccctgtggggcatggcgtcggtgtgcagggactaagggcctacgggcatagcagcaggacttggtgcaggcagaaggtgggctgggctgcagtgcctgcgtctgccccagaggagcctgcatggctgcagctcacttgttctagctcagtcttaggctggggctgccaactctcccacggcatgggtggggaaggtgttgccaaacctggttctctccctggctcccaatgctgagtgtggatatctgtcttctatctatctgggccatcagctcctccaggctcactgccttctctataggtagcacgtggaaaggggtggggtgagggagaaactggggctctgaaagcccggcaatgcccgcacgactgcggaggcacgaactgtggccccttcttcctttcagggtgcggacgcgtcatcactgcagaaacgtgcaggcagagacgatcaggtgagtctctgtcctcaagttaccctgcagggcccttggtcccccttggccttgctcccgggtctgggcaatctgaaattctctttcactcctccattcaatggctttctcagccgggtgcaggatggcaggaggtggcagctgtaacttccaaggtgagacatctaccatggacccgctgggttacgtcctggcacttcttttcttggtctcctaccctcacctcccaagtaacacttgaagagttggcagaggtcttgagggcaggaggaggagtaggaggaggaggcggcggccatttgggctaggacagtaaaggcaggtgagggtgggggccctggctggctggaggagattgtataaaagaaaacacgtgacacaaggaggggagcaggcaggtgttttaggaaaggtctggtccaggcaggaaggtgggatgtttattccagagcaaaatggccttcgtccgtctgttctaaccgccatgcccacttcttccacagaactacaattacaaccagcatgcgtatcccactgcctatggtgggaagtactcagtcaagacccctgcaaaggtgagaccggcaaccaccctgtcttcccgctgggggctctgcatgagggatggggagagaggctttcactgccggggtcctctcggttggttgccggaggccggatcccgctctctttgagtccaggcctccccacccctttgcaagggagactcgggttccctgagacagtttggaagtggagggcaggagggttcaatgcgcctcacacccacccagtcagaaaaggttaaaaaggagcagcagcagcaacagagaaaactgagaaccaacaccctctccaagaagaatataggctttaaaaaatcatgacacctgcaaaacacgcaagcagctcttcctcacaggttccctctctgtggacctttttttgcgggggaagatggaatggagggcgaggaaagcagactagcacttaggggaggccggcctgtggatgcctggttggcggtgaaatgaatgctttattccacaaaggaaatgaaaagaaaaaatacgtgagaatttggttttattccgttgcaaagaaggcaatctcataacatcagtaaatgaatatgctaagtacaaatttggctgacaaagcaacagcaggctgtgtatttccatctctcatgacaataaagtccccgcccttggggagaggaccttccactgagggacgagaaactacaggctggtgagaggagggacatgcagcttctactgcctgtggcttccactctgctgagttatctgtggcttccactctgccgggttatctgtggtcagtgtctccctacctggcaggccaaagcgaggcctatgctcttttgacccccttggtcagtacgtgcccaggaaccatgttcaatatcatcttggatcaagtgcactcaggatgataaacgtgctgtgaaaccaactccacagcctgaatgtccacagtcagactggaaaaccttggtgatagccctggtgtgagcctgcccttgctgctgggcccttcatgagcgtggaggccatggcagagtacagggaggccatgaccccacatcactttcctttgatctttttgcaggggggagtctcaccttcttcctcggtgagtatgggggcctgatcttcatctggctggagagagaaggggcctgaggccagagggtatggaagggaccctgtggtggccactcagactttctctttttctggcaggcttcccgggtgcaacctggcctgctgcagtgggtgaagttttggtaggtgagtgtcagagtgagccgacccaggccacatcctggcagtggaggcacagtcacccggggcagggccaggatcttggtatatcctcagatctcagtgggcagcgacatgaagtcaggtatgctctgggtgcgtgctctaaaggtgataaggaagaggggacctcatggtggggtgtggagaaagacccataataaagtgatctagggctgggtgcagtggctcatgcctgtaatctctgtgctttgggaggctggggtgggaggatcacttgagtctgggagtttgagaccagactgggcaatatagcaagaccccatctctaaaagaacaaaacaaaacaaaccaaaacaaaacaaaccattccagcctgggaaacatggcaaaaccccgtctactaaaaatacaaaaaattagccaggtgaggtggtgcatgattgtaatcccagctactctggaggctgaggtgggagaatcacctgagcttgggaggttgaggctgctgcgaactgcgattgcaccgctgcactccagcctgggcaatcacagtgagaccttgtctcaaaacaaacaaacaaacaaatgaaaaaccttagccaggcatggtgacacatgcctgtagttctagctacttggaaggcagaggcaggaagatcgcttgagcccaggagttcaaaactgcagtgagctatgatcacaccattgcactccaagtctgggcaacagagggagaccctgtctggaaagaaagagagaaagagagagagagagaaagagggaaagaaagcaagcaagagagaaagaagaaagaaaatgacctaggaccctcggaaagcaccttagggtgggaccacataggcacagctctgagaagatggtgttctagatggagcacagggaccgggatagagatgttacaggggaactgtggagaaaagagcctcctggtggaagggttcagaggtgggacgcagcgaggctgcatgggcgagaggtgatagcttggctcggcagaaccacaaactctgttttaggcggagcaaaagtgaggggcaccacaggcgaacaggtaggacagcaaaagaatggtgggtgcccagacgctgggtgaaaagatgccccgtttccgcaggcttaggagtggccacgtgctaccatttgattttctttcttctaggcaatttcttgcaaccaccaccgaggccccgaaaagcactggtcgtcagggagctcctccccttggcccccagcctgtgccagccctggcccggctgccacacctctgtttcctaggctggggacccagcttgtctctccttgtttcttcccactgcactgtggtgcttcagtggccaccagcctcgtcacatacaccagcatctttctgtacctcctccctttggtgacctgaagtcactgtgacagttctccaggaaggaggagcttcctacttttgagtttctctgtggaaataaaacatgaatcttgtttcccta

SEQ ID NO: 1171 - DNA, 96499 bp, Homo sapiens
gctcctggcaaagactcggtccttctggaatcttgtaacggttctaacagctgggtgcgggtggagctgcgggtgagtcctcggctccggatccatttctctttgttccctaggaccccctcccacagagtccgcctcctcttccccgctctcccagccccctcctttgcctgttaacgtcttcccctacctgcatcctgaccatcatttgctgtgcctgctcctcggctttctgtcttcacgacctccttaggctgtgggcgaagacgtcatgggactggggctctgctgccttcgagtgacgacctgttaacccgtttttcaggcgatcgccagctcgagtgcagattccttgctgtgaccgaggttcagagtgagctctgtcggtgtgtcagtttgcctcttcaggtgattgcacgtctgtgtgcgagtctctccgtgtatgggtggctatgattagggtgagcctcagactggaactcaagtctaagttcattcactgctccagcaggcactcttcaatgaaacctcatcagcagatcgggctctcttcccttgccttgcctcctaacccccctaggccaggtgagggggacagggtactgggaggtaagaaggaactcttctgcaaggagggctctcacgtctgtcttaggcctgctccttaccagagtctttggggaagcagtagggagggcctgagggtctcaggaaaggctctctgctggtctggctctgctctgtagctccatctatttccctgtcccaggtcctttcttcctcctaaccccattgactctgaccatcccctgcccagagcctgaggtcccttctctggcccctctgctgggctggcccatgcaggtgaggccccgcatctggcatcctggaactggcagttggagcctgagctatgggcaaggtcacttcgacagcagttgaatgcccagctcctcatggtcccggaggagaggagggtaggtttgtcttctgatgagacatcatctgattcccttaagtcttggcactccatatgtgtcttggacagcaaagaacagcccttggcctgccagcagaaacagaggcagttcgtgaagccagtgactgagtcagagcagcccacagtgctggaactcctgctagctgagctccgaactctgttctcagctgtgttgcaggacagtagccctgcagcttggcgctatcttcatgcagtactgggtctactgcctccatatcgtgagttgctagttggccaccttgatttgctgcccttcctggagcagctgtactgctgggcaccctgggtccaaacccacctccatctggacctgctaggtgccattgtccaggcctttcctccagacagctctttgttagacagtgcttcccatgctgactgctgtccccagaagcggaggctccatcacaggcccccatgcccagcttgcccttttgtgcaggcccagtggagcaggcagcaagtaaaggaggagctggccacctggctgcgaccattgacactgcctgagctacagcgctgcctgggcattgttggtgctcaggtggccctagaagaggctgtgtggctggatggacttagtctccttcccttggcactggcagcggacatccctgtacggtatgaaagcagtgacactgacaatgcagaggtggagcctgttggaagaaaagagaccaggtaagtgagggactcagtctagggcttgagcagaggagaaaaagttgctgttttatgggtgcctctggggtcacttggaagtttagatccagctctctgtttatcacagggattagcccaactccacacaaagctagtgtgaggctactttcctcttcctttttctctgcaaaataaacccagtggtgttagtcttaatccccatagagaaatacagaaattaatgaaaatcagaagtcagctatgaggcagccaaagctttagaataacagcttgacttttcagtttccaggtttttttcttagatgatgtcagaagtctccttaattatttttctataattcattcataatcactgaacattgcctgggcctactgtgagttgattcctggatgttgggtctttccctcaaggtacccctggggaatgtgtgtccgagtgtccttcccacatgtctatgtgacttaaaccggctccaaggcagagtggagttggcagcactactggatagaatttcattttgacccttccagagtcttcttcttgccctgccagtgtgggcactctggccccttgagtgatatatttttcttttgtttctttctttctttctttccttttttgagatagagtctcactctgtcgcccaggctggagtgcaacggcatggtctcggttcaccgcaacctccgcctcccgggttcaagtgattctcctgcctcagcctcctgagtagctgggactacaggcacgtgccaccatactcagctaatttttatatttttagtagagacggagtttcactatgttggccaggctggtctcgaattcctgacctcatgatccgcccacctctgcctcccaaagtgctgggattacaggcgtgagtcactgcgcccggccctattgttttcttttttaaaatatctggctatcagagctctctacaggatttcagaatgcttacagagaccttctcttctcagcgttctctaactttcgatttttttttttttttctgaaacagagtctcactctgtcgcccaggctagagtgcagtggcctgaccttggctcactgcaacctctgcctcacaggttcaagcgattcttttgcctcagcctcccgagtagctgggattacaggctcatgccaccacgctcagctgatttttgtattttcagtagagacagtgtttcgccatgttgaccaggctaggtttccaactcctggtctcaagtgatctgctcacctcggcctcccaaaatgctgggattacaggcataagccaccgtgcccaagagagttttttaactttagttttggaattctccttgtcctctggcctcattttctagacaatgctttgcagctgtctgtggcacatttactgttcgggaagaaggctagttttacctttaattaaggttggcttcctcagtttttgctgtaagtttatggctgggtcaagtctttccattaaagcctaatgttagatagataggcaggctcctggggccctaatgggaggtggccaatgccataaatttatggtggccctattggaatcttttcctttttcaaagagctgccctgtgccttgagtacaagtttcctttcctgggagaacttgactgaattggcatgggctgagatgttgggaagggatcaagttctttgccctccctttgaacctggcagtaaacctctgaggtctagctaatatggcttaatttgcattacgttctcccggagtggtttgccaggcattcattcattcaataagtgttggatagctacatttattaggatctgcaagatgctagggatacagaagtgaatgagacagactcaatcccttcacttgaggtattacagtttagttagggagatatagttaagttgataacaagtaaaatataattacaaattgtaataagtgctataaaacaaaagaatactgtcttttgcctggctgcttctctgcaggtgggagagagagagagagggagtgtagttagggggaaagcatgtggggggagtgttcaagtctagattagattaacaaaaacatcaaacagagtttcaaggaggagggagcagtcagtagtattacatgttaaatgagacaagtaagaagaatgaaaatgttcattggatgtagtaacaaggaagaggttaagttttgtggggaggaagctagattgtggtgcattgaggagtgaatggaagatgaagtggaaatcgcattttacgattttttttgtgaagcttagcttgaagggaaaagacaaatagcagggcagcagcttgaaagaattttggtgtctgggtagggattttttttttttttttgatagagagatgtttatatcccttaacacagtgcttgagaagtaggtgctcaataaatattcgtagactaaatgaataaatagactaaggtaagaagaagagtagattaaaaatatatcatagagaataaggggtccagagcactgatggaggaattaatcttacagagaagaaaggatacctcttcctctgaaatcgggggacagataagtgtgtgggggaaggcaactgaagttgagggaattggctaatggctgaaaacttcagctttctccaggcagagaaggagacagagaatgggatggaactgggagctcagcagggcttgcatggggttagggatagcagtttgagaggcctgaaagaggtagctgtctgaggacttgtgtgaagacatcaggcagaatgagcccacagctgattggacaccaggaacccgtagaggagcaaatgtccttggttttgcgatcttctgaatatactatataatataggactttgctgagaaaatgaacctataagagcaattataccatttaagatgtcctgatccaacacaacagttcatcaaggacatatgtataaaggttataaaccatattgttgatatgaattctagaataggattgcactgttatccctggggaaacttgtgttgatctaagtttgggtcagttaatgatactggtatattctgactggctaagtctaagttaaatcattccagagttttttttgtgtgtgtgctctcaggtctccccaactaaaaattattagtcattcacttttgagttattggtaactaatttccataccaattttgttgaccagaatgcagaagagtaagaggatgagtgtattggtgcaggcttgagggggccaccattggatcttggcaggaaaggaaagaatatgaagctagaggttgggtgatggtaggggaagagcagaaaatgtaacaggcatggagatcattcagggttggaaagcaggtataatggaatcaaagataggatattaaatctgaaaggccaagaaggttgagctgggaggggaaatccagtactgtgggcttacagagcaatgagttgggaaaataaagtcttcccattatttgtacacagtattatgtaatactgacttcatggtaattccaatcaatccagaatgattatttgtttatcagaaagggagaggttgctcacacacatgtttgtgtcaatattgttgcctaactgtgttctatgatacgctatatttgcccagtatgtggtatctttgagtatagatggtagtcaggctcgacaatgccacgtcaggtctcctcaggcacctgatctagtcctcctttcactagccaacagtggcaaggcctccctctaaggtacttgacctttttactctgccttttctctcctgattttctgtcacacaggtctcagcttgactatgaagttcccagggaaaaggccttccaaaagagcagcaccggcttttcacctgagacttccttcctggatagccaggtgatgactgctctgaagatggagagatacctgaagaagatccacttcctctatctcaatgtggctcccagccggtactttaggtgatagcctatgtccaggccccttctcctccccctgcctggtttccttctatgctatcttccccctcctctttctccacgtgcgcacccttctccctgtcctttctccacatactcctcctctgactctagtgtccctctctcttcccttctcctcagcctcctcctcctttccactctctacctccccttcactccctgttgcttacacagccttttgtcttacacatccttttctcacattttgctctttcttttttattctatcctagaatgatagaaacatttgttcacagccttagaagtaaattttatggtgatctattccaactccaatggaagaaacatgtgtttgtttaaatctttacagtgtcaggaaaatttttttccaggtatcttgttccttagactgaatcaaaatctgcattcttttaacttctacctcctggctctagtttatctatggggctataaaaacaggtctcctccttccccatgactcaagagacatttattcacttcctctcattagatccaaatcacacctacttttaaaaatttcttcttattattttgaagcaagggctcactctgtcacccaggctggagtgcagtggcacaatcatggctcactgcagtctcaatctctctggctcaagcaatcctctcacttcagcctcctgagtagctgggattacaggcatgaatcaccacactcggccagttttctaaaatttattttttgtagaatgaggtctcactgtgttgccaggctggtctcaaactcctgggttcaagcctcagcctgccaaattgccagaattacaggcatgagccaccatgcctggctcaaatcctcgcctattttaaaaagccctattcaagtccatctcctcccagaaataattgtaataattgcctttaaccaaactcttcaatatattaggcattgtgctaataaactcatgacatgtgttacttaatcctcatctaccaggtaggtgctattattatttctatatatgagatgagtggactgatacataagagaggttaagtaatttatccaaagctacataataaatggtgtaactaggatttaaacctaggactatcttaatccaaaagttcatgctcttaagcagtatctaatacagcctcccaaataaccttatttcctgtgcacactgatctcttgaacttaggtagcactaatgatcaatatcattcattcatttactgatcaattcatttaataaatgttcactgagagcatcctgctggttattaattgattgcctcttgattctaattctcctcctccctctctgctttgtgatactggggctgagattctgcaaactttttctcttttttcagctggccttctattaggtttgattaatggagagtgctgggagactggacagcaagataagaggggaagggacttgctgcttcgtttgcttgctctttctgccatcattgcctcagcaatggtctttcaccctggcagcagcactttctttttgtcttttttgagacagagtttcactcttgttgtccaggctggagtgtaatggcatgatctcggctcacagcaacctccacctccctggttcaagcgattctcttgcctcagcctctgaagtagctgggattacaggcatgtgtcaccacacctggctaattttgtatttttagtagagacagggtttcatcatgttggtcaggctggtcttgaactcctgacctcaagtgatccacccgcctcagcttcccaaagtgctgggattacaggcatgagccaacgtgcctggcccagccagcactgtctgaatcagcctcttcataaccctgagagataccaacaccagctggtagcccctttccttcagagttctttttgttgttgttctttttttagacagtcttgctctgttgccccagctggagtgcagtggcttgaacagagcttgctgtagcctccaccttctgggctcaagtgatcctcccacctcagcctcccatgtgactgggaccacaggtgcctacaaccatgactggctagtttttaaattttttgtagatatgggatctcactttgttgctcaagctggtctcgaactcctgggctcaagctatcctcccttctcagcctcccaaagtgctgggattacagacgtgagccattgcacccggccccattcagagttctgagtctcaactctgcaaggcccctcctccaacctcatagcttctaataacctgaacctcttccatttgttcctctagttctggagctggttttttatttttatttttattatttttttttaagatggagtctcactctgttgcctaggctggagtgccatggcgatcttggctcactttaatctccgcatctccgcctcccaggttcaagcgattctcctgccacagcctcccaagtagctttgattacaggcacttgctaatatgactggctaatttttgtatttttattagagacggggttttgccacattggccaagctgatctcgaactcctggcttcaagtgatccacccacctcagcctcccaaagtgctgggattacaggcgtgagtcaccgcgcctggcctcgacatctttttaaaaacacattctctttattaaattcactttgttgaaatgcctagtatggtttctgttttactgactggaccctgactaacacggtacttggtattatgagtggtcccaggaaactagcctctaatataggatcttctttggtttggtaatgtccttggcctaaaacagtactgaattccttgctaatgggaaataggatactagtaatccatgacacacagtggcatcacaattaattaaattatcacttgtggttgaatgtgatactgacacctagtggctgctacacttgactgtcatggctgtaatgatagtaatggtaacaatgtgggatggaatgcctacaaaccatagttgggagcttacagaaagcaaatgacaagcttagggctttaaactatcagcatcttttataattagagaagcatctcgatcaaagacagttaggcacataaagagataagaaactattgacaagagaactaaaaaggcaatggatgattacagggccaggatctgccaaagaaggaaacccattgcagtgagttcagcatttggtgctgcttttccccaaacagagggacctctcaattcctctcaatataaaggtagttaaatgtcaattttactatgcattcctgagatactgaaaagaggagccaagctttcaacagactcagggaactaaatgagcaaaagttgcagttcaggtcccataccaaaaaggaggtatatttctggttccactttactcctgtgttgtagccatttggggtctcgacccaaaggctgggggattacatttttgggttctctgatgtgttatacagatattatatttcatatattatccagtttcatatattatccagatagttggcctagtttttctagttgttatcaagtgggaatgttggtccaaatttctagtgcaccatcaatagaactctttcacttgctgtttcattatatttatttatttgccatgtaacagatttttttaatgtgtttgaatttatcaaaattttaattgcattttctccagtgtttgatttacatttaggagagaatttattccttcacctcctttattctttgagtctttgctcagctgtcactcccccacccttaccaccccatttaaaattgcacttccttctcccctggcaccgccaatctccctttgcctgttctttttcccccttcctgttgttaattacgtttatcatcttctctagtagaatgagagctccatcagggaggggtttgggtttgttgtgtttaatgatgtatcctcagggcttagaacagtctggcatagagtagatactcagtaatattcgttgaatgaatgagtgaactaattgcccagattagggacagatttggtgggggtagatattgagtttagtacagaacttgctgagtttcaggtgcaagcaagatggagtttgagatgttttggaaacagctgaatctttggttctgggactcaggaagatactgatttcccccatctactctctagtatcatgtcatactccagttgattctgagccctttgaggacaaggactatgtagaagtcatctttatgtccccatctctgaccacaatacttgaacagagggacaacttgataaacggtttaactaagttccataaagtcagggactggatttttcttgaacactgctgtatcctcagtggcttacacactgcttgccttaataagcatttgtagaatgagtgaatatcctccaaaggatattcagcaaaatgcacctatatcccacattaaatgcaatacatatggattgatataataggtgtatctagttacagtaggccagttagcataatgctatgtttagatacatttaataaagcatttatttttatttttcagttttctttatataactcagagctagcaatatttttaagcattacatatatatttggagtatattttatactccaaaggagtagtggccattgggaatgagaagagtactgtataactcctggccctacacagaaacagcagcctccattaagtaggtcataggaaaaggaaatatctcttgggaagagccagggctcagttaacataggcagctacactgtgggaagctaaatggcccactgattaaaggagggggcatgagtcaggtaactttggttttaaatcctgtattcttcccttaactgtcttgggcaaagctttaacttctctttgtttcagttttcctatctgtaatttggggatatgagtactatacttaagaaactttagtaactttgtcaaaaacaaaacaaggtttttgtatgacttgacttagtgtgtccattctggtatctatctaaaagttcttaagtcacttgcttaacaatgttttctagaaagttgagagagatgagagatagaggagagctattttatctcttagacattataggacttaggatacagcttttaaattgctaaaaatatatgtaatgcttaaaaatattgctagctctgagttatataaagaaaactgaaaaataaaaattaataaatgctttattaaatgtatctaaacatagcattatgctaactggcctactgtaactagatacacctattatatcaatctatatatattgcatttaatgtgggatataggtgcattttgctgaagtaagagaacccaagaccaactaagattttaagatggctctgaaggtacttgtctagtacattaggttgcaattttcctctttatttgcctgtttcgaattttctagtcttcctctgcttttctccaatctcagtttttccatcaaataacattctgattgtctctgcatgtctttcagtacccaagtatatgtgtattttatcatgtctagaatgaggatttttcacatttcatcatctctaaaattgtgatgcatcttacaaattgatggaatatcttattagaagcatttttatcttagcatttcataagataatgctgcagcttacggtggacagtgtcttagatctgatgggatgtaagatatctgcatttgaagatatgaacttcttggagctggctaggtgcctttttctttcttcccatctacctttggcttcggtttcttcttaataatatttgtttcatctttctagtttaaaaatcattctgctctctttgcccctttttctcctttcttctgcctgccttcctgttcccctttttcatctcctgtatcctcctttggtctcttaaagtctgaccacgttcccagggccttcactgatcagagctctttttttaaaggccttacagcctgatggtggtgccacccgacaaggtgaatcccgagcactacatcttctctccctttgggatcttgcatgtacatcctgtggaaggtagcgagacgatgacactgggtacctggcaccatcactgtgttctctggcagcagctccagttcattccattctttaagtattgcctcttacgcaagtcctttacctggtaggtaatgacggatatgtgatttggggggaaatggatgacagcaacagtatattatcactgacctctaatttctagttggaagaagaatgtgagattacaggggctgcatcgactccagaaattcctagagaatcatctgctcttggctgtgccccactttggagctgggctactccatattagcaggtgaggtattaaaaacacaacttcattgagtttttaaaaattagttttactaaaggtaatagtatgtttgttgtagaaaatctgaaagatacaaaaaagcactaagaaaaaacctttaatcctaccaaccactatgaacattttgttgcatatctttctagtcttttttctatcacatacacaaaatgtgatcataccttacatactgttaaataaccagttttttctttgaacatatattctgaactagattatattctatttcatgaatagaatatattctctatggagaatatatgcaatattctccaggtaattatatatcttaaaccacttgcactcacgtaattatgtgtaatgtcagatctgggggtctaattcagttgtttgaatccaaactctgtgttctttccaagatattacttggattctatttttcttttttttggaaaaggttggttattcctattttcagtatttccttgctttccctacatgactcctcagctactcttaggtatattctgtgacaggagttgcaaattcagttgcctaaagggcctaagcaggaagtattgaaggaatgcagtggtttaggtggaagacattagggagcatgggaactgcaatctggagactgcatctaaagaggatagtcactactcagttccaactaattactaattgttgctgtttgggaatataggtccagtgtgatcagctaccttacatttcaggatttcctagaaatccacattttgttatgaaatttctcacttttaactcaaatttcaaccaaattttaactcaaaagaatttttttttttttaaatggagtttcactcttgtcgcccaggctggagtacaatggcgcgatttcggctcactgcaacctcctcctcctgggttcaagcaattctcctgcctcagcctcctgagtagctgggattacaggcatgcaccaccacacccggctaattttttttatttttagtagagataaggtttcgccatgttggccaggctggtcttgaactcctgacctcaggtgatccacccacctcgacctcccaaagtgctgggattacaggcgtgagccaccacaccagaccttcaaatttttattaaaacactgtatgctagccaactcttagtgactcattttgaaaaacttttccatctgaatttaacccagtttgtaacttctgctctagggagtttcatcctccagtctggcctaatcatcatggtgtaattaagagcataagggcttgggagacgggacaaatcttatttagaccttgagtactagcaagggactttagtatttgagcctcagtttcctgatcttcaaactcggataaagatttctagatttaattctgtaatgagaattaaacgacactgtgaatacaaagtgccacattcagtacctctcagtagacactgaataaatgatgcccattgtgaccatcctgtctgattattaggagtctttatccttttcaaggatgtttacagttgtggagttctctggggcttgggaggtatggataacaggattgggcttcctcagggatgggcagcccacagagaagttccagtttcatcacatttgatcctaaaacttacctgtccacctagacttttaggacctttagctttctctattccaaggaagaagcctctgctgtctctccttctaagtcagaccttggtatctatttgaccctctcttctagcagagagatcactaggtataagcacttgcacataccccaagccttttctcagcttgtatagctgagaaagcagctttatgggcttatactctttcagagaactctcgagagggagctgtcactattggtcactgttggtaatattacaatctctataaatatttgtgcagtctgaggtaagctaggctgagaagaggtcaaaggtatccaaggaaggattgggatgccagctctgaccagcttagtccttgattctaggcttctgcaggagctacactctgtgtcctggctaccccaggaactggatcggtgctatgagctgctggacctgcagacggctctagccgaggagaagcataaggctctacggctgctccatcgttgcctaaacctctgcacatccattcttcgactggtaagaggctcttagtttattgtggacctcttccccaagttgagctccccagagtttcagcctcctcttagttaagtttctcctggaatccactgtatgacctggactctacagttgaatcagagccattttcctgcccagcaacagcagtttctgctctaggatggatgaatcaataacaggtgtgcagaggcttgaactagacctttccctaagggttgatcttgacctaggagcagggaggagaaggaatgtatcaatgtctattttgtctgttgtttatgctgacctttgggaattagggaatttgagaacaggaatcctggtcttttatgctgctgagcttatttttgaacctatcttgaacctttggaaggccactgtagttagtggaaggatgcaatgatggagtccttcttaattatgcatatgttgcatctgtgatgcacaacccctgcctagagttctgggaggccctcctgtgtactgacctcttgcccatggtctattatcatggtttgttgtcaggtggggctggatattcacacaggactgtggctaattaccatgtgtagatagtccggttctgagagaggaggcccactcagattttgtgaaaataactaattaatgtgaaggaggcataccttgcctggcttgagccaggttttgggttctacatgttgctctaaactccatcagaggaggttaatcacaaaggacagaactctgaagtctcaaaaatggcctcaactgcaaggaatttcttttctttttctttctttttttttttttttttttttttttttgagacggagtctcgctctgtcacccaggctggagtgcagtggcgggatctcggctcactgcaagctctgccttccgggttcacgccattctcctgcctcagcctcccaagtagctgggactacaggcacccaccaccatgcccggctaattttttttgtatttttagtagagatggggtttcactgtgttagccaggatggtcttgatctcctgaccttgtgatccgcccacctcggcctcccaaagtgctgggattacaggtgtgaaccaccgcgcctggccgactgcaaggaatttctgttcctaggaggaaccaataacttctgttgattgctctggttgaaatcttaaatatttaaaaatacccgtaataaaacattttcataaaattttaaatagtcaaattccttccccttctaagaattacctgtcctctttatcctactctgttttcctttttctgtcttccttctcacctttaaaaatactatataagttacttactatttttactaatgtctcatgataggttgtaacctccacaagggtagagatctttgttttgttcactgatgtatcccaggaacctagggatattattgaacgtctttacacaaagagcctctgcatttttacgactttgcactgattggactcttcagtgatatcttctttggatgttttagaagagtggctaaaaaaggaaattcatagtctctctttaggaggtttagaggaaaggggccaaaggcattagcaatgtcaagatcctaaagccaaggtgcaggagtgaaaaggaggcagtggcctttagcttccagacaataaatgctggacctgccattgtaccaagctgaatgaggcaggagatgggggtgagctgctccacagcctttctctacctctcagttcctcaatcccacctttaatgttataaaaatagttataactttttgaaattcagtagtcaattttgtatattaaggtataattcatatacagtagacaaattttaactgtaaagttgttgaattttttgcatttgtatttgtattgctatatatttgtatacctggatcacgatagagaacatttccagcaccccagcaagctccctggtgcctctttcattgatacccccgcagaggtaaccagtactctgacctgtgtcaccacaggttaattttgtctcattttgaatttcatgtaactagaattggacagtgtgtgctcctctttgcctgacttttttcactcaacattatgtttgtgagatttatccgtaatgttctaggtagcagtggtttactctttttgtatagctacgtagtatttcactgtatgaatgaccacaatttatatattcattcttctattgtggacatttgggttggttccagttttttactattatgaataacactgctgtgaacattcttgtacatgtcttttggtggacataagcatttatttttttgggatatatatgccaggagtggaactgctagaatagaatatatgtatgttttatactgccaaacagttttccagagtggttgtaccagtttacgtttccatcagtgatgctgatttccagctgcctttcattcttttttttttttgagacggagtctcattctgtcgcccaggctggaatgcaatggtgcaatcttggctcactgcaagctctgcctcccgggttcacaccattctcctgcctcagcctcccaagtagctgggactacaggcacctgccaccacgcccgactaatttttttttgtatttttagtagagacggggtttcatcatgttagccaggatggtctcaatctcctgacctcatgatccacctgcctcagcctcccgaagtactgggattacaggtgtgagtctggctgtgtctcccaggctggagtgcagtggtgtgatctcagctcactgcaacctccacctcctgtgttcaagtgattctcctgcatcagcctcccaagtaactgggattacaggtgtgagccacaacacccagctaatttttatatttttagtggagacagggtttcaccatcttggccaggctggtcttgaactcctgatctcaagtgattcatctgccttggcttcccaaagtgctaggattacaggtgtgagccactgcacctggcctcagttgcctttcattctcaccaacacttattttttttcttttccctccctctctctctcctctccctcctttcctttcctttcctttcctttctccctccttccctcccttctttcctcccttcctccctttttctctccctccctctcttcctccctccctccctctcttccttccttccttctgtgattttgtattttgatataatttcaaacttattagaattgtaaagatagtaagataaactctcacataccctttatatagattgttatttttcccatttcctttatcatttatgctctttttttataaacatgtatacattattttctaaataatttgagagtcaattgaaggcatcagcccccttacccctgtcttagtttgttttctgttgctataatagaataccaaagactgggtaatttataaagaataaaagtttatttggttcatggttctggaggctgggaagtccaagagcatctggcgagagtctcatcccatggtggagggtatcacatactgatgagacatgaatatgagacagagagaggagagaggaaatcaggcaaaactcatcctttttatcaggaatccattcccatgataactaacccactcccatgatcagaacattgatcccttcatgtgagttaagccctcttagctcattgatcccttcatgtgggttgagccctcttaaagaccccatctcttaaaactgttactatggcaattaagtttccaacacattaacttttgggagacacattcaaatcattcaaatcatagcaactcctgtatatgtcagtatgttttttctgtgaatgaggacatttcattttataactatagtacaatgatcaaagattaggaaatttcactctgatacaactctgttatctaatctccaatctttattcaaaatttggcaattgttctaataatgtcctttattactatattttttcgttcttcaggatccaaaccagaattatgtattgaatttagtgctcacttctgtttagtctctcttatatggaacagttcctcagcctttgtgttttccttacttgcttcaaggcatgacaactctgtaatacgattggaacattccaagcctccttccccactccagatgagaccaaaaatagaatttagctgagatcttgctgggtactttccccttctcttttctgcttttttttttactcctgtagaggctcttgtttccctgaagatcattccttcaataaatcacatttctcccaatccctgtctcagggtctgcttctggggaactcaacctaaaagaatatgtattaggccaagctcattcactgttttattcaaatattctatagacacatttttttttttttttttttttttgagtcagggactcactctgtcacccaggctggagtgcagtggcatgattttggcttactgcaacctccacccccttgggctcaagccatcctctcacctcagcctcttgagtaactgggactacagacatgggccaccgtacctggctaatgtttgtatttcttttatagaggcagggttttaccatgttgtccaggctggtctcgaactccaagctcaagtgatcctcccacctcgccctcccaaagtgctgggattataggcatgagccaccacacccagccaagacacaataattttttaacctccattgtctttcagtttctgagaggtatatgttaaatatcccttcctacctacaactatagatttgttcatttctgcttgctgttctttcagtttttgcaacatgtattttaaaatcatattttaaactcattttaaaatacatgttttcactctcttttgttttgtcatagtactctaatcactttttttttttttttttgagatggagtttcattcttgtcgcctaggctggagtgtagtggcgcaatcttggttggctcactgcaacctctgcctccagggttcaagtgattctcctacctcagcctcccgagtagctaggattacaggtgcccaccaccacgcctggctaatttttgtatttttagtagacatagggtttcgcctcattggccaggctggtctcaaacccctgacctcacgtgatccgcccacctcagcctcccaaagtgctgggattacaagtgttagccacctcgccccaccagtactaaccacctttttatgtacaccataaattatgtatttattatgtttgctgtctctctccctcctcctggaggggcaatgacttgagcactcattcactaatatatctctagtgcttactgtagggtatgccatttagtaggtgctcagtaatttttgttgagtgaatgaatgacaagtatgaatttttaaccatatcgttctcccaagcagaataagaaccttagcattatcatactttcctttcccttctctcttcctccctctattcttcccattactcttatattggtatctcctggaatcttcttcaagattgttatgaacattcttgttttataacctactcctttgtcttagtccactcaggcctctataacaaaataccataatctgggtggcttacaaacaacaaacatttattcttggaagctaggaagtccaacatcaaggtgatgacagattcagactctggcaagggctcagtcctcataggtggcaccttctcaccacagaagggactagccagctctctggggccttttaaaaataaaattgacaaataaaaatggaatatattcaaggtgtacaatgtgatgacttgatagatgtatacattgtgtaatgattaccacagtcaaattaattaacacatccatcaccacacaggctgtacattagattcccagaacttgttcatcttataactaaaagtttgaaccctttgaatagaactgtcatatgatccagcaatcccacttctgtgtatatacccaaaggaaatgaaatcagtatctcaaagagatatctatacccccatttttattgcaggattattcacaatagccaagatatagaaacatcgatgtgtccatcaatggatgaatgattaaagaaattgtgatattaatacatatatacaatgaaatattattcagtcacaaaaagaaggaaataatgccattagtgacaacacgtatgaacctggggacattatgctaagtgaaataagccagacaaggaaagacaaatactgtatgatctaggacttcttttttttttttttttttttttttttttttttttaagggcactaatcctattcctgagactggagacctcatgatctaatcacctccccaaagactccacctcataataccgtcaccttatgggttcagatttcaaaatatgaattttggagggacacaaacacacaggccatagcactacttaaaattaacaatatgtctcacaaatttctttgcccatcaaatcttttgtagaatactttatcctcttggattcattttcctctgcatggaatatattaatactattcctaattgttttaagggagaatctgtggatggaaaattttctgagtctttgtatatctaaaaatgtttttatttatcctcaaactttaatgatattctggctaggtatagaattccaagttttttattgttatcattacttttgagacagaatctcactctgttgcccatgcagtggcatgatcagggatcactgcagcctcaacttcccgggctcaggtgatcctcccacctcagcctcccgagtagctgggactacagcagttgataccgccacgcctggctaattttttgtattttttgcagagatcgggtttcaccatgttgcccaggctggtctcaaacttctggacttaagtgatccaccctccttggtcttccaaagtgctgggattacaagcatgagccactgtgcccatcctaaacatttttttcacataatttggctgttatcacccctagtattggtgctttaaaaatgtatactgattacgttctatggtattagcaattattattgttgtcgttggtatggttttatcctaatggcactcagtaggctctttcaatgtgagattatacattctttttacaaacatttactgtggaactaccccatgccaggcactgtgtcaagcaatagaaaaatgaaataaggtgtaacagagatcgcctcctaaaggagcttacagtgtagtggatgagttatataaataacaaaatgatggtgcattggactaagggttatgaagtgggaagcactgggtattagggagtattgttagaacatggaagaaaacatctcacttagtctcatatacaaaatcatcttatgcatagggcatgtttgtatatgatgtcccgtgcttaggacttaactgtcttatgcttgggtctgagaagactggggcttgagctcatggataccagaagtacaattcacagaaccaatcagttctaatcacaagctctagggagcatcaaaaggaacaggaaagcagggaagacaaaggatccatctggccaagcatagctttctggtacctcttctctgttcctcaacagtaaaagcccagagcattggcaattgtcagcagcctttataggctgaggaacctcccagatctgaaagaactcacaaaaaggctcccaggcttttattccacattccctctcctctaatagaaagtctatatcagtgcccagaaacagcttctattataacataaaccaatatcattctactcagcaggccacatcacctagcctaattattatccagagtccatatcctgaaattattgtttagccttatttatcccatctttttctttttgtctcttctgtgcattgtgaacctctatatttacatatacacaaattttctgagttccaccctgggggttttcagtagacaggcctggcctaccacattagcacactgtgacctctcaatatatgttctctatttcacatcttctctggtcaaataaaatttgagggggtggggtagggtaaactctactaaaaaggagccctccatatgtatatctaggttctaggtcccagactccaagacctgagagtttgcacagactagtgggtggctggtttgctctccatccccctatctggtgagtttccactctatgctcacaggttcacgaggacacataccacatgcaacagtgcctacaggagcgagtacaaaactgtgacaggatcaggacaggccaaggctccatataccttcagagggtacagcacaagcaactggagcagaagctgaagcaagcagaggcctggtggctgcagctgggaaagtttgcccgcctggttgactacatgatttgtcagagcctcatttctgtcttggaagagcagataacctcttttgtggccaacatccttcaagtgaggtggtgggtggcatgtgtggaggtggcaggcagtccagggccagatgctgaggaatgtatactgacatctagcccctcgacctttcctgacccttttttttacaggccccaaggcagaaaccctttctctcatcacagctggtctttgatgatcatggtcaactgtctcatgtgccctgtgttgaaaatatgatccagactctaactggaggcctacagtctgtcaagacctctgccttgcaggtattctgaattgggcagagagctggctgtgggaattcccagttcctatcctctgagtaatcagaagctcacaacctggtttgaatccctcattgctttcccatttctgccccttctccatatcctggcatgaaggtagtgcagtctgcagacctgaagacctcctcggattccctgtattctgaaggtatttagggagacctaggcagggggtaggaaggctgaaggagggaaagggcacaagtactaatggcatgggaagaaggcaggaggtccaggctatagagtcaggcactgggtgtggatggagcagctctaacctgggtactgcacatatgtgttgtgggtagaaaggtcagggaatgtttttgctcacaaattcacgtggttatgtgtatgtgcgtgcaatgagagggtgtatgaaagagtgtgagtacattgtccttccaaacctgattcatcccaaactctgtgaggtttttctccagtgccataattgcatttcatttactactgaattttattgctaagtaaatttgtacttgtttgaagagctctgcttgctcaacacttgctttatgtcatatagctctttttcatttcatatggattaattcattgtattgaaatattttatggttaccaattattattggttatcagtcttcacacttattaaccatcagcgtggaaacacatcttcacatttcccttatttaggatactaatgctgtcacaaataaaatcattaaatgcaatcagtcacatctgactcgtccatactttttaatttcctcattcaacttctatctgttcattaagaagatttaaagacataacgttaattttagggaataggtgacaaggagcaaaaaggttcactgaaaggaacctgtgtcttttacaaattatacaccagttggggcacattgttttctccaaataaatttaggttaattgatagagactattgatatttgttttacatggtgctgtggaaagaagaaaggctctggagtcagactcattagtttactagtctgcaaagtgggaataacaaacatacctaacctgaagaattattttaaagattaaaagagataatatgtctagtatggtgctcagcacatagaaatacatgctacagatgtgccttcttactattattagtattaaatatgtagataaatcagacatttcacagcattttctcattatatgtggtactaattcatgttataaatatgctgtagtattttttgaatggttaaaaggagcaaaaaacaacctcttgcatttttattctaaattctagtgaagctgaaaatattcacctaccatgtcttaggttgtcccttctacttttaaaaaagcacacggattggtatgtttaggggtgaaatgtcataatgcttgtatcttaccttcaaaatgtttaggggaatgaaaagatagaaggaaaaacaaataatgcaatgtgacaaaatgttaataattgttgaatctaagtagatggataagggtattcatagtaccattctttaaacttttctacaaaatttgaagaaaaaaaggatctgaatggaaaatcagattcatataattgagtaatcaaaaccaaagttctttttgttgtttgtttgttttcaagacagggtctcactctgtcatccaggctgaagtgtggtagtgcagcctcaacctcctgggctcaagtgatcttttcgcctcagcctcccaagtagctggaactgcaggaacataccaccatgcctggctaatttttaaattttttgtagagatggggtcttgctatgttgccgaggctggtcgtgaactcctatcatcaagcaatcctcctatcttggccttgcaaagtgctgggattacaggcatgagccactgtgcctagccagaactgaagttctgttgtccttaaattctttaaaaaaattaaaaagttttgatttgcatttctctaatgatccatgatattgagcttttgttcatatgcttgttggccgcatgtatgtcttcttttgaaaagtgtctgttcgtgtcctttgcccactttttaatggggctgttttttttttcttgtaagtttgtttaagttccttatagatgctagatatcagacctttgccagatgcatagtttgcaaatattttctccccttctgtaggttgtctgtttactctgttgatagtttcttttgctgtgcagaagctcttacgtttaactggatcccatttgtcaatttttgcttttgttgtgactgtttttctcacttataagtgggagctaaatgatgagaactcatggacacaaagaggggaacaacagacactggagcctacttaagggtggagggtgagaggaaggagaggaacagaaaaaaacaactattgggtactaggattagtaccgtgatgaaataatctgtacaaaaaactcctgtgataggagtttacctatataacaaacctgcacatgtaccccggaatctaaaataaaagtttaaaaaatggaataaattttgaatacaggtaaataagtagcagttaaaacactaatagtagtctttaagaaacatacatccaactgagaaaactgttacttaaatgaggcaaaatttgtatggccttttaactaaattacaaaataatttcaatagccccacttacacacaaaagtatgaaaattaaccccttttcaatagaaatgtatacattgactagattctaatcactaaaagaatactcaggatattattaataaaatagttgcaacatattctccagtcttaaacggcgttctccaatattttccagagaacattttacaactaaacaagagagtattactgttactatttgatgtccttacaattttatcggaagttttctgcagttcaaaactcagaaagcacgatcagctaatcacttttctcatctgtcaggtgtcagattcaaaaaccttaaactttagtatggcaatatcctaccaagattggaataactttttgatatttgtggtaagataaatctgttacactgaaaagagacaaaggattgcctaattttaattatataatctcttgatgtacgttttggttgggatgcctgaaattagcttggagatacaatgcaaaaatatgaaaactgtgatttttgcaaggggactgcacagggaaggtctctttggagtatgaggtatgagcagtaggactaggaagaggaagtatagagggaagcagtgtgactgtgagtagatttatagatgagagagaaggaaagatttttttttccttgccgctctgtgagaaagcaaccttggaggtatgaggagtcatataaatatgtttaacaagaagctttgctctgtgtggaatgtctgagtcactcattcaaggaaacctatagtaaagatctgtatcattgaagcctttcaagttggattgatattttaaaattcaactccatgttgactcatatgtattatatcaatacatataaattttcaattgaagccccaaatcccttagaaatggcaggtaaattacattcctttgatttagttgatttcaaatttcttcttatggccaggcacagtggctcacacctgtaatcccagcactttgggaggccaaagtgggagagttacttgaggccaggagtttgaggccagtgtgagcaacatagtgagaccctgtctctacaaaaaaatttacaaatcagccaggcatggtagtgtgcacctgtagtctcagctactcaggaggctgaggtggaaggattgcttgatctcaggagtttgaggctgcagtgaggcatgatcacaccactgcattccagcctgggtgacagagataccaaatctaaaatttaaaaaaaattttctcattataagcaaagtttatttcattcttaccttggctatgaagttagtgatttttgttttgttttgttggtatgttcttttaccaaattccattaaaaatagactagcttttctttccattgcttggaatcacaattgactttgtatagcaccatattgcctgagcactctcataggtcttggcacctagaatcactgctcttcaagcttgtcttatattttggagctcacaaaacagacaattactaacttcaaaggtagagaagaagtaacagcacccatcttcacagaatttgaaagtagaatatcaggaagagaacccctgtctctcaaatttctgcttatcccttttttcatctcttctctctgtgtatctttccagttcctctgccctgattcctgagtccagttatctctccttcctttggactttctgttcccttataactacttctttcaaataacttaaactttttatgacaccgactccatccttgactttatatgatatttgagttttcctgtccgtgagactgatttagttcaaacttcaagacaaggagtatgattgattcagcttctcctgtagattgcatgctttattcataagctatggcaaggggatgtgtcatggtgcaaaataactggcttttagctataggcaagggtagatcctcttagaaggctgtgtatggtgggggaggttgcagtcttcagctatgcttgtgtttggctataaacgtctattatatgggcctgagtatgggggttgattttggattaagtaatcttaactcaaaactacgtacgcacctataactaaaaaattcatgatgcagctagattcagctgcagtggcctaaacaaaataaaacaaaacaaaacaagaagtcttgaagtaggtgcttccagagtttgttctgtggctcaaaagtggtcatcaagtaccaggttctttgtatctttccatcactctttcctgcttttagctatatttaagagcagattctgtaagagagttatgtgtggcggaggaggccacaataaagtggttttcattttttttgttttttcattctcaggcttgttgcctcatagttgcaagacaagctgcaatgtcaagcatcccattctcaagcaaaatcaggcagaaaaggagaggcaaggttaacaagagagctctgtgtctgactctcactttttgccaggaaaaggaatcttttccggaaactccccatcagactcacttttacatctcaccatcaaaatctgcgtcatctgtctacctctagctgtaagataggctaggaaatcaaatggctgacgttctcagtgtctcatgggagatggttctacaacaatagaggaagggagaagggaatagctattgagtaatcaaccaatgtaccttcagagttccattcttcaggtaggctctgtccacctggcaagcaagataatcaccagcattctctacatcgtcatttcatactatactctttcccttctatccctcacttaatcttagttctgtaagtaacaatatctttaagcccactagcagcccttgtgttgatgtctttctagtaattttgtttgtctgaaggtcactttttactaaattcctcaggaagggcttgtagggacaaaattctgaagttcttctatgttgataacaatttgtaccttttgaaagttagtgttgctggatataaagttgttggtttatacttttttcctttgtgtatcttaaatatgttactatgttttcttaggacattatgagttgctatcaaaaagccttcgatagtctaattttatttgctttacaaaatcacttgttctttttgcctagattttttttcttttttattgaaatctagttatttttgttagaatatgtgttggtattgaacattctggggaaggattgtcaggtatgttctttcaaaatgtggctttatatctttttttaaatttcagaacaatttttctgaattacggtttttaatatttgttctcttcccttgctttgtttttttcttgggggaatcttgttactgatacattagatccttatcacccatccccaatatttttccctttctcttgaaatctttaaaattgtttatttcctttttagttgtataattacccttattttgccttctatttttcttgagaaattatctgtcgagtttgtttgctcttatgtcccattttagttaaatttccattatgaaattgttttttctttcatttataattctttccatagttctgtcacataatttctgagtttttctaattctgatatgtgtcctctcatgacttctatcatttttctattgtcttttagcttgttttgaaataggctatagttttgctctggtttttgacatgctttcattgtctctggggatttattctatgcctcgctttgtttttttcttataaaagcttggtatggggtttgatgctgatacttttctactgctcatagaaaactggaaattttagcttttcttaactttcaaaagaagacttggttcaaaatagttctctaacctctaagtttcactttctattgtttttctgtattaaaaaaagatggcttactttctgaggttttctggtttccctcccctaccttcatctagacttttcctttttctctattgctgctcaatccttattctactcccagcattttctccatgacgagctctgtcccaaaagggagccctgactgtttggtttcaagagtacacagggcatagattacttaagcttctatagaccttacctcacctgttcttggagggggtaagacccccttccagttttacctgctgttctgaaatgggccctctgcctcccagtaaatgcttgatgactgtttgggggttttcttattcttaggtccatctgttgcttcattgtttccctctgcatcattcatcacaaatggtgatgccatgtgtgttttgaggttgcagatggtttgaccccacctacttgtattttaggatctgtgaggatcccttgccctcatttgttaaaaaatgctatccttgtgtttttggttttattatctaattgttctgtcatttttacgtgggcatttgggggagatttcaaaatgatgctgccattgccatcatcttctcagaatcccttctggcattttttttaaaggatgattctttttcttatatggagcagagactgtaaagtataggaggcaagggccaatgcaggtagaaaagttagaaggcttttgcaataatgcagtaagagatgatggtgacttgggctgggggaggagggcaggtggtggtcaatgtggtgagaattggtggattctggatatatttttaaagtaacgacaacaggatttttaaatgggatgtgttgtatgtgaaaaagagtcaaaggtgactataaagattttgactggagaaactggaagaacagagtttccatttactgaagttggaagactgcagttttggcggggaggaattagagttcattttggctctgttaaatttgaggtgcatgttagacatccagatagagaagtgaattaggcagttctttaaatgggattggagttaagtgagagatctgggctacagataaatctgggagcaaatatatggtacttacagccataaagctggatgagatttcctagagagtgagtacagttggagaagagaagagatcagctaggagtactacagggtttgggtgtggatagtatggctcttattctgaacattttaattctttcctttattttgtgcgaagttttaacacaaatactaaacttgtcaattaaccagttcctaaagagttaatgagtggctaggttcaagaatattctctaagacagataactgaggactggcatgttcaatattcattcccagcaactcctctgttctgcagatgccagagactacaaactacacttcccagactcgcctgcagctaggtgtcatatacaatttaggatccaccagttagatctacaaaagactttgattcagaattgaattaagagggggaaagagtcagggcgtatgccatccgttctgtggatcatagcagaggcagtgtgttctgtagttgatggtgtgacagtgatatcccattttgccaggcagaacacagccctagatgctcaaccttgagtggttttgtattttagctctcctattattctgcaacccatttaatattctgtaataagtccctccctgcttagactagctagagtaaattatgttatttgcacatgaaccctaactaataaatcccctccatgggtctagtattttacgtttgtgatatagatgtatgtgttaactcactcatgagcagcgaatgggtgtgtgtgtgtgtgtgtgtgtgtgtgtgtgtacacacactgagggcaaggagaaaggaagattgtttgtgggctctggagggtactcacggacaattatggcctgtgctccactagaagaagatgaagaggaggactcaaaagacgaatttctgatgcccaagttccagggccagcccagcgatgctgtgagcatcttctgtggcccgaatgtgggattggtgtggccctggaagtctcacccaattgctggtatcttggaggtccgtggatgtcggctgcggggccaatacttcccccacaattataagcagctggaggaagacctggacaacaaccctaagatccagcaggcactgaatatacaacaggtgctgctggaggtgagaacagtggtttaagggatagggcgctgcccaccaattcccattatagccgcatgcctctgccctaaacaccttgtctgcccttagggcgtgctgtgcaaggtgcaggaattctgcagggaacatcattggataacaggcatttatgaattcctgcaatcctgggggcctcagaagctggaagacatgagaggtggtcccatcaagaactacgtgacgctggtgagccgcctgaatgtttggcaggcccgtgtctccagtatgcctatcgagttgctcacaaaaggcgggttgctgctacttagctgccatgatgtacaggcagagatgggtgagtactgcttctcttccctctcctccttcccttttctgtatgtctattcacatggcctgccttggtcctggaatgtcctccggagaccttcggtgcaggcctcttattggacctatgaagccttccaaagcccgaggtcccaggccctttcctttgccatcaaagctatgctcactgcaaaggccggcctctctgttttggctctgctcataccctgtattccttaggaatcatgttcctgtgcttgggctactaagctcagtgtctttacagagattcttgggaatctagggtgctttctctctgcatgtagctgagtgaaatttatactacgatttgcatatgtaaaaagctactctctaactgagcttgtcttactctgtagtcctaacttctactggtagtgaaagaatgtaacctttccaattaaagaaagctcctttcatttaaagcagtcacttttggtctgattcagtctatttgggatatctgggcaattgaaaatttatactgtagttctgggttgtttttactttcaaatgtcttttcctcccttttccttcccaaggtgccacctgtactggggaaggccggtgggctggcttctgaggtgtgatacatccttgcctggtctctgccctcctgacattgctgcttctggtgctgctgtgtcctgggctggtagagctgcgatgtgttttcttggactaatagggacctggagtgtctgtctttgctgacctgtccttgtcttaacatttgctggcatagctgatccttggggttttagtgaatccttcatccagtctctgtcttaggctggctacccccatggcttttgcttcagggtccctagcccctcaacacaggaacttcatctaggccactggctatcaattctctgctatcatctatatcccctgccatttgggagttgtgggaaactggtaagcattatatccgcccctctttttactacaacacataacagtatgatttctactctgctgtgactgtttcatgttagcaagggacaccctaaaaggtggtctttcccaaagttctatgtggaaagtggggctcaagaccattctactacctattttctcctcaacccatctcaggttccctcctcttgccacttctacccctgctaattgaacgcccaattgttgctatccctgggtctctgagaaatctggcttatgacctagtcttttaccctcttttctttcttccttcccatgggaaggatatctcatgctattgtgtactagctagtgcctcagcctaggagttcgccacagagaggctcacagcggggtagatttggaagccagtgatttgttcttttaggaaatatggaggttgttctctttcctcacctagcctcaaggatggcaatagccaatagtatctacttcctgtgaagactagatcctgttggacccgtggcttcccaggcctgctttctttatgaaggttagaagccactggggcctggaaagagtttgcttgtatgccctgcttgcttcgccttccctgtcttggctctcaacagatgaaagcacatgtatcattaggtatccagtgggccactaaaactccctcctcttgtacagggggttcaggcgggcaaggcaggaaccgggaggacgtttgattgttttgtcttctctctggccgtgttttggtcaggctttacttcactgctgctgagaaagcttattgttgttctagtttgttagcttcctgatcctcaatccaggaccaactagtctctttaagaggagcaggtggagagaaatgagcactggatttagaaccctgtctgtttttcacttgctttgtaacttcagattactgtgttttagtttctttatttgtaagctgggcatgataacacagtcactcacagggttatagtaaggatgactaagatattatttgcaatactcttagcattgagtgtggcatgcagtaggtgcttaatatttttttcatttcaccttatccccttgtatctactctcatccttcttgctgatctaattttatctaaccctctgacttaactctgtcgtttctcttcttcctgaactcccttgaacaacaaatggcgtaattatacactctgacgaattagcttcaccagaaacttggggtcaccctttactcctccctctccttgaccttactacatccaacctgtctccaaatccttgtcattcttctgccccctaagtatctcttaaatctgtttttatccatctccagcttctaatcccaaggagtcctggtattttatcaatgcattgctcctttataccatacggtgtcactgttgagctcccatctgccttcatctgcctgttgctactggtccaaaagcagcaccataaacaaacaaacaaacaaacaagcaaacaaatgtggcagcattgcaatggcctagttactgttatgttccaaagggacagtgtgaaaaaggatgagtttagatcttcatgttctgtttgatataggttgtccctcaataggcttcctctcagcaggttttcttattatcaggtcttagtacccagtcatcttggttacttcctccaagtctctgaaagtgacatacccagtatgtctcaattatctgtcccccaaactcactattttacttactagttgcagagatgctaatagaggatcggtcagtttactttgcacataacataaaaaatatttttaaatactttttataaacatatatttttatgtttacatttatatttataacataaacatgtttatatttaaaatataatgaagtggagccatgctgcctgagtctgaatccttgctctgccactgtgtgatgttgatcaagtgacataacctctctgagcttcagtttgcttatctgtaaaataatagtatttacttcaaagggaatttgtgaggataaaatataattaaagtacttgaaatagtgtctggtatgtagaaagcactctatactctatttggtgtaccatatttctatattgtatttttcctattctgtgcatattttaacatctctgaactttaaaggtgtctcatgattgaagatgtgttagagtttagatggcatcagttttttttctttgttagtggtatataaaataatggtgcttcttacaacgggatcttagattttatgaggtatcatatgggtgttatccctgccctctgagataataaagttgttcatactgccaagggcagcttccaggattactttctagccccttatccacctgagactttctttactttaatccttaaaaacaaaaggcagatcatactaccttcttggtccccttcttctagagcaagggcagtaagactccaaaaccagaatacttttatgtctgctaggatactctgctattcacaaacatgtcatttccatactgttgcacacactgtttcatctttttggagaattaatactcaacacatccaactccagtgttcccttctctgaaggggccttgcccagccttctcaggataccccccggcacccccacctcttagctatactggctgaaggctccaggcactcacagtggatttatcacactgatttgtgattgctcatttgtatgtctgtctctgcctcatattgtgagcttttcagggtggggaaactttctgtctcattcatttgctctcgtctaccagtatagagcacagtccccagtgcatagcagctgactggacattgagcagggattcaacaagcattaaatgagataattcatggtctgacctgccattcagcctactcccactctggaccacagcactgtccccagcaccccttcttttttatgcgtcccctcacaccttactctcctgtctccagaatccaagctgaacagcataaggaaggacattcttgcacacgtgcaaaatgagtgctggaacctcagtcaacaactcatgacagagctcacagatttcatgcatatcttccgaaccatcaactcagatattcatgccattgcacagtgcacccagaaggtgggctctccccatccatccttcccagtttattcagggcccatcctgctcaaaagctcagcacactctcttcaggtctctgctgagcccccagcagagcttgatgctcttaaactgtgctcgcctaagagatctacccttgctaattcttaccctgtccatgtggccctcaggttcctcatgtcacagggaggccctggtgtgatgagagagttgtgctctctgtgacagtcagatagaaaattgttgccttgtcatcaaggtaatggggtggtgggtgagaagtggacccttcaccagagagatctgggtcagagagagatttgatccctctggagagatccctcaggagagattgcccctgattccagttgattacaaggctgcaactgggtctggagacttcactccaaaaggtgggagttccccttggggatgggaccaaagaggtacatggggttgtggggctgccggtctcatgctgtaattcctgcagttgaatgaagccaatgaacagtacgtcgagctggaggagcgaatggaatacgtacgggcactccacgaactcatccgcaaccactttagcctctttagtgctgagaatgaagcactggacatctcggtgagaaggcaattcggggagtcacccatccctccctgccctcctcccccacaaccacatctactccactgccctctgcttgccccacagcttctggatatgtgggaggcatttcagtttgagaaaagccaggcttcagagttcctgctcagcaagcgacatgccattatgcccaagctgcagcagctgatggcagcagcattggcagagctggaaggcctgcttgcgaaggccctctccggtccctttatggaccccacacaagatcagaggagtactgagcaccagctcgtctccctagagcgtcagttccagaacacagtcagcgacctcagtgaactgcaccacgcctatgccatcttcactggtactgaggatccctgcaccctccattatcactctgtgatagacccttcaactgaagtaagagttggaactcagggttctgtgtcctgtatgaccccaagcaagccttgggaatcacacaccttcactggtgtcttttataaatgaaaatttcaggacaaaaacatcatatattgaccatggcaggtgttgtgcttagggtgggggtatgggggctcacagtctggtaaggaaggcaaacaagtgaatgttccatcagaatgtgatggggtcaggggctaaaagcatgtgtgggagaaatgtaagttctccttatagaacgtagcctttttgtagccctgttcaacacagtcctacaccaggcagcaggccccgaacaagagtaggtcttgatgctctagcagatcacttcctccagccagtgtggtatagagaggaggctactgagggcctcactaatacacaggaggaggccaggacagaactattggtctcaattctttcatacagtggtgcaggtaagctggttcccttctgttcttaaagaactctgtgggctctggaaggagaccagagcaaatataagagccattaccaaacaatggagacaggatctcaggctagagtgcagtgtcatgatcacagctcactgcagcctcagcctcccaggctcaagcaatcctcccatctcagcctcctgagtagctgggactacaggtgtgtgccaccatgcctggctaatttttgtattttttgtagagatgaggactcactttgttgctcaggctggtcttgaactcctggactcaggcagtccttctgccacagcctcccaaagcactgggattacaggtgtaagccactgcgcctggccttccttccagaattcttatatgtatgttggatttactgaatctctctcactcattgcttttatcttctttatcatcagtcattcctttattctttttctctgagttctggaaaaatgttgtgagcttgttttataagcttccatttcctatggtatcactttgtatttctattgcattttaaaacacacattttgcatgtgtatgcatgcttatgtacacatgtatacgcatgtaactgtgtgtttatgtgtatatacatgtgcacacatttgctatctctatctgctgaagaggacatgaagcaaagaaaccccagtagcaagaagccacattgtgctcaggtcttagtttctaacaaacaccattccccattaaaaggaaccagagctccttagagaaatggatgattccagggctgtggcagggtaggtacaagatgaacctaaagtgtcattttataccagaaagtaagaaagtattaaagtgtttaaaaaagtgatgggagcatatcacaaggattcagaagggataccaactggctaaatctggaacaatttgatcaccaaagtaagtacaataataaattctaagctattgaagtaaaggcatttattatgcgtagtaataataaatagataatgagagagaaatgaggactcatgcttacagtaaaatgccaggagctgactggcataaatgtggaaggaaggctggagtgggaaaattattattttgcaaccatcatggtaattaccagatcagataaggatcaacagatgccaaatctagggcaaatttgatgaggagcagaatatttgcactgtctttgagagtttctcccagagatcacttatttgttgtaaaaaaaaagaaagaaagaaaaagaaacaacaattagtggagaaatcagacaataatttgaccaggtgattaaaaattaacatcaccaatgaaggacatagggacatgatctgccttcagatgtgatactggagaaggaaggatacaatatcacttatgtagtagtccagctgagaatgagtatcatttttaaaaaccataaaaacacaacatgaggaactttctatgaacaaaaaaaatggcaaaaggggactgtatacttcaaagatgtctgttacaaaagaaagaaaggctatggaaatgttccagattaaaagaaactaagagacatgacaaatgcagtgcttgaccctggaccagatgctataattgaggcaaaaaatgcaatctaggacattattaggtcaactgacaaaactgaaatatggacagtagattaaaatattgtatcaatataatatatgaaatttggaattgcactgtggttatataaaagaatatccctactcttaggaaatgcatacttgagtatttatgtaacttgcccttaaatagttcagaaaaaaaaattgtgtgtgtgtatatgtgcatacacatgcccatgcacagagcatgtgaatgcaaatgataaagcaaatgggtaaaatgtcaacaaaaggcaaagataaacagtatagatatatatctatacctatggaagatagaaggtacacaatttttttttactactttttcctacaactttgaagattggaactcattttcagataaaaagttttaaaatgcatggaaattatcaagtagatatcacaaaatgtctgtcaaaggacatttgctcttaatccccagtttgtctttatcttttcatgtgtttggagatgatatctctgctctttcttacagatgaagttgtttatttgtctaatatttgatgttgaaacaactgctgtcaaagattgtatgggactctagccatatctttgagtttagacaaagactggaagagtttagatttactgtcattttactttttgtcagatcagagctttgatagcctagtgattccagctttttaatactctgagatctccaaaatggatgatgtgcacatgtgtaagatgcatgaggcccagcatttgggtgtgactctatcactttttgtcccactcaagaaagtaaactggagttcaagttaatgagatatctgttgtcttttaagtaaattgcaaacctcgatattataattattgttaattataaattcctattgacacttatctcacaactgactataagtaactgattaagaactaatgtagtaccctgtgagatgaaggggtggaggataatggccggaggtaaacatgacaggtcctctatgtgggccagatcttttttatattcatcttgctgaactttcttttgggctgacagttcattcgctcattcattcattcattcattcaacacatatttgttgagagactgctgtgtacactaggcttgaggtacatcagtgaacaaatgataaaatgcttttcttaatggacccaaacttctagttgggagagaaagacaataaacaatgatgataaccaaattctgtagtatataagaaagtgataagtgatagagaaaaaaaaaaaatagaacagagtaagaggggttgaaaatgccgggaagggtagctaggaatttttaaccagatagcctgcataggcctcattaagaaggtgctgtctggctaggcgcaatggctcatgcctataatcccagcactttgggaggccgaggcgggcggatcacgaggtcaggagttcgagacaagcctggccaacatagtgaaaccctgtctctactaaaaatacaaaaattagcctgacatggtggtgtgcgcctgtattcccagctacttgggaggctgaggcaggagaatcacttgaacccgggaggcagaggttgcagtgagccgagatcacgccactgcacaccagcccaggtaacagtgcaagactctgtctcaaaaaaaaaagaagatgctgtttgtttgaacaaggacttgaagctggtgagggcatgagccatgtgattctctgaaggaagagtgttccagaaagaatagactgctagtcaaaggcccttagcaggagggtgcatatctggtgcatctcagccatagtaaagcgtccagtgtcactagaatggagtgaatgagatggagactaattaaagaggaactcttccctttcactgccatcacattttcccagatggtctttccctggagtaactgttccttggattaaccccacctccattgttgagccaaacaatttggaactccacctcccccacccccaaccatcactttctggaccctaccttctgtcattatgggctcttgactgatcattccaccacccccctcccaacactgcaagtagcccaggtctcaagtcagccctcccccacagaggatgagactcctgtgcccttgccaatctgtgggacacgtcctattgtgcagcagcagcgcatatggcacctgtaccgagtcatctccgaaaacatcagcgagtggaagtgcatggcttttgccaaggtgctgacacccttccttggagctcttgactgggagtggaggactacagtggtgggggaggggaagagtctcaagctgacagtgagcccttctccctgcagttcagcccagctatggcccaggagaagacagagggctggctgacagaggcagcacggatgagcacaaccctggagctgcacagccccgtgctgcagcactgcatgcgcatcctgggggagtttcgcagctacctgcccctgctcactaagctgggcagcctccacccacagagcctcaactgccagtgtctcctgcgtggtatgtttggttaatgtcagaggagggggaaagggaaatatgtgaggttagagcgatgcagcaactcagtttcctgctgctcctgctggaaacacctttcatccccaagtttctccctacctttcccacatatttcaatttcttttccttaactgggacaaaaatttttaacttcccttactacctcctctctgctgatggtggctgggcttgggctggggccttagctctgggctctgagttgtgctctagaccttgagttctaagctgttggctctgtgttgtgctctgagatctgctatctggggtctgagctgggctgggctgggctgggctctgggatatgggatatgggttggactctgccacatactgggtgttgctctgacttgttttctctacctccagcccttgggctgggcagtctccaaactatagaactcctaacgctgggccagctgcttacttatccactgctggagtttgcagatcgaatcaaccaggtggggccctcagtacaggggcgagggaggtggtccaaagccaggacctgtaataaagccagtcaagggtggtgggtgtttggcatgtgatttaatgtggggttgagcctgctaacctgcctgaagggcaggaacagtttctttaagtctccagatggggatctcttgtgtgattccagactcccagtgactgagagtatgtccctgatgggggaaggaagtgggtggcagccccgaagttgtgggcacacagaatggcaggtgccccccaacacctgtcttgtccccagagggtgcgagctgactgaggtatttgctcagttggagccttgcaaaagtgggtgggggttccaaagcagtggccctggggcaaggtagttagatgctgccgatggcctatctttgaagcctgatggtcccactctcgcttcatctctgagacctccactttcctgagccctggcccttgagttctgcctcagatccaatccccaagtctcggctccaagcctgtccccgaagcagttacccagtcctggttcctgagacccagctgttccaggtctggcagaatgaaaatgaacgaattcatgcccaagagactatacggcggttgcagcggtactgggaagcgcgccagctgcgcctgctcaacttcatcctgcatgtaccctacgagcccccagcctcagagcgctccaagaggcaggtgctccgcagcccccaatgggaggtagtggacaaagatagtggcaccttcatcctctcaggtgagacccagaccttgtgacctagtgaaagccccctgctgggggccattttcatccaccatatccatcaaggcctgccagatctgattctctagccagggccccatccttactagacagcctaagacattagtctgttctgagacagtgtcttccatgtagcccccctactgtcttaatctccttgggatccccttcccctcacccatctctactcaatgcctgggtccttcagcaaaggtcctcccctttctgggtaccctcagaaattcctcatagtcagttatctacacctttcaatgctctgtcctctagattgcaccctgctgtctgattttataccttattcattaattcatttctttattctctccctcatcaaacctgcctcctctgtgctaaacacaggagaccttgagacttacagacagtatccctgtcccccagaaatttctgagtccagtgaggagagacagacaatactatagggataaacacaatggagcaccttactgagggcagtagaatctcagagagaggaccagctcaaagaaccagagagagaattagagaagtcttctttaggcagaggccttatactgactttttgaaggagtaagagtttgccaaacttgccaggtgagaagggcagaccagacaaagggaacagcatttacataagcatccaagatgatatagctagggcattgccaatagaggagaattttcttattcaacgcaactagaacccagttggtgaatccaaaaaactaatgatgcatacatagtttaagatttttattttagcttaaaatacatacatgtacatttatttactaacgttttaacctaatgacaagagcttttgtttgatttgatagttcctcactgcctttcttgcattaatgtattgtctactatttctgctttcactttctgcaaagttgggcagcaacatgaagacacttttaaagtccttatgaagggaagggccttagctgcagaagctgggcactgtgtggagagagggaggtggggagaggacttccaaggagattaagacagtatgggagttacatagaagacactgtctctatgtgacttttccaggtttttattataagttcccaatttataaaaattgacttgcctatacctaatagcatatgtttaatcagtttgcctttactgaagctttctgtggtttccatagaaacagcaactttccccccaccaatgtgtcagtggttgttacaatattagattcaactctttacttaaaatcacaacataactcacataaatagatttgcaaacacactcttattcttagtgcgcacacactttaactagtggaagcaaaaatgtttgggtcttgtaaagaatagcttgaaatctgcgagtttcagttcagttagggctttagtccgtacatttgatggtaagaatggggagcatgaataaaagagcttctatcgctctgtggctggatcccaaagaatagtggaggaggggatggagcagatggaactggagaggatcagatcatgcaaagtcttgtgggccacattaataatttactcaataacatgaaaacaatagagggtcactgcatgttttttgtgggtagtaacataattagattttagtttaacaatatcattctggtttcaatgtggagaatggattgaagggaggcaaggaatggaaattgaaagatcagttaagggatgactggtataacccaagtgaaaaataatagtggtctagatgaggacagtggcaatggggaaaggaaagtgggtgcactcaagctaggcagaagtcagctaggcaagatgtgtaactggttcaacttctgcatagaggagaatgtaggtcctttccattctaatatagatgttccttattacccaaattctttatccttatcacctctttatatccagtatttggtgaggggtgccttttccagccatttgcagcacattgataaatggcacccagcccccttgttcacatcgcccttattaaggactcttaagttttggtgtggactgacacaaaggctggatgtctgcagttaacatttgcaccaagattgaaaggagattgtcttcccacttttgtcctgagcacattttatgctaatccatttgcccatctctgaccctggttccacactttgccagtctgctcctacttgatctctaccacttttctgcctcatccttagatttctctgctactaaaagtaataaataaaaattcgtaatacaaagtaaaggctctggataatgtgggccttgggatgcctgtgggcataatttcagataccagcctgggtcctaccagtctttcctgagctcacagcccttcctccacctttgctccttttcagttttcccttctctctctaagctagcatttgcaccaagcacttgtgtggttgaggtttctccctatgggttctctcctttctctgtaccaggctttcttttcctgttaactccgggcatgttaaccaaggaccacatctttgtagtggccacacaccatgaagctggtgacttcgttcacccaaataaaccccaaatgatggacttgttatatatttaattcttacctcaagaagacaggttgttacaggattgggcacacctacaaattattaatctcccctttagattcttaaccaaatgaggacaaggatatatatgaaaatgaaagtatactatcagaaccatcacccccaaggaagtttgtgctttttatgtatcatgttggcagacacagcttggatctaggtcaagtgagacttcgtgctacctcgtcataatcttcccccaattaattgagaacttgaggtctgtgtggatatgcagagaaaagctgaagtacagttacacaggtagctgtgtagaggactgtggcctgcctcatatcccatagagcataaaagatgggcctctttgcctcctcacatggggaagagtaagggaagaagatagacagaggggctgaaagcattagtccagtgctgttttctctagagagtggagtagaagttgtgtgactctgagagcaggataatgagttttcttcccaccagggatgtttggagagtcctacatgtgtctgaataaacctcctttcttgattcttctcatttttaccccaattagtgtccctacctcatttccagccctagtcttaccaagcacttgtggcatgaagggataactctttaagcagcaccagggagccaagcactaagactatgagagaaaagtttgttctcagcttctctaccaagacccgttttaagacagaatgggcattcttgctatagaaatattacgtagggtcctggagccattcagccctcttcccgggctagaggctctagttcttacaaagcacttccatggagttacgtggatactcatagcagctagtcagggaaattagctggcctggagtctgcccacagtgccttgggaaaggaggagcttcttctctcaccattttgagaccccagtgctttactggctctacatattggctgatggaatccttaaaggcagaaagggcagctgggcatggtggcttacacctgtaatcctagcactttgggaggctgaggtgggtggatcacctgaggttgggagttcgagaccagcctgatgaacatggtgaaaccccgtctctactaaacatacaaaaaattagccggacatggtggcacacacctgtaatcccagctactcaggaggctgaggcaggtgaattgcttgaacccaggaagcatagtacagtgagctgagatcgtgccattgcactctagcctgggcaacaaagcgagactctgtctcaaaaaaaaaaaaaaaaaaaaaaaaaaagggaaagaaaaagacagaaagggcatcagggtctctgtaactgcctctcctggaaggttcccctggtctcctcttctctcccccagccccggcccttgcctcatctgactgccagttcagctttttctgtcttagattacagcaacctgcaggattccatccaggaaagtcttcaggtgttgtccaagatcttggccatcgaaaagtcaggagatttaaacaaaatagctttggagtgggtggccatcatgcatggcctgggtaagtgcaggcctctagccaggctgatgggtgagacctgaggcaggatgtcccagagggatgggggtgagaggtggaggttgggtgggagaagatatgaagaacacagtgaggacctccttcagggctgtttcttgggatgaagagatcaggtttttattcacagtgaaagttttttctccctcaagcaagttccctgagtcctgctgggcagagtattttgcttgggctggtggggtacctgagaggtcaggagcagggtggactcccctgcagaaggtagaaccctagtgtttcccaccagcattcctctggctgcttacacaggtgccctgctggaggtgtggctgactttccagcagaagtggatttttctgaataaagttctgcatgagatgaagatccagtttcctaatgctgacctggtagggaagggggttgaggcagagagggcaagaagggttcctgaatagcagggctcagcgtgggaaaggggagctgccacttcatattggccctcacttttatcctctccctcaccacagaactctcgtttcaaggtcatggatgaccagtatcgaaccctgatgcgcatctctgtagctgaccccatggttctgtcacttgtagtgcccagtgccgagaggagcccttacttccaaggccagcagctgcaacaactgctgcaagcaggatcggtggagctggagggcatcatcatgagtctggagagcgtgctctatggggtgtgtgctcacttcccccgcctcttcttccttagtgacagtgagctggtagccctgctggctgctcgactggaatcatgcgaagcccagctatgggtacgacgctgctttcctcatgtgcatgctgtgagcttcaggtcttgcccaactggtgagaaaaacacagatgactgggagtcaagcccaaacacacagactcaggtggaggcacttgcagtgctaggggcaggtggggaggaggtgaagctgcagggtccccttcctctgcatccagatctccctaagtggctggcctctctggagaagtgtctgcgcttggcactggtgcacatgctgcagggctgtgtggctgctcgccttgctcgaggcccatctctaggtgaggccctcaagcaactgcccaagcaaaacaagttgtacctgcaactgtatgtccagcactggatcgacttagtccaggccttcccatggcagtgtgtgctggtggcagaggaggtggtatggcgggccgagatggaggaggctctgcttgagtggggtaccctggccatggtctccatgcatatgcgcaagcttgaggtactggtgaattttatgcgggcccagagggcttcccaaggtgggcagtccctgccttctgtccgccagaccagccttctcagtgccctgctggtcatggcagtgactcaccgggatatagcacagctgctggaacagcaccaggtcagtgatctcacagactttcactgggtccgccaactcaagtatcacttgggttcacctcacataatccccaaaagccccctacagagtcttaagactattgcatcttctgaaccctctctgtcaccagcggcatgctggatagatgtgctaggcaggtccttcctgtacaattacgagtatctgggacctagactagggcctctacccagcctactgcctgaacggccagccctggtactattattggccctagaggaggtggcctgtgggaccgtactgggtcctaatggtgtgggcaagagagctatagtgaacagcctggcacaggccctgggccgccagctggtgatgctaccctgctcacctcagatagaggctcaatgcctgagcaactatctgaatggtgccctgcagggtggtgcctggctgctgttggagaaagttcatcagctgccccctggcttgctctctgccctgggccagcgcctgggtgaactgcaccacttgtatgccccactgtaccaggaggcttcccgaaacacaagcaccatagaccccacccagccccagctccttggcagtagcttctttgaaaaacatcacgtgtctgtgcgccttggctatggctgtctcctggtactgcgtgccctgagctctgctgtgcctgccaacctgcacctgctgctgcggcctgtggcattggcattgcctgatctgcggcaagtggcagagctgactctgctgggtgcagggatgagggatgccttccagatggctacccgcctatccaaattcttctctctagagcgtgagctggtgtctgggcccctgccctgccgcctgccactgctcaagcagatactggaagacacaatacggacactaaatgtgaccaaggaggaaccgaagtgccagaagcctcgcagcctagctgccattgaggaggctgccctactgcgctcaccactgtttagcattctcaatgggctccacctgcacaacctccgagggctgttgtgtgcgcttttccctagcgccagccaagtgctggcagaacctatgacttacaagctgatgaagccattggtggtggaggaactgcaacaggtaggtctggatcccagccctgacattttggggtccttggaacagttgagccaggccctgagccgggcctcaggcattctgctcctgggccctgcgggcagcggcaagaccacttgttggcacagcttatttaagatccagaatcggctggcagccatggaggacacctcaacccaaggctgccagcctgtggaaattacccacctgtaccccagtggcctcagcccccaggagttcctgggatggctagagggctcctgctggcatcatggcatctttcccaaggtacttcgtgcagccggtcagtgtaacaacatgggccaaaagaggcagacagaggaatcaatcgggatccagcactggataatatgtgatggagcctccaatggtgcttggctggactccatcacttgcctcctgagtgagcttccccagcttagtctccccagtggacagcagatagcacgacccccaggcacctttctcttgatggaggtggctgacacaacaggcatatcccccacagtggtaggctgttgtgccctagtctggtgtggtggagagcagacttggcagtgtatacttagtgccctgatggcatcccttccttatgagtaccgcctgcagcaccggacagtcgctgagctcaaccacatggctgaggttctggtgcctgcaacattgcgattcctcacctgccaaggtgtcagctctctgctgcaggtacacgggcagcaggctgtttgtgcaggtgtggcagaagttaccagcatggcacgcatcttgcatagtctgcttgacctccaccttcgcctaaaggaggagaaggcccctggcccaggtgggaagatggacgggctggtttgagagagatggggccttaagggtagctggggtatatagctggagcctggggcgtgtgttctttggtggatctgggccaggagtgaaaagtaatactgtcaaccttttttctttctttcaccttccacctttttctactggggctcctctcgtggccatggcaactttcacagaggacctcagctatagtgatcctgtggcccaaagcttcaggtcttcaaaaagcagctttctaaaccggtcccaggttgacagtgacgatgtgccagataagtgcagggaacacttgctggctgtcagcagttttctttttgccttgatctggggctttggagcccaccttccctccaggtacctaccaggatgggggatgggagatgcagagggctgagatggactggcccatggaagtaaaaacccacatgacatcactgttagggtatggtggagtgtgtgagtgtgtcataaatggaagtgttgtaactgtctgacgcttttgcctgtgtgtccatctgagcaggttctggcccatctttgataccttcataagggattctattagtcgcctctccaactaccctgagccaccaccctcagccttggtgtttgatctacatgtaagccctgaagatggaacactggtccccttcactggccaatacctgagcagccacatcaaaggaactttgggcacctttcacccttctatccaggtgtgaggacagtaaggcaagagctggggttagaacttcaggacttattttaggggtaatccatgttcaaagatcagctgaggcccacttgctccctttctttgatatattttcacaatcacaagaatacatgaaatattttccaagtacagctctaggacaagtcccttagacttttattttcagctagattactgtcttatactggaggtgctgcagtaagtcccacttctgtcttgcagactgaacggctcttgtatgtggtggacctgcttctgtcagggggacagccagtgttgctggctggagaggcagcaacagggaagtcagcctttgtggaggtgctggtagagccacatcacccttacatatacagccccatccaccctgccttcagttcctcccacctccgtctcctgctgagcagaggaatccagggccaaacacaagccagcccacagcctgggcatcaccaggattctaaaccctccctcctcttcttgctggaggacctgcacctagccacttctggtgaggagctgcgaagagggaaggaaggagctactgtcatctcttgagactataaaatccctagcaatattcattgactctcaaatatatgtctgtagatctaactttagtgttctgttcttaatatcttctcattctacatatgctccctgaacaatcccatccactctcatggcctcatctctgctttgctaaatctctgtgtccaatctcacttcttttctaagcaccagatctgtctatccagctgtctactgtacgtctccaccttgttgtcctgttggtacctcagacccaaccctgagctcatcatctccccgcggccaaaatctgctcctgtctgtcctcttagtttcaccatccagccagtcatgtaagccagaaatcttgttgacatctcattctccttcaccaatatccagtcaccatgtcttttcaatcctacctccttcatatttcttgaatctttccacttatttccatggttcagatgatctttacttggaaatctgacaaatgctcttacaaagctttctgtgatgaggctttcttctgtgtcctcttacactctctctaattggacttaacaagtcaggcttcctctagaccctgggattgctgtcctctctgccttctctatgtggctaaattctacttattatttctaaattacctaaggcagtagcttctccaggaagcctgatccataggctcggttagatatccatcctgtgctctgtacaataatctgtgataaccatgattttattattgtatgcttgcctatctgtccctttcaccacacttggagatttatgagaacagagaacagaaatttgtctcattcattttggtagacccaacaggaagtaagtgctcaataaaagtttgtagaagacaagataacaaaggaaaggagaaaaatcttgataaaaatttgggatattgaagtgtaaagtttctaaagtggtatgcctctagatgatgagagtttctaaatatggccatgggattgggaagtgaattttaggtagaggttgttggagtcaaggaagtcaatgggctgaagcactggataggctatccagttaaacagcgaagtctcttatgagatgtagaaaacttgaaccagatgtattcgtacttaataatagccagtacaatttattgaatatctactatgtgctctatgatatgtctatgtcatcttcagtgctcataaaagccaagtaagatggggaatttttgcaattattttaaagatgaagaaacagagacagagattttagaacttgcccaagataccctagctatgaagtgtcagaaccaagattaaaattcaagtctatttggttccaaaacctgtagttccttccagctatattatttggtctttgcaatgaatttgcacaaaattagagacaatagaaggagtaaagagtggtacagtcagatatatgaagagatttcagctgagaagagacttcagcaacattgtagagtgaagaatattactgctggcagaatgtaaaaggtgtccttgagtgacaaccaccagaacatccagtataaaataaaaaataaatagacatgccaacaaaaacccccagaaaataatgtgacctgctgtcaagaagaagcaagcaatagaatagaaactgaccctgagatctatatagctgtacgctgtccaaaagatgcactttaaatataaaaacacagatagattaaaagaagtttttaatgcaaaatatttactacagaaatagtttgcataaggaagttgatgtggcaatattaataccaaagcactttaagacaaaggatattaccagagatagaaaaggacatctcataattgaaagattcaactcatcagaaagacaaaagtcttaaatgtgtccacacctaaaatagacatttaagtatagggaaaaaaagccaatagaaacaaaagagacatagtaaatctgaaatcatattaagaaattaatatgcctctcacaataactgataagacaaggagcaagaaagtagggacattaaagatctgaataacactagcaacacactgacatttacaaaacattatactcaccaactgcaaaatgcaccttcttttcaaatgcacatgaaacattcaccaagatagaccatatgctgggttacaaaataagtctcaacaaatttcaaaggattaacattttaaataatattttatctgaccataacaatacaaatattgataagatgcctagagaatttccaaattctttaaaattaacacacttctaaataatgtaccaaaaaagaaattacaagagaaattagagaatgttttgaactaaataataatgaaaacaaaacatatcaaaatttgtgagatgcaactaaaggttatagctttaaatatctatcttagagagaaaagcttggaatcaatgacctaaattttcagcttaagactctagaaaaagaagagcaagttatacccaaagcaattaaaaggaaatcaataataaagaacagagcagaaatcagtgaaatagaaaaacatacaaacaatggagaatatcaacaaagccatattttgtttctttgaaaaagataaaattgacaatcgcctattaacacaaatcaagaaatgaaaaggaaaacataaattttgaatatcaggaatgaaagaggttttattaaagatatttaaaaggataaaaagggagccagggccgggcactgtggctcacgcctgtaatcccggcactttgggaggccaaggagggcagatcacgaggtcaggagatggagaccatcctggccaacatggtgaaaccccgtctctactaaaaatgcaaaaattagctgggcatggtggcatgtacctgtaatcacagctactcgggaggctgaggcaggagaattgcttgaaccagggaggtggaagttgcggtgagctgagatttgcaccactgcactccagcctggtgacagagcgagactccgtctccaaaaaaaaaaaggggagccaggcatggtggcatgcacctgtaatcccagctactagggagggaggcttaggcaggaggatttcttaaggccaggagttcaagaccagcctgggcagcatagtgggaccctcatttaaaaaaaaaagttttaaaaaatggataataagggaaaattatgaaaaactttatgctaataaatttagcaacttaggtgaaatggatacatgctgtattagtctgttttcacactgcaataaagaactacttgagactgggtaattcataaagaaaagagggttaggccaggcatggtggctcacgcctgtaatcccagcactttgggaggctgaggcaggttgatcccttgaggtcaggagtttgagaccagcctggccaacatggtgaaaccccatctctactaaaaatacaaaaattagctgggtgtggtgggggtcacctgtaatcccaactacttgggaggctgaggcaggagaatcgcttgaacctgggaggcagaggttgcaacgagccaggatcacgccattgcactccagcctgggtgacaagagcaaaacttcgtcccaaaaaatatatatatataagtaggtttaattgactcacagttccgcatggatggggagccctcaggaaacttaaagtcgtggcaaaaggcgaaggggaggcaaggcacatcttacatagcagttggcgggggcggggtggggtgaagagatgtaccatcagaacttatgagaaattgctcactatcatgagaacagcatgggggaagccggccccgtgatccactcacctcccaccaggtccctccctcaacatatggggattacaattcaagacaaaatttggttggggacacagagccaaaccatatcacatgccttacaaaaacataacttgtcaaagcttgaacaaaagaagaaaaataatagaaaatgaacagcctcatacctaagaaaagtttgaatgcataataaatgtttccagtcccagatggttatacagttgaattatatcaaatatttagaaaaaaagtacaacttatatatactttttcagaaaatggagaatactaagccatgatgaagacatttcaagcaaagaaataaactgttatctttcataaacctaaatgcaaaaataaatcctcactgaaatattattaaataaaattcagcaacatacaaaaagaataatatcttaagaccaaacggagtctatcctgggaaggcaaagctgactaaacattgaaaaatcaatcagtgtagctcacattaacagaataaaggagcaaatgagtaagtaatattagtagataaaaatcacttgacaaaattccaacactattccataactcccaggaaactaggaatagaagataactttctcaatttgatgaaaagcatctattatacttacagctaaatacatacttaatggttaaatattgaatactgtccccctaaaatcagttaaaaggcaagaacatactcactgcttctattcaacactgtactggagaccacatcgacgcaattaagaaaaagaaataaaagcttttaaaattagaaaagacaagttaaaactgtctgtattggcatgtaatatgattgtctacatagagaccccaaaggaatatttttttaaaccccataaaaaactactacaataaataagttaattcatcagggtcacaggatacagaatcaatccattgaaatcatttgtacttctatatcctagtaacaaaacattggaaattgaaattttaaaatatcacttaaaagtcatttaaaagcataaaatacttaggaataaatttaattaaaagcattcaagatctgtacactgaaaatgactaaatattgctgagatagaggaaatgtaaataaatggagaaatatatgatgttcatggatcagaagagtcagtatcattaaggtcttcattctcccccaaatgatctatagattcaatgcaatgccaagctaaatcttaacagatttttttttggtaagttgacagtcttattctgaaacttatatagcaatgcaaaagatctagagcagccaagcaactttgaaaaagaacaaagttgggacacctacactagtgatgttaaaacttgctatacagttgttgtaatgaagagagtgtggtattggtataaggatatacatatggactaatggaatagaacagaaaatctgatatatagtcatatgtggccagttgatttttaataaatgtgccaagataattcaatgggggaaaggatagccttttcaaaaaatggtgctggaacatctggatatatgcatggaaaaaaatgaaccatgtattctacctcaaaatctagataaaaataaattataggtggatcacagacctaaagctaaaactataaaatttttagaaaaaaattggagaaaaatctgtgtgaccttggttgggcaatgatttcttgggcacaaaaactaaattttatcaaaattgaaaacctatgcccttcaaaagacactgttacgaaaatgaaaaaaataagctattgacagagaaaacatgcatgatacatgtatctgacaaaggacttgaacctagaatacataaaaaactcttacaactcaataagaaaacaaacatcatcccaatgttttaaatggacaaaagacttacacttcacaaaagatgtatgagtgggcaacagtatacaaaaagatgcttgatattatcaggcatcagtgaactgcaaatttaaaccaccatgtgataattaaaaagactgacaataataagtgttttcaaagatgtagagcaactgaaactctctcactttgatggtgagaatgtaaaatggtacatccactataaaaaatatatgccagtttcttacaaaattaaatattacttaacatatgacccagcaattccactcttaggtattcacccaagtaaaatgagaaccgcatatcctcaaacttagtatacatgaacattcatagcagcattgttctgtataatggtaaatccacatctccacccaaatggctccaggtggtggcaagagataagagtttagaagcgcctctcccacccagcagactagctccctgctttgcctcctttcctttaaaaacaggccattcaggcatttgcctgaaaacttaaaatgacccacaccctattcccttacatatactgccagtccctccctccatccctcctctcctccctcattccctctctctctgtctctctctctgtctctttctctctctgtctctctcaatctaactcttcattgctgcctcaggtgacatgaggatggaggactgatctcccggctcattatgccctccttgcacaggattaagtaaaaatctttgaacttgtttcctattgttgtggtgtattgaatttgtccttctatctaaagaaccagaataagttttctgtgtgaaggactctctggtcacaggtcagacaactaggcattaggctgtccatcagataaaagaagtatcctgtgaaaggcacactgtaaacccccacactcagctcccctttatttcctgttagggcagggttgttggctgctctggtactagaacaccagtttaactgggggctctcagaaaaatactactcaggaataaaatggaacaaactaaggaaacacgcaaaaacatggatgagtctcaaaaacctgctgagtaaaagaagatagacatgatcaagtacataccgtatgattctatttatatgaggttctagaacagacaaagctaacctatagtgatggaaatccgatcaaataacaatgcctgtgatggtggtggcagagggattgattggctttaaaggagcatgaggaactttctagggtgatgaaaatgttctaaatatcattggggtggtgatgacacaggtgtgtacattagtcaaaattcactgaactgtacacttaaaatgtatacattttgttgtatgtaaatcatgtcttaataaaatttatttttaaaatttattattattattatttttagagacaaagtctcactctgccactcaggctggatggtgcgatcagggctcactcaagctcttgtgctcaagtgatcctccagccttagcctcccaagtagacaggtctacagcacacatcaccaggcccagctattttatttttcattttttgtagaaacaaggtcttgctatgttacccaggctggtcttgaactcctggcctcaagaaatctttccatctcagcctccaaaagtgttgattacaggagtgagccaccacctcccagcctaaagttgatttttttttaagtgcacatgtgatataactgtattctctttgactgaaatgattgcgctttcctgctaattgtgatcgatctggtttctatccttctcagcttccaaatcttattattcattaaccttcagttaatgattattcattattatcattattaaccttcggttaatgaataataagtcacagaggtaggatctagggagaagagagaagaaattcctcaattttagggagaatgtgggggagggagaatagcttactcaaatgtgaccaagtcccaacacgtcagattcacaaaattcctttagaaccgtgtgtggcaggaatagagggaacaggttgatactctcatgtggacttttacatgtcctcattattattcctcatgtcccatagacccagagaagagctgccagccagtgttggagactctgcgccaggccatggatggcactgtgtatgcccacagcaccttggaactgcagacgctgcagcctacagtcaacttccttgccactgtcacagtgccaggatactgtgagcgcccactgtgtccacgcctctttcgactcttcacagtcctggccctggaaagcatgacccaggccaccctgctggaaagacatgtgcctatcattcaggcttggcttgagcgtttcccttctgtggaacgggagcgtgctctggcacgaggtctggttagggcctcagtagaggcctgggaggctgtgtgcaattgcttcatgccttcacccctccacccacactaccacttctccctacactctgtgagccacctactgagcagcctgcagctgctgcccaacagaacaggctcccgaggttttgtggactatcccaaccaccaggagcacttgcgccgggtgtcaggcctgcgaggcacttgtctgaccgttatgatggccacacgcaatgtggtgcgtctttggttgcatgaggcacagagaaccttttgcgaccggctggacagccccagggaacgctcctactgtgccaagctgctcctagtagtagctcaaagtgtcttctgctgtgggccagggccccagcacctgggcaaggaccatcaggagagtgaggaggaggaggaggaggagagggtgcccgaagtagaatctgaaggggagttggcccagtgggaggacttcagcaacagcaatagtgaaacagaggaggaagaggaaccttatggccttcaggtcgccagagtctcaaactccagagatccaagtctaacaccatccataggaccagtaagcagggggatgaaggaaagcataagtcacaagataaggcaagagaaaggcacaagggcatccaactataggctccaggtaaggagatcattcaagacttggtggcagaagaaaccccagatggacctgatctcacccttgttgttaccagtgttactactacatccccaggaaaagccctcagacctggtcttcagtcaggagctgatactggggcctaactctgagacccccaacttgtacctggaacgacagtgggagaagctagaggagcagttggccacctcagctgctcaactgaagttgagcccccacctggcccggtgtcattccatggcccagcacgtggcccgcctggtccgggtgctggccaggccccggcagcatggcctgctgctctcgggggctctgggtactgggcgccacactgccatcactctggcttctagcatttgtcaggcccatttctttcatctaccatctgggtcagaggaggccattctccaatgtctacgagatgccagctggcatgctggcatgttaagccagccagtggctctgttggtacccagtggtgtggatctcactacacttcatcgcctcctggccctggcaacctcaggcagtttccctggccagtacacagaagcagatttggaccgcattggagaacacctccccagggagaaccttggtgtcaaacagaacatcaagaaggaaatggtgttgcagaggtgaggccaagaaccccatatgcgaatctgctctgctcttacgctgtcttggccaaaaggccaaaaggaattctgtgggctgccatgagggctgagaagattggggctaagtggtctggctgggactggggccaggaggggcaagcaaaggtaaaggggaggacattagctgagccctggcccacaggttccaccagcaagtgtgcagccaccttcacctgttcttcctgattggagataaacaggcccacaagcagctgccctccacccttttcctgaggctccttcaactggccactgccagcattgaccgctatgaaccctgggaccaagctgccctggccaaggtggcccagcatcacctggagggtgctcagagtgtgccccttgatgacggtaagccctttttacttgtccttaccactcatctctaccaggctctaatgagggttattacctaggtcagtctctctctctccctctctagagcctacagagcccccttcacatttcctacccttcttcctgagctaggagaggatccctttcctttcctgttttcctacaagctcacagagtgaggctaaagccatgcccattgcaggctcctggaagtacccagacctccaggcctcaattcccagtgtggccaaagccatggctcttatccacctttcggccacccactaccatgagcacctgtgccctgcattgccactcgtcacccccaagaccttcctagacttcctggacactttcctgatgctgcagcaacagacaatcctgaagattaagaacaaggcccagcggtgagtgtcccgtcccctgcagtgtacctccttctgctcctttgggtttcctcaccagcacattgtatctccagggtccagaatgccttggagaatctgagaatgctgattaaggagcacggtacccatgccaatctgatctttgacttggaacagcagctgaaagactccggcaaggtaaggagatgattttgaggcttccatggtggtgtcaaagcaggagcccaaaggggacttgaaaggaagcaaccagaatgaaccttaattcttgtccccctaagcttcccctttccctaggaaatctctctgatctccgctgcctcctcctttacagcttaggttcaaaagtttcccatgatacagctaagaccagattgattcttcataacaggtgaaacccaagcatctgcttctggctgcccctagtaccatgatcatgtgaagttcagtatgctgccaagatctctgtagattcccatgggggttggggcaggcattacatctcagtcaccactcactcacctcttagagttatcctctttttccataacactttgtccccataccctttcttccacaaaagcaacaaacaaaactgttgtatacagtgaggacatgtagatgggtgatggcagcagggagaaatttgtattatggcatagaaccagaagtaaatttataatggtatactagacaagagtgtcctgaattgtcttactcaccctcctctaccaggcattttccagtgaccaacttttcctttcctctctcgtctctctaacacctgctctacaatgtttttgagccgtcccatttttcctttagcgctcccttctagttgaaacctcaaaaccttttgctgtcatacagaacaatcttattctttgaataaacaaacttcttatatctggctaaaattggtgatgatagggcttatcacaccttctaaagccaaatactcctagttaaaggtgtcttcccaaactaaagagcagttttgtttttaataagaagaattctaaaatagcacctttttttcctactacacaagatgttgataaatattctggtataacttcagagcagtgaactagtgcccatctcacactcagataatctttctactagggtttcaggtcttaagctcctaatacctagccagctcttctgataagtgcctttaggactatcatccagtgccacacaactccagagacatggcatatgtcgtgtctactaatatggttttcactgtgttttacataaatggtatcccctggagttttaaaggtactggtgccctcctactattcaccacctaggatgaacagcttagattagacctcaagactcagttaagttgcaaagaaagaaaagaaagtcagagagcaacagaaatcccctttcccagttttttgccctacattttcccaagatgattaataccaggattgttgatctggtttaggggtcctagtattccttgatctgtgagtcagttacaccagagcagaacacagtaagccaaaggtctggataagagatgttcgtagtctcagggtcattcagagtcagatcccttggtcgttcattcaatagccataatagtgtgtacttcttccagtgttccccaccccaagaaaaggcattaccacccactgagccaaatcccaggactcattctgggcccctccatctctttactctcttatatttaactggttaattttttcattattgcactcaacaaaaatttattttttgttcaggcatttcttaatatttatgtctatgtcaatatatgcctacatttacatctagatggatggatagatagatagatgatagaatccttgcccacacctttctgaggtagctattcttttctcactttacagatgagaaaacaaagatccagaaaggttagggagacttccctaaccttataaggttgtgatgaggattaaacaagatcttacatgtcaagtatttaaatgtgctggcacatagagctcaataaatgttagttactattaatattaggttaggccaggcacagtggctcatgcctgtaatcccagcactttggaaggccactgccaatggatcacttgagcccaggagttcaagaccagcctgggcaacacagcaaaacactgtctctacaaaaaattactcaggcatggtagcacctatctgtagttccagctactcaggagtctgaggtgggaggatcacctgagcctgggaggttgaagctgcagtgagaaatgattgcaccactgcactccagcttgggtgacatagtgagaccttgtctccaaaaaagaaaaaaaagaaaaaaataggttagattgcttcctaataagaggagatagggcactatccttaccttcatggtgcttatagtttagcagaagataagaagatatagactcatccaggcaatgacaaaaccgtgttataacagagtaagttcagagcactccaaatatcaagaaaaactttctagagaaagcagagtgccccgctgtgcagcacagagcgtgtatataacatggtaggagctcaaaaacattcactaactgtataaacaaatgaatgaagtacatgacagttgatgcctgaaagttaggtcagatctgatcagtgtttgaaaggggccaagtgacagaatgtcccaggttgatataacagcatgtgaaaggcctagaggcaaaagagtgtgtgccacattggaggaactgaaagtcaggaatggctggaaagtagcgtgctaggagagagaaaagagatgagattgaaatgatgagtaggggcctggtcatgggggtattgtcaatcaaatgtagaagtgacaagtgttaatgacaatgattcagtttttagaaaaccagccaggctgcagtgggggaataaaaggagggaagtaagagtggaaactgagagaccagttaggaggccagtgtagaaggtcgggagtgagagggcctgagcatgagtgactgacattgggaagggcagtggacacgagaggcatttaggaggtagaattgaaaggtctcaaagatgggctggatttggggggattcaggagatggagccaagggtaacaactcagtttgttccttgggaatcttgccaccattctctgagaaaaagaatacacaggagaggagtcagattgcaggagagctgaggacgcataaccaatacattcatttggggacatgtggagtctgaggggcctgtgagacccccaagggaagatttccactaggcaaatgaatacacggtatggggcagggagggaacctagctagagagagagatttggcagttggaacgtaagtaggaatcaaagccatgagattagggagggcatttagaagtgtagagtgagaagagaaaggaggctctgaaaaaattgatgaggaatagttaagggctgacagaggaagagaatgagaaagagcagccagagaagttagagaaagcccaaggagaacacagtatcatgaaggccaagagaggaggatgcctcaagagggagggaactgtcttctgtgacaactgctgctaatgggtcaactaaaatatagagtagtgtaacataactgttacacgcatagtcttcgggtgaagcggctgcagaaaaagcaaccacacacttggggctgcgttactagatatataactcacagactaataagtgacagacccagagctcagcctctctctgtggcctacttggagttcaacgtggtcagtctttcaagtgaggagtgtgctacagttccaggatcatagggtcttctggggtttcccgcgtggcccaagatctggagctgcagggcctggatctgtctctgcagagtctcagcatgtttcagcagcagctagagcaaagcaagctcctatacaagcagcagctggaagagtgtcggcatcaagagaacctcattgagaacctggccaggcaacgggatgccctgcaagctcagcgagaggctttcctggagcaggtgggctcttcctgccgcctgccctgcactgctcctctctcaaaagagggcaacccctctaaggataccaagaggagaggatggagtgactcatcatggaatctcctggggggaggggacaaaggtaataggatggcttggggagtggcctctcatggggactccaaggagatgattcccctaaaaacaccttgaaggaagaacagaacatctcaggagctcacttcagagggtatctctcctcatttagatgagcaaggcatttctggagcctctgagccagctgcaggtggctgactttgaggagatacggagctatcgagcaccaccagaatctgtggtccgggtaactgatgcaatgtgtgacttgttccaccatgaaacaggctgggccagtgccaaacagctgttatgcactgaggatttttatcaggtaggaagggtggagcacaatgaaggaggataggggaggcataaagggacacttggcaaggctaaactgttgggtcaaggtccagagcatccgtggcttccccatcccgttaacatacatccttccaggagctggtgttcttccccaaggagaagataacagactcagagctgataaagttacatctaattctgaaggctccaggtatggacgatgcagccctgcgggcagtgagccgacctgcagccagcctggcagcctggctctgggctgttctgcactatgggctggcgcattgccggggactgcccacggacctgctgctgcagcaagtggaggcaacactcactcgggagcaggcccgcctgggctactaccagtttcaggcccaggagaccctggagcataatttggccctggctaagatggtggaggatgcccaagcttcccacaactgcgtggcaaagaccctcagtcaagcacagtgtgggcagtatcacaaatggcccatgaaggctgcactgctcacgcctatgcgtgcctggactacacagctccaggtaaccatccccctcccagatgtctcccccaaagttccttttatgccgttcgcctgctcctccctgtgccctcactgcctccctctgtccctctctgcactccttgccgtactttcctccacaccccaccttgccctccctctgccatatctctgcctgcaccctcctcactggcctacacagcctctggtcttcccttccactccagaagctgaagggacgctgcatgactgtgtttggagataccctcctatgttcagctgccatcatctacctgggtcccttcccaccattgcggcgccaagagctactggacgagtggttagctctgtgtaggggctttcaggaggctctgggcccagatgatgtggcacaggcactgaagcggaagcaaaaatctgtcagcataccaccaaagaaccccctgctggctacacactctcccttcagtattctgtccttgctgagctctgaatcggagcagtaccagtgggatggaaacctgaagccacaggcaaagtcggcccacctggcaggcttgcttctgcgaagccccacacactacagtagttgccgttggcctctgctgcttgaccccagcaacgaggccctcatctggttggacccgctgcctctggaagagaatcgatcttttgcgccagccctcactgagggtagaggtaagcaggcataataaatgcaatgcttccggagtatctgaactgcccaacactcagcctcatgtggtctttcccttcataatgaggacactgtatttttgtgatcaggatgtcccagatttcaccagcctatactataggaacaaatttggtcacatttattttttctctttattacaatgattctgaatctacatgactgattggtccatgatcttccacttccctggtctactcagcactacccaaatttatccaatgttcagaaatcctggggaatatttctgttggctctgtttggatcggggacccatctgggtggagtattggaaggaacattttctaggaaaaggaatagagtgtttattccccagaagaagaggctggggattgagtttgtgagaaaaatgtgaccttatttggaaaggggtcctttcagatgtaattaagttaaggactttgaatgagatcaccctgattcttatccggatgggccctaaatcctgcaagtgcccttacaagaggcagaagaaaaggcatagaaaatacagaagagaggctatgtgaagacagaggatgaataggatccctccctggaattttagagtaataattgtgatagccaacatttattgagtgctcactacgtgcacatctaagtgttttctatgtatcatttcatttaatcttcacagtaaccctatgaggtcgccactaatatcaaccccattttgcagataagaaaattgagtcatagagagcttaagcaactttcctaagatgtcttcctgcagaccttccctcatgaaatggagcccttcagtgaattcctcccctaaggagtctgattcctcccctaagaagagctcctctgaatctttctgccccagggaaaggcctcatgagaaatcaaaagagagagagtaaaacggacatgaaagaggaagatgatgagagtgaagagagtaatgaggctgaggaccagacaaaagagcagaaggcagaggaaagaaaaaatgagcaggagaaagagcaagaggaaaatgaagagaaagaggaggagaagacagagagccaggggtcaaagccagcctatgagactcagcttccatcccttccctaccttagtgttctttcaggtgctgacccagagctgggttctcagctccaggaggcagctgcttgtggtgagagctggtccccacccaccctggcccctttttgacttgccccattctgtgaccccacaggcctcccacacctcagtctaacttcagttcccatccttcatcccaggcactaactatattgaagcgtcttgtgggaaccctcctatcagccacagggaagctggtcagagccagacctcgtgcctggggaatggggatcatgggtgctggcattgtgggtagggtgcctttgcctccctctcacaggcctgcctgtgttactgaccaatgtggagctgggtctagggtgcgaagaactgcaatggctgctgcaacgggagcagctgagtccaccccaggtgcagcctggcttctgtctgtatctcagcaccaccctctccctctgtgccatggaaaaaggtgaggcccagagggcaaattgccagcacagttgtgtggacacactaggccctcagcaccagccctaagagggcttcactcaacctggcccagagcaggcacaggtctatagcagggagccatactccctgtctactctaccccctggctctgccaaggggaagaggttaagcatctcccatgttaccccaagtgctaggttgtgaactgctaaaggggctgaatgtgttggatctgggcctgaacatggaaatactggaagaacagatgctgcatgaaatcttgtgcagagagtatcctgaactcgagacccgctggcaggacctaaagatcagagccctagatacctgcaaggctgtggaggctgctgaggtgcttgggggctcagtctgtgggttgagatgagcattggatggacctgggtaagggggtggagatgaatgtagatgtttggggtctgtgggaaagggccagatccatccaacaaatgagtgtatgcaggagcggctgctgacgatgctgctgttccagaatccgaagcgtcagaagccagccaagtttctgcggaacatagtgagggcccaaggaaagctatgccagctgcgtgctcattgtgaagagttagaagggcagaaactacaggagatggtattgtgggcaccctatcgacctgtggtttggcatggaatggccatggtaaaggccctaagccaactgcagaacctgctgccacttttctgtatgagcccagagaactggctggcagtcactaagcaggctctggacagcatgaagccacgtgagattaatcacggggaggacctggccagccatctactgcaattgagagcacacctgacccgccagctgctgggcagcaccgtgactgcactgggccttacccaagtacccttggtgggtgcattgggcgctttggctctgctgcaagcaacagggaaagcatcagagctggaaagactggcactctggcctggactagcagcctctcccagcacagtccacagcaagccagtctcagatgtggctcgaccggcctggcttgggccaaaagcctggcatgaatgtgagatgttagagctgctgcccccatttgttggcctgtgtgcctccctggcaggccactccagtgcttggcaggcttacctgtcactgtcatccacagtgctgggtcctgcacctgggccagggcctgagccactcagcctcctccagaagctgatcctgtggcgcgttctgcgacctgagtgcctggcaggtgccctggcagacttcaccactagcctcctgggtcggcccctggatgaaaacacgtatgctcccaccatgccctttaaacatagtcaggctactcagcccatgctgatcttgttgccaccgcctggccacccctcagccactctgcatcctctgactgtcatccagaaactggctgccaagtatcagcaggtttgaacctagtttcttggccacagagtgaccaggctcctgtgggctggggcatgggggaccccctccaagcattttcatggatctttctgtactacgtagggactttggggatcatggtagcattagtttgggtccctcgggtcaccctaggatcactttgagtcatgctgccatctcttttttggtccccaggggcagaagcaactgcaggtgatagccctgggctctgaagcctgggacccagtctcagttgtggtcagcactctatcccaggctatgtatgaggggcactggctggtgctggacaactgtcatctgatgccccattggccgaaagagctgctacagctcttgctggaactgttaggcagagccaagggtgagtttattgcctagattggcttccaggatcctatcctacacttgggccttagcttgaaatctcaggcctcatggccagtgacctagcaccaaacttgtccacttggccttgtatctgactcctgacacccctagcctcaagtctgattcctagacttctgcctgaccctttatccaaggactgatctcagacccttgtctgactctagtggttgcagacctggaatcagaacagcttttagaccaacctgaaagcaggaatgtaagcactgttcacagagattttcgtctttggcttattgtgcctgcagagtctagtgcttctttgccaggtgaggagcttaaccccctacaggctctcaaattggaagtgggagggcaactgtgctgtgctgactcagcactctccttcctccccagctgtgctgactcagcactccatgcctgttttctggaaccagtccctggagctgggccatgttttgattgacagtgtggagctagcccagcaagtactctacatgcaaccccccacccaggcactacctctgctcctcctccatggcctcctgctacaccggcagctctatggaacaaggctgcaggcacacagggggcgctggtgagggacccccacccattcctgctcagtcaatcactcaacaaacattgagtatcttccatatgctgggatgagtaaaactaattcatctttggaagctccaaagagcaagggcaaggggaagtcaaggaaggcttctccaaagactttgagattttactttgaattgagtcttaaaagcagaggcaaatcaggtagagatgggcctttctgagcagagggacctaaactcagtagaagggaggagacttgagtgtggttgacgtggacatgctgggtgttgaggagggagaagtaaggttcattataaagggcctttaagactagggcaaggtaggccaggtacagtggctcatgcctgtaatctcagcactttgggaggcgaggcggatggatcacgaggtcaggagatcgtgaccatcctggctaacacagtgaaaccccatctgtactaaaaatacaaaaacttagccaggcatggtggcaggtgcctgtagtcccagctacttgggaggctgaggcaggagaatggcgtgaacctgggaggtggagcttgcagtgagccgagattgcaccactgcactccagcctgggtgacagtgcgagactctgtctcaaaaaaaaaagactagggcaaggtgcctgattttatcctgaagacagtgggaagccactgaagggttttaagtagaagaagaaacaatatcctttttgtgtgttggaaggatcactctggatgcaacatggagaatggatcagaggaggcaggactgggggcaagcagagcagctttaggagactctggaagtctccagggaagagattgtggtatgggtagtagggtagtagccatggaagggatagagaataaatatggggtgaagaggaaggaggtgtcgaggatgactctcagatttttgctttagataattgggtggctggcggtacctctcactgaaataggaggtggaacaggttttgtggggggaaatgatgatttcagttgaaagcaagttgtatttgaggtgccaagtggcaatgaacccgaagctcaggagagaggtttgaactgaagacaagacttgacagtcctcagcatatagatgatatgtgaaaccctgctttccgctccccttctctaggagtcaagtgactctaacccaggttcttcagacccaagaccagctgtgggcaagtcttagcaatccccgtgctgccatgcaagagctggctggtgagacccttcctctcccccttggagtcatcagcccccaggagagcctggaagagggtgggggtgggatacaattcacagctttggttttggcggtggtggaaactgaaggtactggaactgagagactctaacctcatcttcagcttcagttttctacgggggtcctctgggggacactgaggacagggaggccctgattagcctcacacaagcctgcctgagccccagtagtgggagctgggtccagccacacacacctcagtctttgctggccacgctcatgcccctcccaggtaagcctcactcaggtatctgttttggggtagggaatagtgcaatgcaatgccaccccccacagaaatgtggacagcagtctcaataaaggtatatgagggggtaatattcatactgttatgggggtgatggcagtaaaggctcagaggaaggcctactctctcgagtctagggtggggagagtccatcttgtccctcacccctcacctctatccccaagagctaagggagctggatgcaatggcagagtgcaaggcccagatgcacctactgccctcaccacctgaaccccggctctgcggactgagtgagggcccccaagcctggctgttgcgacgccagagtcgcgctctcttgagtgcgctgcagcggagttcacccgtgtgggttcctgagtctcgaagaggcgcccagcttgcggaaaggcgactgcggcaacgcctagtgcaagtcaaccggaggctggagtcactgcaggatctgctgacccacgtgattcgccaagacgagtccgacgccccgtggtcagtgctggggccaaatgcacggcggcctctggagggcgtcttagagaccgaggctctagaactgagccagttggtgggcacgctacaacgcgaccttgattgcctgttgcagcagctgaagggcgcacccccgtgcccctcccgccgctgtgctgcggtggcccacgctctctggactggccgcctacccttgccttggcgacctcatgcgccggccggtccgcagccgccctggcactggctgcgacagttgtcgcgccgtgggcaactgttggttcgttacttgggcgtgggcgcggacgcgagcagtgatgtaccagagcgcgtcttccacctgtcagcctttcgccacccgcgccgcctgctgctggcattgcgtggggaagctgccctggaccagaatgtgcccagctcgaatttccctggtagccgaggctcggtctccagtcagctccagtataaacgtctggagatgaacagcaaccctctgcacttcagggtatcttcgcgccgcccctcgttcgcggttccagtcccctcgaagtctctaattacacctcgcagttaccccttcttggtgatcttgcccccggtaaccctgctagcttctccgatctcgcttcaccacgacctcctacccgctaacccccacttcccacctgccacctcccagcttcctagccttgcctgaccagcttctgacgcccccaggtggagaatggtccaaatcccacggttccagagagagggctgctgctgatcgggctacaggtcctacatgcggagtgggacccaatagctggagccttgcaggacagtccttccagccaacccagccctctgcctcccgtcagcatcagcacacaggccccgggcaccagtgacctgccagccccagccgacctgactgtgtactcgtgtcctgtgtacatgggagggccccttggcaccgctaagctgcagagcaggaacatcgtgatgcatctgcctttacccaccaagctcacccccaacacctgtgtccaaaggagggtccatgtgtgcagcccacccctgtcttgagcccgtctaccaaaataaagttgtagtgattccatgaaagatttctgagatatgggggtagagtagggtgtgtgcacaccaagaaggcagaatgtgacacactaggagaaaggtacagtgtgcataactgagaaaagaggaggtatattcacaccgaaggtagaagagggcatgtgcctggcagccgggaaggggaaagtgtgggtacagttggggtggggtgggacttggtgttaatcatgtatccaagaagctaggcagacccagcagtggctgacacacagaatcctaaatccttgccccgctctctactgtggtctcagcacttgtgctaaatccacaagggatatgtttgaaaggagaacattagcactcaaaattctttcttaaggcatttagtggtgttcttggcagtgcctcaatcctgccctaccactcattcctctcctacgatggattctctcagtgagtcatgcatatgaaaaaagccaagtaagatacaaggtcctatgttcattcaacaattattcattgagcattccttggaaccaggtattcttctatgtgctaataaggttattctagtgtagggcaacaggcaataaaaggccaacatataaataattttgatgattttgaagtcctataaagaaaacaaaatagaccgatgcgtcaagagggtatgtgatgagacgggagcagttagtataatctgagtggtcaaggaagctttctgcatatttgaaagtagctatttaaagatctagaaggaatattcattcaggtagagccctcagtaggtacaaaagtcttgaggcaggaacaaccttgaagtgttcaagaaacagcgtatgcagccagagcatggcgagtgaggggcagagcgacccaaaatgatgggaacgtatagaaaggggtggctcacgtggccgtggtaatgatcttgtatttttcaaaagtataatgagaatgtattgtcaaatagtaggtgggagagtatatgatctaatttgcattttttcaaaggtcactctgcctgttctatggtggatggatgctagaaaagccagggtgacaaggtagaagatctatttggacccaactgaagtaattcaagtaagggataatggagtttgggcaagggtttaaatagagatgaagaactgacagatttaagaactattctggaggtaaaaccagcaggactgatggaatggatgtggagaataaaggaagaggaagaatctagggtgatttggattttaagcttgagaaactaggtgtatcatgtgtcattaactgagatgggaaatttgagggagcaagcagctggagctaaggaatcaagagttctgctgctttgatattttctgttattattagttgcatgactgcctgctaggccagggcgagcctgtccgacaaaagttgagttagagtatggcagaaccaaaggcctatatgagcttcactccttgcccccaagcatcaaaacttacgtagtattaataaactcagctcccttgctctatggctaggtaccagctacgtggtgggaggaaatgcaaacagaagtgtatacaggcatacttgaagctattgtgggtttggttccagaccaccacaataaggcgaatattgcaagtcacatgaactttttggtttcccactgcatatgggttacatttacactatattgtagtctattaagcatgaaatagcattatgttaagttaaaaaaaaaaacaaggtataccagcctggccaacatggtgaaaccctgtctctactaaaaatacaaaaattagcgaggtgtggtgacgggcacctgtaatccaagctactcaggagactgaggcagcagaagaatctcttgaacccaggaggtggaggttgcagcgagccgagattgtgccactgtactccagcctgggtgacagagcaagaccctgtctaaaaaaaaaaaaaaaaaaaaaattgcataccttagtttaaaaatactttattgctaaaaatgctaataatcatctgagccttcagcaaatagtaatctttttgctagtaatcttttttgccttaatattgatagctgctgatcagggtggtgactgctgaaggttgtggcaatttcttaaaataaaacaacagtgaatacgagtccatatcaatggactcatattttcatgaagaatttgtctgtggcatgtgatggtgttttacagcattttacctacagaacttatttcaaaattggagttaatcctctcaaaccctgctgttcctttattaactaagtttatgtaatattctaaatcatttgttgtcatttcaacaatgttcacagcatcagaaatatagattccatctcaagaaaccactttctttgctgatccataagagcaactgctcacccattaaagttttatcatgagattacagtaactcagtcatatcttcaggctccacttcttattctaattctcttgctgcttccaccacatctgcagttacttcctccaatgaagtcttgaactcctcaaaatcatccatgagagttgaatcaacttcttccaaactcctgttaatattgatattttgacctcctatcatgaatcaaaaatgttcttaatggcatctagaatggtgaatcctttccagaaggttttcaatttactttgcccagatccattggaggaatcactatctatagtggttcctatagcagcaatagtctcacaaaatgtatttctttttttaaattttcatttctttacaaaatgaatttcttaataacactataagactatagcagcaatagccttacaaatgtatttcttaataagatctgaaagtcaaaattactctctgatccatgagctgcacaatagatgttgtgatagccggcatgaaaacaacattcatctccttgtacatgtccatcagagctcttcggtgtattgccaatgagcagcaaaatctttaaaagaatctttttgttctgagcagtaggtcttaacagtaggcttaagatagtcagtaaaccatgctgtaaaccgatgtaccgtcatacaggctttgttgttccattaagacagcacagacatagcagatttagcataattcttaagggccctaggattttcggaatgttaaatgagcattggcttcaacttaaagtcaccagctacactggcccctaacaggtggtcagcctgtcctttgaagctttgatgccaggcattgtcttctcttctctagctacagtaagtcctagatgccatctccttccaacagaagggtgtttcatctacatggaaaatctgttgtttggtgtagccaccttcatcaattcactgcagcttccacattagcacttgctgtttcaccttgcagttttatgttatggaaatggctttccttaaacttcatgaaccaatctctgcaaacttcagacttttattctgcagcttccttgcctctctcagccttcatagaattgaagagaattagggccttgtcctggattaggctttggcttaagggaatgttgtggctggtttgatctgctatccagatcactaaaacttcctccatatcagcagtaaggctgtgttttgctttatcagtcacatgttcacaggaattgcacttttaatttccttcaagaactttttccttgcattcacaacttggctaactggcacaagaaacctagtttgtagcttaccgtggcttttgacctgcctccctcaccgagcttagtcatttttagcttttgatttaaagtgagagacatgcaactcttcctttcacttgaacacctagaagccactgttggattattaattggactaatttctatattgtttgtctcagggagcagggaggcccaacaagagggagagagatgggggaacaggcggtcagtgaagcagtcaaaacacacacgacatttatcgattaagtttgccatctcatgtgagtgcagcctgtggtgcccccaaatgattacaataccaacatcaaagatcactgatcacactgatataataataatgcaaaggtttgaaatactgtaagaattatcaaaatgtggcacagagacaaaaagtaagcacatgctattgggaaaatagtgctgatagactagctcaaaacggggttgccacaaatcttcaatttttataaaacacactatgatgtgcaataaagcacagcaaaaaataaaatgaggtgtgcctgtactgagcatcactcttcacaacctcttcaaaatggtaactcaccagtgagtgtggtgcaactgatgttctttaacaaaaggctgagcagagaggcaaaaactcccactttcctcagagcccttttctacagtcaactagggtgcatggctgtgccttcaggaaaggagataagtagagtattaaaagaagtccttttggaaaaatgaaccatctgtctatgtttaccattaccactatttgtcctccagtgggagcagggaacaatagtgagatatctgtaaaaccatctgaaattggttagaatattttctacatatccatgccattttctagactgaagtcattcttgaattatgcccagccaagttgttaaactttgtctagtagagattattaaatgagttccatatgacagcatagcccaaatacaatgactgctatgtaaaaatgttccagatttgataattgcactattaagttctactagagcaattaaaatcccattaggaagttaaaatcccaaacaatgaaaggaaggaagaagtaagaggcttgacaaaggggagaaatatgtctcttcccattctgatgaacgggggtaaatggagtagagacaagaaagggaagaatatgatgtaatcaacctgacctggggctgcgaagcctcagagaaggaagcagcagcgccaagggcaaagaggcttttgccttttccctactggaactgtggaaggaagctgttctgtagcacggatggactaactgtggtcccaacagcattaagagagcagagcagcatggtcaggaagaggtgtctcttaatccctatatggcgtagatactgactagagaggctttaggcccacaggagtatgcggcagagaatcactggggtttccagcaccaaagagagttgttgagagagggccaaactggggggagtggggaggaacagggggcacaagaccacaaattcatcagctttagaggcaaatgttggcagaatgcccaggtatgaaactgagccaactacccagaggattccaacttgtgcacaaccaaagccagtgttaggcttgaggatcccttcagtctaacatcaaaaggtcacataagccctcctctctatacccagatgccactttagagaggagcagcattagaatgggaggaatttaaaattctgagcatttatttcaaagagaataaatgaaacctaatgaaatgaaaccaaatttatttccagcctcttccactacccagtgaagaggaaggagtaagatttgtgaggaaaatcagatcagtaattgagaaaaaagctacattttatttatgtatccaactttgtaagaaaaattgtgatcctgctctgtatactacatagactaataatccaaaaacgaaaaaaatctgactagcactctgcagctcacctaaaaactcatttagttttgcagctttacagtctaatttgaaatttatattcagaacaggataaatgggggaaatgtctgaaatattaaaaaatgacagtttcatacactaatgcttatgaagccctagtatctgtaaaataggtactattattattccattttatagatgaggaaactgagacacacattcagtaaactgcccaaggtcacacggccagaaaatggtagaacctgttttggaacccaggcatttgtctccagaatccatgatctctacagcattctgttgcctctgtcataccaagatttagtgagatagcggaaaacaagaatcctcaagcattgttggcagatgcggaaactggtgtagttactctggggagcaatctgacagcacttagtaaaattaagtatactctgttctaccaattccactttcaggtttatgtctcagatggtcacacacaaaatgagctgagactttgagaggctgaggtgggaggatagcttgagcccaggagttcaagaccagcctggacaccatagacagaatctctctctgtaaaaaatttgaaaaattagctcggtgtggtagtgtacacctgtggtctcagctacacaggaggctgaggtgggataattgcttgagcccagggggtggaggctgcagtaaactgtgattacactacttcaccactgcactccaaacttggtgacaaggtaagactatgtccccaaaaaaaaaaaaaaaaaaaaaaaaggaaagagagagaaagagaaagtgaaggaaggaaggaaggaagggagggagggagggagggagggaggaagagatttgggaagtgttctctcctactgtactttctaagagtttatgtaggagtgatatttcttaaaaggttgatagaatttgacagtaaagccatctgggcctggagtttttttgttttgatgtgtgtgtgtgtgtgtgtgtgtgtgtgtgtgtgtgtgtgtgtgtgagagagagagagaggtttttaatgacaaattctatttctttagtagatacaaggctatcagattttccacttctttctgagtccattgtggtattttcaaaaattttatcttagatagaacgtaagtttttgaagttactggtataagttgttcataatagtcccttattatccttttaatgtctgtaggatctatagggatgtccctgctttcattcatattttcagtcttcgtatttttgatcagtctaaataaaagatttgtcaattctattgatcctttcagagaattagctttgtgtttcattgattttctctattggttctccagtttctattttatcactttcaacttttatctttttaaatttcctttcttttacttatttttgttttaattttctctttttctagcttcttaatgtggaaacttagattatttattttagggttttttcgagttttgtttttttttttaatacagagtcagagtctctctctgtcacctaagctggagtgcagtggcacgatctgggctcactgcaacctccacctcccgggttcaagcgattctcctgcctcaacctcccgagtagctggaattacaggtgcgtgccaccacgcccagctaatttttgtatttttagcagagatggggtttcaccatgttggctaggctggcctcaaactcctgacctcaggtgatccacccaccttggcctcccaaagtgctgggattacaggcatgagccaccgtgcctggccgattttaggtgtttcttatttcccatataagcattgaaagctatacatcactctctaacatttatttagctgcatctcacaacttttgctttgttgtattttcattatttctatttatttttctgtggccaggtggcacacagagagaatctgtgcacttgctggaaggagagcagagtgattgtgggactttgcattggaactcagtgctgcctatctgggtggaaaacagcaaaaacagaatccagccagtgcccacgaagggagaatttagaccagccccagccagaggggaaatgtccattccggtggctggaacctgagttctggcaagccccatgaccataggctaaagtgccctggtgtcctaaataaacttgaaaggcagtctaggccacagggactgcaatttctgggcaagtactggtgctgtgctgggcttggagccagtggacttggggtgtacatgacctagtgagacaccagctgaggcaaccaaaggactgcttgcattacctgtcccccaaccacaggcagtgcagtttgcagctctgggagagactctttccttccacttaaggagaggagaggggaaagtaaagagaactctgttttgcaacttgaacactagctcagccacagtagaacagagcacgagcaggagtcctgagacccccatttcaggtcctatcttctacaagatagacacaccctgggccagaagggaacccacgtccttcatgggaaggactcagtcctggaaggattcatcacctgctgactaaagagctcttgggccttgaataaacctcagtggttgtcaggcagtacttacccaggggcctgcagtgagacccagtgctgtgagggcttcaggggtgacccaacacattcctagctgtggtggccatggggagatactcctactgcttgaagaaaggagagggaagaataatggggactttgtcttgcgacttgggtacagcttggccaaggtgaggtagagtactaagtgggctccctggggttcctgattccaggccttggttcctgggtgcatttcttgacctgccctggaccagaggggagtctattgccctgcagggagacatccaggcttagcagcattcaccacaagctgactgaagagccattggaccttgaatgaacaacggtgttagccacgcaatacttgctgcaggcttgaagtagtggtggccatagggagagggtccttctgcttcaggaaaggaaaggaaagagtgggaaggacttgtcttacggcttgtgtgccagctcagccacagtagaataggccaccaagtatattactaaggttcctgacttcaggccccagctattggatggtatttctggactgaggggtagcttgctaccctgaagggaaggcaacaagcctggctagatgcaccacctgctgactgtagagaccttgggccttgagggaacatcagcggtaaccaggcagtagtcactacaggccttgggcaagacccagtgctgtgctggcttcaggtgtaacccagcataatcacagtgatggtggctataggggtgcttgtgtcacctcttctccagctccaagcagctcagcacagacagacagactttgtttgtttgggggaaattaagagaagagaacaagagtctctgcctcataatcaagggaatgctcatgaatcttacccaacaccatcaaagtgctacctctatgaatctacaagagccacagcaattactgggctgggggttctcactaatgcagatatggctgcagtgaccaaagacttagatcacaacactaaattctctttgaatatttggattgcattccaaagaaggatggttataaataaacccagactgcaaagagtacaaatacctaattcttcaatgcccagacactgatggacatccataagcatcaagaccatccaggaaaacatggcatcactgaacaaagtaaataaggcactagtgacaaatcctggagtaacagagatgtgtgaccttttggacagagaattcaaaacagcttgttttgagaaagctaaaaaaaaaaattcaagataacacaaagaaggaattcagaaccctatcagataaatttaacaaagagagtaaaataatttaaaaggatcaagcagaaatcctggagctgaaaaattctattgacatactgaagaatgcaatggagtctttcaacagcagaatggatcaagcagtagaaagaattagtgagcttgaagataggctatttgaaaatacacagaggaaacaaaagaaaaaaaatttaaaagccaggcacagtggttcacgcctgtaattccaggactttgggaggctgaagtgggtgaatcactgaggtcaggagttcaagaccagcctggcccacatggtgaaaccccgtctctactaaagatacaaaattagctgggcatggtggcatgcacctgtaatctcagctacttgggaggttgacacaggagaatcgcttgagcctgggaggcagtggttgcagtgaaccgagatcgtgccattgcactccagcctgggcaacaagagtgaaattccgtctcaaaaaaaaaaaaaaaaagaaaaaaaataccacccgggaaaatcaccttcacaaaaaggaagatggatggacagatggaagaaaggatcacaaaacaaccagaaaacaaataacaaaatgacaggagtaagtccttacttatcaataataacattgaatgtaaatgcactaaaatctccaatcaaaagatatagaatggctgaacagatgaaaaaacaagacccaataatctttttcctgtaagaaacacccttcacctataaagacacacatagactaaaaataaacaaatacaaaatgatattcaatgcaaattgaaaccaaaaaagagcaggagtagctatatttgcatcagacaaaacagatttcaagacaaagaaggtcattacataatgataaaggggtaaattcagcaagaggatataataattgtaaacatatatgcacccaacactggagcacccagatatataaagcaaatatctttagaactaaagagagagataggccccaatacaataacagctgaagacttaattaccccactttcagcattagacaggtcatccagacagaaaatcaacaaagaaatgtcagatttaatctgcactatagagtaaatggatcttacagatatttacagaacatttcatccaatggctgaaggatacatattatattcttcccctcaacacgtgttattttcaatgataaaccatatattaggccataaaacaagccttaaacatttcaaaaatatgtgaaaaatatcaagtatcttccttgaccacaatggaataaaatcaataataggaggaactttggaaactatatgaacacatggaaattaaataatatgcttaatggccagtggatcaacaaataagaaaaaaaatttaaaaatatttgaaacaaatgaaaatggaaatacgacagaccaaaatctacgggatataacaaaagcagtactgaggaaagtttatagcaataagcacctaatcaaaaaagtagaaaaacttcaaatgaacaacctaatgatgcatcttcaagaactagaaaagcaaaagcaaaccaaacggaaaattaaaagaagacataacaaatatcaagcagaaataagtgagattcaatttttaaaaatacaaaggatcaataaaatgaacaggttttttgaaaagataaagtcaacaaacctttagccagactaagaataaaagagagaagacccaaacaaaatcagatgaaaaaggagtcattacaactgataccacagaaattcaaaggatcatcagagactatgagcaactaaatgccaataaactggaaaagctggaagacataaattcctagacatatgcaacttactaagattaaaccatgaagaaatccaaaacctaaatagaccaataacaagtaatgagatcaaagccataataaaaaagtcttccagctaagaaaagcacaggacccaacagctgcactgactaattttatgatacatttaaagaactaatatgaaccctactcagactattcaaaaaaaaaaaatagaggagggagtactttgaaactcattctgtgagccagcgttaccctgatagcaaaaccagacaaagacacatcaaaaaaaggaaactatatcactgatgaacatttatgcaaaaatcctcaataaaatactaggaaacctaattcaacaccccattaaaaagatcattcatcatggccaagagggatttatcccaggaatgcaaggatggttcaacatatgcaaatcaatcaatgtgatgtatcatatcaacagaatgaagaccaaaaaccatatgatcattttaattgatgcttttaaaacatttgataacactcaacatccttttatgatttaaaaaagccctccaaaaactgggtatagaaggaacatacctcaacataataaaagccatatattacaggcccacagctaatatactgaatggggaaaaactgaaaacttttcctctaagatctggaactagacagggatgcccattttcactactgtcattcaacatagtaatagaagtcctacctagagtaatcagacaggagaaaaaaaaataaatggcatccaagttggaaaggaagaagccaaattatccatatttgcagattatattatcttttatttggaaaaacctaaaggctccaccaaaagctattagaactgataaacaaattcagtaaaattgcagaatgtaaaatcaacatacaaaaatcagtagcatttctatatgccaacaacaaacaatctgataaagaaatcaagaaagtaatcccatttacaatagcaacaaataaaataagatacctaggaataaacttaaccaaacaagtgagagacctctataatgaaaactataaaacattgatgcaagaaactgaagaggacacagacaaaaaattgatagatattccatgttcatggattggaagaactgatattgttaaaatgtccgtactatccaaagcaatctacagattcactgcaatccctatcgaaataccagtgacattcttcacagaaatcgaaaaaataatcttaaaattcatatagaagcacaaaagacccagaagagacaaagccatcctgagcaaaagaacaaaactgaaggaatcatattacctgtcttcagattatactacagagctataataaccaaaacagcatggtactgccaaaaaaacagacacatagaccaatggaacagcatacagaacccagaaataaatccatacatctacagtaaactcatttttgacaaaagtgccaagaacatacgttggggaaaggacggtctcttcaataaatggtgctgggaaaataggatatacatatgcaaaagaatcaaactaggctcctctctcttgccatatataaaaatcaaatcaaaatagattaaagacttagatctgagacctcaaactatgaaactaatgaaagaaaaccttggggaaaccctccaagacattgatcttggcaaagatttcttgagtaataccccaaaagcacaagcaatcaaagcaaaaatggacaaatgggatcacatcaagttaaaaagcttctgcacagtaaaagaaacaatcaacaaagtgaaaagacaaaccacggaatgggaaaaaatatttgcaaactatccatctgacaaaggattaataatcagaatacataaggagctcaaacaactaactctataagaaaaaaaattggccaggtgcagtggctcacacctgtaatcctagcactttgggaggctgaggcaggtggactgctcgaggtcaggagttcgagaccaacctggccaacatggtgaaaccccatctctactaaaaatacaaaaactagctgggcgtggtggcaggtgcctgtaatcctagctacttgggagtctgaggtaggagaatcgcttgaacctgagaggtgggggttgcagtgagccaagattgtgccactgcactccagcctgggtgacaagaggaagattctgtaccccccaaccccctccaaaaaaaagaaaaatctaggctaggcatggtggcttacacctgtaatcccagcactttgggaggctgaggcaggcagatcacctgaggtcaggagtttgagacctagcctggccaacatggtgaaacctcatctctactaaaaaaaatacaaaaattatccaggcatggtggtgcacacctgtaatcccagctactaggcaggctgaggcatgagaatcgcttgaacctaagaagtggaggctgcagtgggctgagatcgcgctactgcactcaggcctggatgatagagattccatctcaaaaagaaaatttttaaaagaagaaaaaatctaataatctgattttaaaaacaggcaaaaaatcttaatagacatttctcaaaagaagagatacaaatggcaaacaggtaaatgaaaaggtgttcagcatcattaatcatcagataaatgcaaatcaaaactacaatgagatatcatctcacctcagttaaaatggcttttatccaaaagacaggcagtaatgaatgctggtgacgatggggagaaaataaacttttgtacagtgttggggggaatgttaattaatacaagcattgtggagaacagtatggaggttccacaaaaaactgaataaagaactaccatatgatccagaaatctcactgctaggtatatactcctctccccaaaaaagacaaatcagtatatagaaaaggtatctacactcccctgtttattgcagcactatttacaatagccaagatacagaagcaacctaagtgtccatcaacagacgaatagataaagaaaatgtggcacatatacagattgaaatactatattcagctataggaaagaatgagatcctgtcacttgcaacaacatggatggaactggaggacagatattaagtgatataagccaggcacagaaagacaaactttgcacgtgatggcagcggcaggccgtctggagcggccgctgccatccctctggctgcacagggaggcacagccagggctgcatgctccatggagccggcggaagctcccctggtgctgttgcacagctgtggacccaggcatccctgtgctctcgggaccaggagcaggcgggagccccgccctcctgggcacagctgcagccactcaaaccaaggctatagatctgggcctcccgctacaaagagcaggcgggagccctggtctccatgcgtggcttctccctgctgtcggcacttctccgatctcacagcacagtcggggccgagcccaggcattgttatgtcatggcccggccgggtgtgcacatgctcagggcagggctgccacgccagcctcctgctgcctcggctccctctgggctttgggcaccaatgagcataggagggaagctgagggaggggctgagaggaggcagacaggttcctggcataagggggtaggtcttgggtgaggccccaccttcaggccagggagggcctgaaggctggggtctgggtttccagtaccactgacaggagtgggaactcgtggcacttttcccagccagccatggccgccatggaccaattggggggcacctctctgctgagagctgaacatttgttgggatgagtggcctagtggagaggagctaccctctctgctaggagctgaatacttgttgggataccctggctacagaaaggagctgccccctgcggggttcttctgagctgttctattgctcaataaacctcccctttgtcttgctcgctctccacttgtctgcatacctcattcttcctggtcgcaggacaaaaactcgggacccaccaaagggcgaggctaaaagagctgtaacacaaacagtgctgagacatgccccttgcccaccacattgggggcaaagagaaggaaagaagagctgcagcccttcaaagagcccagatctgggagctccccaagccagggctgtgaccccctctctgggaccctgcaattcctggtgtctccaagtttatgggcaccaatgtgttccctggtgccagccgtggaagctgcttgccatgcacctggtctggctgcagactcgcagagagctggcacctgtgctggcaactggagctgctcgccttgctgcagcagccagcatgcccaactgtgtgcagtagccagaccctgtgtttgctcacactctccttgccattccatgcctgacttgctcttggcaggcatgggacccaggccagtagagtgagccaagcacagcctgccaggctgagtgggtgaaatgagcccagcgggcccgagcaaaacttgggcaaagaagctaccggccacaaaggtttctggacagaaaaacaacaccccaaagaccccgtaacatatggtctcgctcatttgcgggagctaaaaattaaaacaattgaactcatggagataaagagtagaaaaatgggaaagatagtggtggtcagtgtgggaggtgggcagacaaatgaggataatgggtacaaaaatatattcatagttagaatgataagatctagtatttgatagcacaacagggtgattacagtcaacaaaaatttattgtacattttaaaataactaaaggagtatgattggaatgtttgtaatacaaagaaaaaaggataaatgcttggtgtgatggatactccatctaccctgatgtgattactatgcattgtatgtctgtaataaaatatctcatgtaccccataaatatattcacgtactacatactcataaaaattaaaaagaaagtagacattggaagaagtaaggaataacataaggaataggaaatgggtgcatccaggttatgaagcactgcattgggaaatagtttgtttcatttgttcttttgcttttattagacattctcagcaaccgaaagtgctatagatcaattggggttacttcattgaaaagttttcccatgacaatctcagacactgctgatgagaatttaaatctgttcaataagtctggaaggcaatttagcaacacatataaaaaaaacttttaaattgtacattgcccttgacctagtaaatccccctataagattattttccctaaagaattgatttttaaaaagtcgttaaacatgtatatatagaggatgttgattgcagagaacatgaacatttacaaaaatcagagaaaacaaatatccaataatacagtactagttagattataatatatccaaataaagggatatggagcagccattctaaaaacaacattcatatttgtagattatgacatgattattgttctagtcttttaaaatgctttaataaatgtgtacccattcagttcagttgattaattaaaagttatagaatctcctgtgtcaaaaacaaaggaataagttggacatatttgcgtggctttatttctgagttctctatcttattctattgatttaggtatctatctctttccttccaccaatactacacaatcttgattaccgtaactacagtaagtcttacaattgggtagattcagtcctccctttattcttatttttcaaaatcttagctatctgattcccttacctttccatataaattttagaataatcttttctttgtctccaaaaaatcttggctgggattatgataggaattgttagacttctttatctatgtgaggataactggtatctttactatgttgagttttacaatccatatacatggatttagatctttgttttctatgtagatctttgtttctctctgtttagatcttttctttcatcagtgttgtatagttttcagcatagaagttctatacatgttttgttagatttacagcaagtatttttttgagtgtaaatggaattttatttttatgtgtgcatttctagtatatagaaatagtgtattttgtattttatgttcattttgtattttgcaatcttgctgaactgacttatttttgtttgtttgtttgagactgagttttgctctcattgcccaggctggagtgcaatggtttgatctcggctcaccgcaacctccgcctcccaggttcaagcgattctcctgccttagcctcctgagtagctggaaccacaggtgcacgccaccacgcctggttaatttttgtatttttggtagagatggggtttcaccatgttggccaggatggtctcgatctcttgaccttgtgatctgcccacctcggcctcccaaagtgctgggattacaggcgtgagctgccgcacgcagctgacttattaattctaaaaattttctgtagattccttgggattttctatgtagacaaacatgtcatctgcaaatagggacagcttagttcttcttttctaatttatataccttttatttctttcttgccttattgcaccggctagaacttctagcactatattaaactcaataagagtgatgagtgtgaaaatccttgccttctctttaatcttaatggagaggcatctggtttttcaccattaagtgtaataatagctgtatgtatttttatagatggtctttatggagttaaaaaagttttcctctattcctagttttctgagagtttttatcataaatgggtattatattttgttaagtactttttcctgcacctattgatataattctgtaattttttcttctttagccttaaaatatgatggattacattgatttattttctattattgaaccatccctagaataaacaccacttcgttttaatgtataattcttttttacatattgttgcattcaattttgctaagaactttgtgtctatattaatcaaagatattggtctgtagttttctttgtttataacatctctttctggttttggtgtcagagtaatattagcttcataaaatgaattggtgggtgttctcctctattttctgaaaaagattttatagaattagcgttatttcttctttaaacatttggtaaaattccccagtgaaacaatcagggcctggagtttttttttcttgggaatttttaaattataaatttaatttcctgagttgttacagggcaacttcaattatttatttcatattgcatgagttgtggcactttgtgtttggaggagttgtttcatttcatctaaactgtcaaaaacatgtgcatagaggttttgcagtattcccttacttttttatgtttgtacagtctatagtgatatttaatttctggtattggtaatttgtgtcttttctcttatttttctttgtcagtcttgctagaggtttgtaattttattgatcttttcaaagaaccagccctttgtttcattggcttgctctattgtttttcggtttctaatttcatggatttctgttcttatctttattatttccttccttctgcttgctttggatttattttgctatttttttcctaggttattgaggtgagagctttgattattattattattatttgtagcgacaggttctcactatgttgcctaggctagtctcaaactcctggcctcaggcaatcctctcacattatattttagtgggattacactataaatctcattgcagtccacttaggggtaataatctaagttgtttcaggtaaaatatggtaaacttgcagcaatataactccaataaattcccccaccccaccccaccttctgagctattgccatgtatatataatcaatatataagtccaatacataagtgttatactttttctaaatagttctatgtattttaaataaataagaagagaaaatagagagattttacatttgtccacatatttgccatttctggtgctttttatttttttctgtggatctgagttaccatctggtaccatttttccttagcccaaagaacctaattttttgtaatgcaggtctgttagcaataaatttcttgtttttgttccttcctgccccattcaagatgtgtttatcttgttttcatgttgagtccaggcaacaaaactgcttgatatagaattattgtttgacatattttttcctttttaagcactttgaatatgtcattccagtatcatctgtcctccattgtttttgatgagacattgccttttaagtcatatccttgttctctgtacatgtgtctattattttccatgttttatctttggctctcagcaatttgattatgatatgagagactatgcataagaaaatttaaggacccaagtttggcaataacatacattagtttcactaccatccaactggttagactcaatcacatggccacccttaactataagggaagctggaaaatacaatccagctgatttcccaggaagaaaatgggtgttagaaacagctggcaagtctctgccacaacatacatacaccaaaaccaccatatatattgccaaagacacatatgtgtctagggacatacaacgaatgcactgtgggggaacacaagaggaactgaagtgcaaatcaggaatgaagggaacaaataaaagaacaggaggggggcctttcatggactgatcctaacatagtgtcatgaacttaggaggaggattaactcaattctcattaattgagaattctcattaatctatgtaccaagagcaagagaaaagcccaatagcagtggtgccagcagtgccatccttaccagactgattctaacatattaccttagtttttgcagtggttcatcctctgttgattcctatctgtttcatgcctcacctccagacttcacagttctgtgaattacttattgctatccttccaataatttttctttcttttttttttttgagactgagtcttgctccatcgcccaggctggagtacagtgctgcgatctcggctcactgcaatgtccacctcctggggtcaagcaattctcttaccttagcctcctgattacaggtgtgcgccatcagagctcagctaatttttgtatttttagtagagatggggtttcaccgtgttggtcagctggtcttgaactcctgaccttgtgatccgcccaccttggcctcccacagtgctgggattacaggcaggcatgagccaccatgcccggccaatttttcttcttaaccacagtttattgtagtcaaacttatactattacagagtagatttattttacctgttgaatgtccagtccgaggttgaactttatccattacagtaggcatccttattttgttcttggcttcaatgggaatgctgcaggttttcaaagctggaaagctgttgcagaaagcccaatatgtacataaacttgctttccagcagcaacaaccaaaacagcagaaagacagcctttacctcccaaatctcaaatgaagaaatctaattggtggaactgatcttgtactcagaaccctagcttcaagggttttaatttctccaggtagcaaagaatttgaggcaaccaggtgaatggataaatttactatggtggatgcatactatggaatactcctgcagctgatggaagcaacaaactagattaacagctacatggaatacactggttatttacctattttttttcagctgctagcctttccatctctccccctgcaactcccccaattctctcctctacccacccccacccccacattctggctgtgttgctgtagctggggttctacaaacatttcccagaccccattgccaaatttcctgttagggtctgccaatgggataccctaaaggaacccttaaagataggagagacttcattcctgttttccagttgtcacatgatctcagctgcagacatctggcttctactagctagttctgcactcaacatcagctttgccacacttctcagagatatttgcagcagtctgactacccacttggcagtctgagatcagtcatcccttgctttcccaccctcagggccatgcctttcctcagaggtataagcaccaagatacctggagggagcttctcccataaaagtcagtatcagtcaaagaaggccccttctctgagctcctagtttctggtaatcacatcacctcttcccttttgttttcacaggccttggaatattctgatttctgcagttactaattttttagttacaacagcaacttctttctactctttcagtcttctaatacttgtaattaagtctctgtattaaaagtcctcttcttgaaata

SEQ ID NO: 1172 - DNA, 250406 bp, Homo sapiens
cagcgccgaccgacagacgaggtttgcgcttggctgggcatgttccgcggctactctgcggcgcgccaggcccccgctttccgcaccccgcgaccctagaagccaccgaaccgccggcgggccatggccactctgccgagcgcagagcgccgcgcgttcgcgctcaagatcaacaggtaagacgccccccgcggcgcgcaggttgcggccggacagcccagcgctggtgtgaagcggagcttcgctgcaggggccgaggccggacgagtccattcgcgtccgcggcggggcgcgcctgagacctggggcgcccggttcccgaggctgcggcggtggagccgctggacgcgcggcggctcctgcgctgggcccggcgaggtcctccccaagaatctcggtgctcctggatgtcctcagccgccggggatcccttccccgaacaacctcgcccgctccgccctccaggttcttacaggtggccgggtcccagaagggtgataggcgcctgggtaaccgtgttgggcgcgccacggagtgtctcataaacggctccttcctttgaggcaagtctgagcgcggggggaagaagtgaagtggctgaaattagagttgcgtttgaggcaggctgcaagccttctgtcgtcctgagcaaggctccgtcctcgcctgcttcattattccagaaagagcttggctcctggtggcatcgctatttttataccctggtccaaaggagccatgaagtggaaaaagtgattttttaaaaaatctacacttaaataaaccaaaagaaatggcctgtggctgacattttgagatttacagaactccagcaaaaagctaaggactgggggatcccaactcaccatccaattcctaatcaaagttgcacaaactaaatatgtaagcacatttactgctcaaagttctcagtaaaggtgctttaactgcagtttttcctccactaaaaactgctgacaagtaattgggacatttttgtcttgccctgagaaagctagactgtctagttaaaagataataggaaactcattctaaagtgtcaacttattctattgcccacagggctgtccgatttgttaatcttcacttagctgagcctgtgaaaggtggattccaccgtaggttcatctttgtgctgttagtgtgtgaagaggtttgaacaaggaattaaaagcctagaaaaacaaggcgataaggtcttctagagggcatatcgagctttattgacgattttatttccacttgatacgtgactgccagcaaactgtttctcttaccttactatttcgtcatctgtaaaatgagtttaattatttatgtatattgcatattaatgttggaggccaaaaggtactagtcaaaaggcataaagaggctgggtgccatggctcacacctctaatcccagcaatttgggaggcccagatgggaggattacttgagcccagagtttgagaccagcctgggcaacatagtgggacccctgtggctacaaaaaaataattttaaaacattagccaggtgtggttgcatgcacctgtagccccagctattcaagaggctgagacaagagcatcgcttgagcccaggaggatcacagctgtgatcatgccactgcattccagcctgggtgagagagtgaaaccttgtctcaaaaaacagacaaaaaaaaaaaaaaaaaagcaaaaacaaggcatgaagtatatcagggatctccctatgggaatttttttctacattaaggttcatagctgttgcatgccaggaggggtaattcattcaaggagtatagggaatcaaactgaagttactgatgggtgtattatttgctatagctcctgatcctctgtctttgtgaattttagatcaggaagtgtgactggggcagaaagatgttagaaactatggggttgggcagggttgatctggggtgagtggccgagacccggactaatcctacaggcagtcttgcaagcaactgcggggtcggtgtcacctgggggttaagaataaaggccctggttagtgtctgatctgcttgcaaattggctctctgctacaaagtcactgtgcaacattggacatgttacttaacttctctaagctttggtttctttatgtgccaagtagagttgatcatagtacctacttcttatgactgtggggaggattaaatgaataataggtacaaagtccgaattgccaagtgctggatgtgtaacatacacattggaatttagagacagtacagaaaaaataatgcaaaatgtcttgttaatgattttcatgttgattgcatgttgcttgtagtgtctggctcagaataaatggtgaataattcttagttgccatcattaacattacaatcagcttcactgctgtcattatctccatcatcaccatctttgagagcctaagatagaaaggtaggaaggaaagctgaagttggagagcttcaggcagagatcagtttgggttaggtatggagatgccagtggctggctgggagctttcttggggccagtgtttctccgcctgtgccttccatctggtgctgagaacccaaaacacattcaatggaagaaaatatgtgatgaaatctgatcaagaagagccccctcaagtttaataaagtataaaaggttctataatcctcaggcaagaaaatggattggaaattcgtattcttagagttctgttttcctttttgaagcactctgtgtgttgtgtgggagagttatgctaaggagcttggcagaaattattattcaaaggagcagattaataaggacatacctagtattcatatatcatttaatttcaccatttattgtttacttattgtgtcccagacactatattatacagttaatggattttatgattaaattctcacaaaaagcctatcaaactcatgaagtcttgtacagaagaggaaaaggaatcttggagatacagctgcacaaggccatgtaattttttcaagaccatacaaccagcaatggcagagctgggattgcaaactgctccaaagactgtgctcttaattgggccgattgttattttgatgcatatgtatcccaagaatttcctttaaagcaagaggggaattaatttttaaaaaatcatcattttggtagcagcattggcaaagtgttctgtttctgattagtgtttaatatataaacattaacaatgtgatgttttgcaatgttgaaggtggaaaagaaatgttttcccttacgtgcctacctattattttttttaaataggtcaaattccaaaagtaagactgtgttgaaatatggccattagtacattcagcatgtgctcatgtttttcaccttactactcagaatagtgtaaactatctcttaaaaatatttgtgggataaaaccagtgtgcttcctgttaatgaagtattcaaatctgatatattaaaaatattatttgtaaagcgttcagttctgaccacaccagtctccagaaggagtgagcagactatctcacagtctgagaagaaaggtgaaattaattttcttgtaagtgctatatacttgtcttcatttccatttttttgttgctgacttgcgtgccaaggaaagactagatctaagttaggcagttcgtaataacatttgcgtttgggatttcaggtgctgctgcattaaatgtcataacatggtacttgtgggaacatctagtcttgttaattgccttttttcttactggaatttagtgcctttgtagattataaaaattattactagtactctgaaaatttattaaacaaaatcttagtgtctttcaaatacagaatagatgtaaaatttgatcaaatattaaagtaaaataagaaccttggataaagaggacgaaagtgtagaatgcagaaaaaaacattaaccctcttgtggacagtcaggattgaaaggaagaaaaaataatggcttacacttctagaatgctttctatgtggcagagacagttctaaatatttacatatcgtaactcattcacctctatgagataggagcaatgactatctccgttttacagatggagaaactgagtgcagagaagatatagaaattgtccaaactcacaaacaactaattaaggtcacagctgagattcaaatgcaggcagcctggctccagagtcttctcttttaatcattataccatgctgccatctcagttttattttaaaataataataggtaacatttattaattatttactatgtgctacatattgtgctaagaactttatataccttcatttcgtcctttcagaaaaggaacaaacagagctgggtgcactggctcacgcctgtaatctcagcattttgggaggccaaggcgggacgatcacctgaggtcaggagttcaagaccggcctggccaacatggcgaaaccccgtctctactaaaaaatacaaaaattagccaggtgtagtggtgtgcacctgtaatcccagctacttaggaggctgaggtgggataattgcttgaacctgggaggtggaggctacagtgagctgagatgtgccactgcattccagcctgggcgacagagtgacactctgtttcaaaataaaataaaataaaaaataaaaaaggaacaaagtattaggcataataatcatcaccagagagtgattttatgaaagacaaaaacaaggtggcaagaagagagaataaagttacataaagatagcatttaagaacaaccacaggctgggcatggtggctcacacctgtaaccctagcactttgggaggcctaagctggtagatggctcgagcccaggagttcgagaccagcctgggcaacatagcaaaaccctgtctctacaaaaaatacaaaaattagccagctgtggtggcttgcacctgtagtcccagctacttggaaggctgagatgggaggatcactcgaacccaggaagttgaagctgctgtgagcagtgattgcgccactgcactgcagcctgagtgacagagcgagactctatttcaaaaaaaaaggaacaaacccaataattttgggcataacgaccagagcacaatgagctacagagagctttctgagaagtatttgctaattttatctgcaaagataatacaagcataaaaatatatgtattcaaatgtatagatgtgtatctgcagtgagagcagagctgttcctcagtagtgggggtggctggcagagtgaggtagtgtgctttcaggaattgctttatttgtctgatgtgttctagaccaaagaccaacagaggggcttgggcaatcagacacagaatttttggcctttcacatttagaatcggttccttccagattcttggaaaaggtccatttgtgctttaggcatctagtgctattctgaagatgccttacaaaatgtatgctgaaataaccttctaccagggtgaattttcttcatttggagttctttgagttctgaccatttatgtatattgatgaagctaatgtttacttcttcatagaccagtggaaagaaaacgtagtaacatgtagttgcccagggaaagatgaagaactcaggggaccaagtctcccatctcaactccccataaaggtagtgatggaatgggatgatgttaaaaacacctcaactttccgtcctctttaagggaccgtgagaaggtagggatgttaccatactcagacttcttgctgagaaagctaagaaacaaaagcatttagtttttttcagtggcaggtgcttattaacgtttggcctatttgataaagggttaaagcaacaggaatgtgctactgctgttcccacaagcagtagtctaatttctttctttttttttttttttctttttttgagacagtcatgctctgtcgcccaggctggagtacagtggggccatctcggctcactgcaacctctgcctcccggattcaagcgattctcctgcctcagcctcctgagtagctgagattacaggtgcgcaccaccacgcccggctaatttttgtatttttagtagagatggggtttcaccgtgttgttcaggctggtctagtcttacccagtcagcagcagaaaggctctctgggctctaggtaaacacatgaaatttatatagtgtgtttaagtgtggttcctgtgcttctggagttggcacagtagtggtaccatttgctgtatcgacaacagtgggggtatagacgaaaaacagattgacacctctgaaagtatatatgaacacatgtcgatgcagcatttctggtgaaactaagcaaattgataaagttggcctagggtacaagacattatgtcatgtcccactgcattatgattaaacccaagattagaaaggagaaatgatggcaacagaaccagtttctccagctgtctattctcatgttcatcatcacagataggaaagggcagccggccctctgcatctgtgggcacatccctggattcagccaaccacagatcaaaaatatttggaaaaaaatgtagatagttgcatctgtactgaacatgtacagacttttttcttgtcattattccatacaaaatatagtataataactatttacatagcatttacattgtgttaagtattataaataatctagagatgatttaaagtatacaggagggctggccaccgtggctcatgcctgtaatcccagcacttttggaggccaaggtgagtggatcacttgaagtcagaagtttgagaccagcctggccaacatggtgaaaccccatctctactaaaagtacaaaaaaaaaaaaaaattagccaggtgtggtggcaggtgcctgtagtcccagctactcaggaggttgaggcaggagaatcgcttgaacctgggaggcggaagttgcagtgagccgagatcgcaccactgcactccagcctgggtgacagagtgagactctgtctcattaaaaaaaaaaaaatcatgaacaactctgcatgtaaatcaatacagagctgcattataatttacataggctgtataaaatcctgttgattagatgtaaaatgatttattaaattaattttctattattgggcatgaagataggttccaggctgggcacagtggctcatgcctggaacctgcctcccggtgctttgggaggcagacacaggagaatcagttgagcccaggagttcaagaccagcctgagcaacatagtgagacaccagctctacaaaaagcaaacaaaacattaggcagacagggtggtgcatgcctgtggtcccagctacatagaaggctgaggtgggagggtcacttgagaccaggagtttgaggctgcagtgagctatgattgcgccactactctccagcctgggccacagagtgaaaccctgtctcaaaaaaaaaacacaaaaaaccaaaagagataggttctgacttttcacaatagtgtatagagtttgatggagcagtcttatacatacttttttctgcgctagtgcaaacacctccttacaaatttctaacagtataattggtcataggaaagaaacatttttcaagcttttgattgccaaattgacgcccagaaaaggtatacctgtttctgctcctaccagtggccctacgaatgctcctttccccacattcacacccccaccgagttttatcattcttttaaatctttatttgccagtgttgacctcttctcttaaatgcctgtaacctcttcctgtttagcttctctcctaggtcagagagtgaactctgaagtcattctttagggattaaaatagtcatgcatttctccttttttctttgccttacatgcaaccataaatggtgagaacttctatcctttttcactttctgcttctgttcctttaataggtggattaatgataaaggtagattgttcaaacaacttagttatttcttaattttgttgtaagctctagttgccagactttaaactgtgctttttactttgcttaacaatgtaatccaatctacctcctcctttgggtgcctaagccatagcccttttaaataaaatagcaaatggaaaatcagaatccctttctatcgcaaaataagagtccagattacataactcattgtatgtgttttcacttggatgagagaatagagagtatggacctctttcatactttttttttaatgttccttttcctctagaattggtttctggggctaaaaggaaacagtagttagtaccactctgctcagaaacctcaaaaaacttcgacttctgtcattctcatcaaagggcaaaattcattgttcttctgtgatagagaccaaaaatacaaatagctaaactggaactaaattaagaaaaacagaagttaataaactccaccgcctcactcccatctcttcgtaagttagtaggcttgtaagtcctaggctggttagttcattcatttgttcactcatgccagccattgaggattattgtgttctaagtgctgtgctaagccccagaaatacaaagacaagtgagtcatgggcctgcctgcaaggagtgaggagatttactcaaaattgagagctggaaaaagaaaggcactttccctggcctcatagccctccgtgacttcaaagtattcctctctggggtcatgccactagggataatagcattatccaaaaacatttttggaaatccttttagaattattctcagggactggagtacatttatttttaaaaagaaacttggtgttttaaaatctttttttttttttagggagaatctgctttattatttgagaagtttcaaaaaatatagaaaatacagatgataatatggcaagtatctaaaggtctccacttaacagaattaacatctgttaacattttgtcacttttgctttagttgttttttttttaattaaaaaagagaacattacagataaatgtgaagtccctgttattctgttgcccatttctgttctccctgctgctccctgagagtactaacacaaaggtgtacttctggggtgtgtgtgtatatgcatatccataaacaatatatggtatagcttctggagggatccaaagtcattagcactcaagcaagcctattaaataaaataatatcagcttgagttaaagataacatatagccgtgaaataacggagctgatttttaggtaccttgtcaaatagttctgaaagtaattgcaaagaggagttccaaaagtgagttcagaaagacagctttatcagaataaattgcatggtactgcatacaggaaactataaagaacaacggttatttagaactgttcattctgacagtgtttttcaattactccttaatattataaccacttactcatttcctgaaatcaccaggaaatttttcaaaaagatttttctcccccgatgaatatacccacgatttgcatttgacccaagataagcagttgagtcgataacatgttaatttttaaatacatggttttaaaacacagaataaaaattctacctcattgcttggagactcaattaaggagagtatgcacattagcaaaaagaagatgtgatatttgctcagaagtcttgaagtggatattttggccttcgtatggctgaatggtcaagcttgactctctcgtttgctcagggaggcccagtccctctgctgccacgggtagaaatactttttcctaaatcgctgcttcttctcactgccatacagagcaatattcaggacacagccaaaaccttctttggcagacctttttgagttctctctactcagctttctgctgtgtaatatgagcactctagagaagttgggctgtcctcaggaaattacacttggggtctgtggttccccaggaagacaaactggagctccctaaggggtactagtcatcatacggcatttatactagcattgcagtccactttcacctatgcaagtagaaaaactcaggctcaaagtccactgacaatgcaggagtcccttatctgctggttaacataaatgttgttttaagatgatggccatctgttgtctgtgagaacaagactatcacccacctgttgacatgctggctggtttaatatcttactctttcattccaaataactacctggtctcacagatccccttagatggggtatccaatttacctcctgtaccttattctctgtccaataatttcactcaaatcaacaagatattttattgcctatgacttcctctaggtattacgggagattcaaaacacaaacagacaagcagcctatgccctcagaatccagctggggtgagtgggtgactataaatgcaaaagttagagagcatggggaacagtgtttgattgtgtggctggggaggggtaaggacaaaaactcagagagagagaagcctgtagccctggctacagaagggcaacacctctgaggagatgagtctcagctgggccctgaagggaggtgactcacagatgaaacaaacctggtgggaagaatagttagcagtgtgcagaaggcattggaagggattccaggggaggagtgaggagggagccacagtcattccgatgtgaggtagtgagatctgggattagactgggtcatcagaatggaaaaaaagggcctgcttctgcagacagtttaaaggaatcagctggatgtgggaagcaactacatacttattcattcattcatttcatgcatattgcttatagcctactatgtgcctagcactattctaagtgctgaggatagagtcatgaataagatagacagggttcttattctaaaaaaagtaatataccagtggggagacaatgaagaaataaaccactaaataaacaaggaaacatcagataaaataagtgtgatacagagaatgtaaacgggccattgagagggcatggattctttagatgggatggtcaaggaaagcatctcttagagaaaaacctctgagccaagatcaagcaggggaatgacgaagcacatgactgaggcaggagtaaatttgatgtgttggaagaaaagcaagaactggtctgtctctagtggagtgaatgaggggagaggaggagagctgaagagggaagttagcaaagaacgaatcacataaaagccttaaaggcaatggaaaaaatttaaatgttattcaaagtgcaatggtgtattagtccattttcatactgctatgaagaaatacccaagactggataatttataaagaaaaaaaggtttaatggacttacagttccacatggctggggaggcctcacaatcatggcagaaggtgaatgaggagcaaaggcatatcttaaacggcggcaggcaagagagcgtgtgcaggggaattgccctttataaaaccatcagatctcgtgagacttattcactatcatgagaatagcatgaggaaaaacctgcctccatgattcaattatctcgcacaacatgtggggattatgggagctacaattcaagatgagatttgggtggagacaaagccaaaccatatcaaatgggatggtttatggagcagggcatgatgcgattgacttttgtgtttaaaagatctattgtacaaagaagcaaggaaaccagctgggaggcagtggagaatccaggggaaagatgacgatggcaaaactagagagcagagctgagaaggagagaaccaggcagctctgggataacattctggagctagggctgacgaattagatatggggtggggcaatgaaaaacaaaaaaaaagagaaatcaagatgtctccagggttggatattgatgcttttaacagagattgaaaagactggaggagaagcaggcttttagggtgaatcaagggtttaactggggacatatggagtctaagatgcatgttagacattcaagtagaattagctactatgcagttttatttaggaatctgaaactcaggggagaagtcaagactggatatttaagtttgcaagtcaataccaaacatatttttacataagaaggaaaaaatattgatatgattttgataagtttttaatagccagaaagctatatgcgtaatatggtatcattttaattaaaaaataaatatatgcataactctctgcagagataaatgatcaatacatataacaaggagagaaccagaaggacatacgccaatatgtcatgagtgttatctctgggtagtagaattattgatgacttttgtgtacttgggacatgcatgtatgagtgtatgtatgcatgcatattttgcaagttttcctcaaaggatgcttttgtaattggaagaagaagcaattataaaataaatggcacaagatttccatcctggtcaaatgggataaggatgatgccaatgagaaattatgaaaattggaaattagacttagttttggggggatgattttttacttccctcgtagaggttttgtttaagacgatgtagtagactgtacctttacatatatttgctgtccctcccgatgggaggattttacttttcacctgttgaaggtgatgtggtcacttggaggtgaagagatagcctggactttgtcacattatctttctcctattctaaacaatctgcagcgttccaggtggtggatgatctgtcatcctgcatcctggagtaaagatgattaaagcagagctgcagctgccctctgaaggcctttgtttttgtaaaccactgagatttttgaattgtttgttatctcaccataacctagcccaccctaacacagatgaacataaaatacagaacatttctattgggcggcttgaaatacaggcttggggcatcagtggtaggtcagcatggaaaatgttgattaaaaagtcatctgtgaggtggagattgggactgaagaatggataaattttctgaatggaaagtataaggggaagagaagaggaatgggcctagaggaagagtcactgtcaatccatacaaaaagaagagatacgaaaagataggaggggggatttggccaacacatggcagaccgttgtagtatcagaaaagagagctaggagggtagttacaaagatcacatgccaaattatgagggcaaagagccattggatttaccctgaaggtggtcattgaaaacctctgaattagcagttttagcggagctgtggggaaggaagtcaggtttcataaggttatagagggagtccatgcagaggaaatagaggaagctggtggaggccactcctttaaaaagcctggatgaggccgaagagaaatgggacaagtggtaaccagaaggcccctacaaggctgtgacttttacacaaatatgacatacaatgctgaacaaaggatgtgctgatcttacagaggaaggatgtgttttattcccaaaaaaaactttacatatgggtaaagttattcaagagaccctgtgctgtctaatatgcaacaaatttttctttgcaccagcattaagacttctaacaataagtaaaatattctatttagatactttttacaggagattttgaaactctgatgacactgacatactacctttcagaacatggtactgtttaaaattttattatttttatatttatcttcatatgtttaaatttgaaaaattacaggaaagagtacttttataattatgtttttctgtttacaaaccacctcctgtgtgctgaattttgcctccccaacatttttcaggggagcatggccctactcgcactttgagttcagatttctggccttcagaactctgagaaaataaatttcttttgttttacgctatccagtttgtggtagtttgttacagtagtcctgggaaactaacaaaccaccccaaagtttagtgacttaaaacagccattattatttctcacaattctgtgggttggcaatttgggctgggctcagctggacagttattctgctggtcttcctgtagacattcacatggctgccattatcgggtggctcaagtgaagctgtagggtctaagatgggctcactcacaagtccaggaccttggtgctgactgttggctgagctttccctcttcacacggtctcttgttgttcagaaacctagctggtcttttttgcattcttagctggtaaagggaacattctaagagaaggaaggtggaagctgcaaggcttcttgaggcttaagtctagaactctccaacgtcacttccaccacattcattggttaatgcaagtcataaggcaactcagcttcaaagagtaggagaatagaatcaacctattgaaaggaggggctgcaaaatagttggtcattttaaccaaccacagcacccaaccaaaaaaattaatactatcccgtttcagatttcagaatgtttaatcagaaggccttgtctttccctacgtatatcacaatacccattttagtggcagagaaactgagaccaaataaaactgactcctttaaagttaccaagtgagtcatgctttgtgagagacatgaagacaactatatgtctggaagagctaaacatagtcctgcctggaggcaggtatatgaacttaataatcccttgagatgctcttaaatcccataattacactgatggactccagattgcagagctgtctggtccagagataaagcagcggtttgagagtatcagagagagaaggtgcctgaaaattgccacatgtccccaaaggcaggatttgaggctaaattaaatgataaagagttaccaagctctttattctcaagagttaccaaataagcttagaaactcaatgactgctgctgtctagtgttagttctggaatgggagaattaaaaatgagtagaaaaagaaaatagagacagagagactaacatatctgaaagataggtgctgtgggcagtcttagaaggatcacccctatatcaattaggattgcttttagctgctgcaagtaacagccaaccaaaccatccaatggtttaaacaaattaggggtttatttttttcttttcatttatttatttatttttaaatttaattttattattattattatactttaagttttagggtacatgtgcacaacatgcaggtttgttacatatgtgtacatgtgccatgttggtgtgctgcacccattaactcatcatttagcattaggtatatctcctaatgctatccctcacccctccccccaccccacaacagtccccggtgtgtgatattccccttcctgtgtccatgtgttctcattgttcaattcccacctatgagtgagaacatgcggtgtttggttttttgtccttgcgatagtttgctgagaatgatggtttccagtttcatccatgtccctacaaaggacacaaactcatcatctttatggctgcatagtattccacggtgtatatgtgccacattttcttaatccagtctatcgttgggcatttgggttggttccaagtctttgctattgtgaatagtgctgctataaacatacgtgtgcatgtgtctttatagcagcatgatttatagtcctttgggaatatacccagtaataggatggctgggtcaaatggtatttctagttctagatccctgaggaatcgccacactgacttccacaatggttgaattagtttacagtcccaccaacagtgtaaaagtgttcctatttctccacatcctctccggcacctgttgtttcctgactttttaatgatcgccattctaactggtgtgagatggtatctcattgtggttttgatttgcatttctctgatggccagtgatggtgagcattttttcatgtgttttttggctgcataaatgtcttcttttgagaagtgtttgttcatatccttcgcccactttttgatggggttgtttgtttttttcttgtaaatgtgtttgagttcattgtagattctggatattcgccctttgtcagatgagtaggttgcaaaaattttctcccattctgtaggttgcctgttcactctgatggtagtttcttttgctgtgcagaagctctttagttgaattagatcccatttgtcaattgtggcttttgttgccattgcttttggtgttttagacatgaagtccttgcccatgcctatgtcctgaatggtattgcctaggttttcttctagggtttttatggttttaggtctaacatttaagtctttaatccatcttgaattactttttgtataaggtgtaaggaagggatccagtttcagctttctacatatggctagccagttttcccagcaccatttattaaatagggaatcctttccccattgcttgtttttgtcaggtttgtcaaggatcagatagttgtagatatgtggcattatttctgagggctctgttctgttccattggtctgtatctctgttttggtaccagtaccatgctgttttggttactgtagccttgtagtatagtttgaagtcaggtagtgtgatgcctccagctttgttcttttggcttaggattgacttggtgatgcaggctcttttttggttccatatgaactttaaagtagttttttccaattctgtgaagaacgtcattggtagcttgatgcggatggcttgaatctctaaattaccttgggcagtatggccattttcacgatattgattcttcctacccatgagcatggaatgttcttccatttgtttgtatcctcttttatttcattgagcagtggtttgtagttcttgaagaggtccttcacatcccttataagttggattcctaggtattttattctctttgaagcaattgtgaatgggagttcactcatgatttggctctctgtttgtctgttattggtgtataagaatgcttattatttttatacattgattttgtatcctgagactttgctgaagttccttatcatcttgaggagattttgggctgagacaatggggttttcaagatataaatcatgtcatctgcaaacagggacaatttgacttcctcttttcctaattgaataccctttatttccttctcctgcctgattgccctggccagaacttccaacattatgttgaataggaggtgagagaggacatccctgtcttgtgcccgttttcaaagggaatgcttccagtttttgcccattcaatatgatattggctgtgggtttgtcatagatagctcttattattttgagatatgtcccatcaatacctaatttattgagagtttttagcatgaagcgttgttggattttgtcaaaggccttttctgcatctattgagataatcatgtggtttttgcctttggttctgtttatatgctggattacatttattgatttgtgtatgttgaaccagccttgcatcccagggatgaagcccacttgatcatggtggataagctttttgatgtgctgctggattcggtttgccagtattttattgagtatttttacatcaatgttcatcaaggatattggtctaaaattctcttttttggttgtgtctctgccaggctttggtatcaggatgatgctggcctcatcaaatgagttagggagtattccctctttttctattgattggaataatttcagaaggaatggtaccagctcctctttgtacctctggtagaatttggctgtgaatccatctggtcctggactctttttggttggtaagctattgattattgcctcaatttcagatcctgttatttgtctattcagagattcaacttcttcctggtttagtcttgggagggtgtatgtgtcgaggaatttatccatttcttctagattttctagtttatttgcaaagaggtgtttatagtattctctgatggtagtttgtatttctgtgggatcggtggtgatatcccctttatcattttttactgcgtctgtttgattcttctctcttttcttctttgttagtcttgctagcggtctatcaattttgttgatcttttcaaaaaaccagctcctggattcattaattttttgaagggttttttgtgtttctgtttccttcagttctgctctgatcttagttatttcttgccttctgctagcttttgaatgtgtttgctcttgcttctctagttcttttagttgtgatgttagggtgtcaattttggatctttcctgctttctcttgtgggcatttagtgctataaatttccctctacacactgctttgaatgtgtcccagagattctggtatgttgtgtctttgttcttgctggtttcaaagaacatctttatttctgccttcatttcattatttacccagtagtcattcaggagcaggttgttcagtttccatgtagttgagcggttttgagtgagtttcttaatcctgagttctagtttgattgcactgtggtctgagagacagtttgttataatttctgttcttttacatttgctgaggagtgctttactgccaactatgtggtcaattttggaataggtgtggtgtggtgctgaaaagaatgtatattctgttgatttggggtggagagttctgtagatgtctgttaggtctgcttggtgcagagctgaggtcaattcctcggtatccttgttgactttctgtctcactgatctgtctaatgttgacagtggggtgttaaagtctcccattattattgtgtgggagtctaagtctctttgtaggtcactaaggacttgctttatgaatctgggtgctcctgtattgggtgcatatatatttaggatagttagctcttcttgttgaattgatccctttaccattatgtaatggccttctttgtctcttttgatctttgttggttgaaagtctgtttcatcagagactaggattgcaacccctgcctttttttgttttccatttgcttggtagatcttcctccatccctttattttgagcctatgtgtgtctctgcacgtgagatgggtttcctgaatacagcacactgatgggtcttgactctttatccaatttgccagtctgtgtcttttaattggagcatttagcccatttacatttaatttaatattgttatgtgtgaatttgatcctgtcattatgatgttagctggttattttgctggttagttgatgcagtttcttcctagcttggatggtctttacaatttggcatgtttttgcagtggctggtactggttgttcctttccatgtttggtgcttccttcaggagctcttgtagggcaggcctggtggtgacaaaatctctcagcatttgcttgtctgtaaaggactttatttctccttcacttatgaagcttagtttggctggatatgaaattctgcattgaaaattctttcctttcagaatgttgaatattggcccccactctcttctggcttgtagagtttctgccaagagatcagctcttagtctgataggcttccctttgtgggtaacccgacctttctctctggctgcccttaacatttttcccttcatttcaactttggtgaatctgacaattatgtgtcttggaattgcttttctcaaggagtatctttgtggcgttctctgtattttctgaatttcagtgttggcctgccttgctagaatgggggacttctcctggataatatcctgcagagtgttttccaacttggttccattctccctgtcactttcaggtacaccaatcagacgtagatttggtcttttcacatagtcccatatttcttggaggctttgtttgttgctttttattcttttttctgtaaacttctcttctcacttcatttcattcatttcatcttccatcactgatacccttttttccagttggtcacatcggctactgaggcttctgcattcatcacgtagctcttttgccttggttttcagctccatcaggtccttttaggacttctttgcattggttattctagttatccattcgtctatttttttttcaaagcttttaacttctttgccattggtttgaatttcctcctgtagctcagagtagtttgatcgtctgaagccttcttctctcaactcatcaaagtcattctccatccagctttgttccattgctggtgaggagctgcgttcctttgcaggaggagaggcactctcatttttagagtttccagtttttctgctctgtttttttcccatctttgtgtttttatctacctttggtctttgatgatggtgacgtacagatgggtttttggtgtggatgtcctttctgtttgttagttttccttctaacagacaggaccctcagctgcaggtctgttggagtttgctagaggtccactccagacgctgtttgcctgggtatcagcagcggtggctacagagcagtggatattggtgaaccgcaaatgctgctgcctgattgttcctctggaagttttgtgtcagaggagtacctggctgtgtgaggtgtcagtctgcccctactggggggtgcctcccagttgggctactcgggggtcagggacccacttgaggaggcagtctgcccgttctcagatctgaagctgtgtgctgggagaaccactcctctcttcaaagctgtcagagagggacatttaagtctgcagaggtaactgctgtctttttgtttgtctgtgccctgcccccagaagtggagcctacagaggcaggcaggcctccttgagctgtggtgggctccacccagttcgagcttcccggccgctttgtttacctaatcaaacaactaactcggcaatggtgggcacccctccccaagcctcgctgccgccttgcagtttgatctcagactgctgtgccagcaatgagcgagagtccatgggcataggaccctctgagccatgtgtgggatataatctcctggtgtgccgttttttaagcccgttggaaaagcgcagtattagggtgggagtgacccgattttccgggtgccgtctgtcaccctttctttgactaggaaagggaattccctgaccccttgcacttcccgggtgaggtgatgccttgccctgcttcggctcacgcatgttgcgctgcacccactgtcctgtacctactgtctggcactccccagtgagatgaacccggtacctcagttggaaatgcagaaatcacccgtattctgtgtcgctcacgctgggagctgtagactggagctgttcctattcggccatcttggctcctccccttatttatttttttcttacataacaagaatgccagtggttggccctgcaggcttggtgtcatggcccccaaggtaccactggagactctggttctttgtgtctttgtgtcccaccaaccttagtgtgtggctttcatccttatggtcacaggatgactcctaaaactctgtacagtgaatcagtattggagacaggaagaagaaaggaggtaaaaaagacatgccagctaactttgctcccattaggaagctcttctagaagctcacagaattacatttgtttatgtatttcattattcagagctgcgttagctttgtctacaagggagattggcaaatgtagttttcattagcccagcacattgtcacccccaacaaaactagggttgagttagaatgaaggggctagtgcatattgataggccactagtagtttctacacagcctccaacaattgctgtggatgtagattagtaacagaacttccactatggcatcatagcacctctatcccactagtacctgtagtaggtccaaatcatctaattccaggagcctggcttaaagaagaggaatattgaggcttctaggtccagtattaatcaaggtaagctagctgtgagaacaaacaatctcaaaatctcagtgaacgaaaccaacaaaaacttgtttcatgtttatatcacagtctgatgcagatcgagtggttctcctccaagcagtgactcagggacccaggctgcttccatcttacagctctaccatcttgtgactttcagattatgttggcatcattcagccagtgactaggaagaagagagaatgaaagattgtgcacccaattcttaaatacctccactcaacactgggacacatagcttctactcacacttccctggggaggactgcttacaagattcatcaatctgcaaggagggctgggggaatatattatagttcttgcctggcggcacttccagcaggaacacttcactatgaaaagggagcacaagtctttggggggacagctagccttctgtgccacaaaagcccagtcacaaagaaaaagccattaccaaaatgttccataaacaatgtagacctactgtggtttgctgttgtctgatagataaaaactgtgttgttttagtcacaaggatttggatgtgggagctgcaaggaaagcaaaagccaaacaagtacagctgaagcacctgagatcctaggaggagacaagaagaatacaaggtgccattgtcctatcagccaggcagaaagatggtaggaaacaaggccatttaaaatctaattgcaattgcaagggctgggtgctgtggcttacgcctgtaatcccagcactttgggaggctgaggcaggtggatcacttcagctcaggagttcaagaccagcctgggcaaagtggtgaaacctagtctctacaaaaaatacaaaaattagccaggcatggtggcatgcgcctgtagtcccagttactcaggaggccaagatggaaggatcaattgagcctgggaggttgaggcttcagtgagctgtgattgtaccactgcactccagtctgggtgacagagcaagaccctgtctcagaaaaaataataataaaataaaatctaattgcaggcaaggccacaggaagtggcaagtgcaactaaagacttcctagaaatcccacacattgataagcagccgggttgttcagccagtttttttttctgagaacaaccaattttaaaatattttaggaaaaaccacaatattgagatatttttaaacagcttatatttaaacagcatatatttaaacaaagtgattaatttagaattcatattttatttgagaaaaaaacaagatgttcctggtctggcagatgacattctaaattattcactcccacttgtggaatagctgagttatagtccggcccctcctctgtagaggaggatttataggagaagatgagtcacgttactttttgtgactatttttctttgcatttgttgactcctcttgttttattcaccttctaatcattgaataatctgtacaatcagactgccttattcatgttggcagttgttttaataataacaatgcacagagccattgctactaacagaaagcagggcagacctttgagtctgagtttggggatacaagtttgattccatcccagctccactgattcccagcgagatgtggttcaacatcataggaccaaatgaaataaaaagcgtgaaaatgctacacaaatcaaagagtgctaaagacatattaatgaaacatctgtaaaatgggaataagtaccacgtttctgaggtagcatgtaatacaactggcacagggttccacacttggtagatactcaaaaaagaaaataaaaagttaacatggacaaagtaaaataaactggaaataggagatggagaaatgttaaaacaacaggcaccataataatgtaaagtaggatttcagctcatttacaagcacagaggttatatggtaagtcctcacttaatgttgtcagtaagttcttggaaacagtgtctttatgtaaaacaacataaaggaaaaccaattttgccataggctaatggatataaacaagagttaagttccagtacatatgtgatggcatatttccagttacaaaatatcaccaaacttctaaataaagaccaaaagactcctaatattaaacattgaaataaatgtgagctatactttcatataagaaaaattaatgcaaacaagtacaataattatttactgagttattccagttcggggtcgtggatggccagagtctatcccagccgtccagggccaagtttggaacccaccctggccaggacgccatcctatcacagcttgcactcacacacactctcactgggaccatttagacacaccgattcacctactctgtgcatgtttgggatgtcaaggaaaccggagtaccctgagaaagcccacatgggggaacatgcacactccacacagacggtggctccagccaggaattgatttattttctcatcaatgttataactaaatgactttgaatgaaacaatgttatttgataacctgctgtatttagagttcacaaaatttatccctctgaaacacatacacacacgcatggccgcacacacacgtgcatgcacacactgcacacacttaatgctaaacttgaaagagatttaaaggctaaaaggaaagttggactttaaatttcccctggagctcacattttctgggtactgaaagatatggtagatacatatgattgccttttccaaaaataacttctatggaaaatcctgagagttataagagactacaaaggtgatttgatagagccacttaagtaatgtatgcaatatgatcaccaggtatacttgtatgagagatgggaaagaaaggaaatattgaaagagcagaaccatgaaggagaagaagcaattgatcctgaagaatagcaactgtagtcagggattagagacctgcaaacaagtttcctattcttttcaaaaatgaagaatagcttcttattacaaaagctgtatatataaattatagaaaagtcagaagtgcaggtaagcaaatactttaaaaatcaaaattatctctaattctttgacttattaatcattttaacagcttgattgatattttttcagatacacacatacatacatacttctacaaaactggaagtatgcttatatattgtatcataacctgcttttttatttaaaaaatatcatgaacaacttttcatgtcattaaatattgttgcattacatttctaatgaatgcataacattccattgtaaggatacagcgtaatttaactcagtctgtattgagctacattgatttccagttattcacattagaaacagtacaccactgaataaatttatgcattcatctttgcttacctctttaatgattcttcacgataaatgctagaaatagaaccacagacttaaaggtctccattgatatgtgtggctcccttgttttcctttgcaaggttttgtgtggcatctgcctttaaaaggttaaagatatttttacttataacatccctgaactttacctcaagtcttggggaaagttattgaaaagtagtttgtattcaaataagtacaaactggcaaggtcaatcttttatacaggttatcagaaacaaatcaacctcataagatggaactaaacccattattatgattgagtcagcaaacttaaagatgtgtttggtttggacaaatactattaattccttaagttccctgtggccacagtttttttttttaatgaatgtttttctgagtaatcttggtcctatttgaggccatcttcatatgcactaccaatatttccagctatacccaacaggtaaactagccctctgtaggcaattaaatgtatattttcctgaagaaagtaaggttatatagaatataagtataaggtcacctagaagagctattaatgtattatggacaatttctttttattgccagagctacatgttacttatatttaagtctgatatttaattctctattatattcccttattattgaattaattaattcatccattcatatgacagatatttcttgagcacttacttgtgccaggcactgtgttagactctggggatttggaaagaccctgcttccctcatgaaacttacattccaatgatggaaacagatcatctgtaagtgcgtaaactaatatatcatgtcagataatgtctcatttccttatctcttaaataaaaaaatattctattccatagggctgttatgagaactgagtgagactatgtggaaattaccatacacatgtttaaaaaatattgtttctttttcctcttatcttttagaaaagggaaaatgattattgtttctttttcctcttatcttttagaaaagggaaaatgatttgtataaatcattaaatactcccttgatattacaaaactagcaaattgttttttgattttattttttaaattgtcacataataattgtacatattcatggtggtacatagtgatgttttggtacatataattatagtgatcagatcaggacaattagcatatccatcatctcaaactctaatcatttctttgtattgggcatgttcaatatcctccctttaagtatttgaaacgacacaatacattattgttaactacctcatcccacagtagtatagagcactagaacgtattcctcctatgtagctgtaatttcgtatcccttaacaaatctctcccatctttcccttccccctacccttcctggcctccagtaaactctgttctactttttacttctatgagatcgaagttttttagcttctgcatgtgagtgagaatgtgaagtgtttaactttctgttcctggcttatttcacttggtgtaatgtcctccatttccatccatattgctgcaaataacaggatttcattttttaatggataccattccagtgtgtatctatcccacattttctttatccattcatttattgtcagacacgtaagttgattccatatcttggctattgtgaaaatgctgcaggaaacatgggggcgcagatgtctcttcaatataataatcttttcctttggataaattcccaggagtgggattgctagatcatatggtagttctaattagcaaattctatattccatattaaaggaaggaataggtaaatttttttcaaattttttattttgttaaagatggagtaatcctcccacttcagcctcctgagtagctaggattacagaggtgagccacagcacctggcatgggataggtaaacattttttaaaatgtttgttttgtttcaggcaaaattaggtatcaactgtttctccacaaagaagagcagcttaagccttcacagcacatagttctgataattcaggtcttcttttgccatttctcaaacatagctatcttgtgttggtacatgcgatctgcagggccttagacgaatcatacatttcatctctctgggcctcagtttcctgaagatgaagttatgttatatggttcgtaaagttcatttcagggctaacttcactttgtccttgtaaaaattatctgcctagtgggtccactccccacctcaccaccccccaaaaaatgactgctgtgctccaacccaagccaatcaaaaatgataaacacttgactgtgacttttttcaagactctgttttacagagaagtggaaaggtctactgtggaatgcttatattttaatttgtcctcattgataggagaggacaaatgtaaactaggagaaatggaaaaaccagtgatacatgtcttgttatgttaaaggaaaaagctagagacaatatgattattaataattattttttaaaattaattcttgcatttattgagcacctgctgtatccctcatatgcattaccttgtataagtcttgtaatagcccaaaaagttaagagtgttcttattctcccaaggatgcagatatggaaactgaaactgagtacggttatgcagtatgtgaggggcaatgctgccacagaaactcaagtctagctgagaccaaacccatgtttttaaccacttgcttcttgcctttgccaatcattgccaccaacgagtcaaaacttacttgttgctggaacatggtttcatcctggccttccacggaatctgttgagcttgttttttttttttttccatatgccataatatgtttagtttcacctcagatgagacagaggatttactttcaagaaagttggacgctgtccactctaaacagtaccagaggtagccttacagcatcagaaaatcctgtggtagtatctcttcatcggaacttggaatatgattttaagagttttttctatcttttcattagagcaggccaacactgacttgatttttctctgaaattagctgtggacaaagattccttttcaaactaaagattctaagcttattttcccccatcactttatcaaaactagaaacaatccattaaaaacactgcccagccttcaggggcttaatcaactcagtggtataaagcatgaaacttgattctgagatccaggagagaatatttggattgccgggaggtgacctttatatgtttctttacgtgtataacaaatacatttcaattcgcgtctagccccttaaaaccagtgcatgtttctgaccctgagtgctactgacattgtgaatcgcactgcaaacagaacacgggtcactgttgttttcctgatctgggaagacatcatggtgtggtgaaagggacagtgcgctgctgatcagacttgggttctgtctctcctctgctaccagtgaaatgaatttcagatgcaaagtggaaagatcaattgtttcttggcctctttgctgagatcaagggaagaagaaagatcagattagttccgtgacagtccaatatttactgactgacccatgttctgtttcatctcaggatttccagggggctccaatttggaccactgcagcggtcccaactgccaacctatgttttcccttcttccctacctttcccctgcagcctcaagtggttccagataaagtgttattccatgtatctcactgtctgaatctagaggactctgatacccaaatgtgtttctcagagtgtgtcaatgaaagggactctttgacccacaatccccctttttcttcacaactccatcatcggcatcctcaaagacaatccatggtgcctactactcctcatcttattgacatgattttaatgtcagctctcgccgggcgcggtggctcatgcctgtaatcccagcactttgggaggccgaggcgggcagatcacgaggtcaggagatcgagaccatcctggctaacatggtgaaaccccgtctctactaaaaatacaaaaaaaaatttagccgggcgtggcggcgaccgcttgtagtcccagctactctggaggctgaggcaggagaatggcgtgaacccgggaggtggagcttgcagtgagcagagatcgcgccactgcactccagcctgggtgacagagccagactccgtctgaaaaaaaaaaaaaaaaaaaaaattttagctctcaaagttttcctccatgttccatgaaaatacactttacaatctagtattccccccaccacacacacacacacacgcacacacatatatactgaaacgaaaccatatccaacttcatttccatttccaattcattcaacattttctattctgttctattgcatttaaaaaacgctggtcacaagccactaaactgatctcagatcagactttaataaatcagactcccccttttatacgcacagagcactctctactgtttcttcctagtacttgtcacaatttgtaagtcctaaatcatgtgattgcctacttaatgtctcccgcaacctgcccctggtgttctgtaaacttcaagaggatatgttttgctcacctttgaatttttagatcccatacaacacctatcatatcataaatgtttaataaatatttattaaaagaattaataaatgaatgtggccaaacctattcaggtctgcatggttcctccctagagttccatcacacttcacagatctaaagtttcctcccagttgtggaggtttgaagctcaaaactgctggaggtgcttcccaccatagctcgtgaaggccctattggtgttttcttcctagtccgtctctagttgatcatgacagatgggccagtgtgttttgaagaagactggctgatgcctcaccaaattctggggacaggtgcctttctccaggggaattcatgaagagactctccaggggcagggcagaccactgggaaaaacaagacccttgggttttctgaccactggccacttgtttttcccacatcaggagagtttatcatctgtgctcatccacctcctgaggttgctttgctggtgctgatttcaggtcccaggcccctaaggtctcacactcactccacaagccacctacacagctgtagttgttttcagccgacagctaggttattttgccttccaagatattttcttttatttatttattcatttatttattttttgagatgaagtctcacactgtcacccaggctggagtgcagtggcacaatctcagctcactgcaacctccacctcctgagttcaagtgattctcctacctcagcctccccaatagctaggattacaggcaagcaccaccatgcctggctgatttttttgtatttttttgtacagatggtgtttcaccatgttggccaggctggtctcgaactcctgacctcaggtgatctgccctcctcagcctcccaaagtgctgggattacatgcatgagccaccatgcccggccaatagtttcttttttgataggcagctcttaaagccctcagaatacatctctaatgatgaaatcatcaggcaacttgacaaagagtgaagaaattgaagggttctctcaatagcatcccaaggaggctgacccacaccctactgcctaccataggctggcttcatgtgctctagtgctgtgaataaaggaaaaaactaacatgttgaagcatttatttagtgccaggaggcaggtactttctcagataccctttttcttctcacataattccaggtcattggcagaatagagatgcaaaccaagaacttgggcagcaccaagatgtagatgctaaaactttaaacttgctggacaaaatgataggggactttgaaataattattcagacaatttaggcaagcaaacaaaagcaattaaaaattgggcatctggctgggcatggtggctcacacctgtaaccccagcactttgggaggccaaggagggtggattgcctgagctcaggagttctagaccaacctgggcaacatggtgaaacctagtctctactaaaaatacaaaaaattggccaggcatagtggcgtacctgtagttccagctacttgggaggctaaggtgggaggattgcttgagcctgggagatggagcttgcagtgacctgagactgtgccactgcactccatcctaggtgacagagtgacacccatctcagaaaaaaaaaatgggcatctggccaggtgtggttgctcatgcctataatcccaacactggaaggccaagtctggacaattctttgaagccaggagtttgagaccagcctgggcaacatagcgtgaccccatctctacaaaaaaattaaaattaaaattaaaaacagccagacatggttgtgagcacctgtagtcccacctactagagaggctaaggcaggaggatcatcaaaactgcagtgagctaagatcgcaccactgcactccagtctgggtgacagagtgagaccctgtctcaggaaaaaaggaggcatccaaaaaaatgttcccttagatccattttttgtctgacagagacaggagaggtgatgaaagggaatgtaagagtatttaagggattatttctttatggtagcagaaggacaaagacatgtttgaaaaatttttaatattgtataaaatgatgatattttcttagtggtcttgttgttgaatccagagattgtggtcatgtagttcataggtaatttatcagttattatttattttttaaagcttttatttatttatttatttattttagagatgaagtcttgcaatgttgcccaggctggcctagaattcccgggctcaactgatcctcctttctcagcctccctagtagctgggactataggcacacaccactgtgcctgtctaatttgtcaacttttaaatgagatcatctgcaagttcaaggaagttagataaagggtgataccacagaaaaaaaatgagatttttctctttaagatgaatattgaatttagaattccttaattaatattgaggatcacatgcgagctacagatagggaatattgagtatttaaagcattctgaatgacctgagtgttttccttctcatgcttattaaaaacatttaccacttacagctgaattggaatatagttctacataaattgttatttacacctgatacacagaaagaaatgtgtttccttatttatcatactattaatttgaatgtgctattctttttttaattgctttaaagtcaattggggaatcagattatgaatatctattttactgcttccacatttcctaagttaatcaaatacgacaagttagtgagcttgtggaatttacttgaatttcctaatcttttaactgagagggtattttcgacagcaaatattttgtagcatccatttgtcattttttaaatattcaaactagttttttttaaaataatgccaagtacacttagtgcctagtaaatgctggccactgttattgctgttatcattattcttttttgtttgtttgtttgagagggagtctcgctctgtcgcccaggctgaagtgcagtgacgtgatctcggctcactgcaagctccgcctcccgggttcacgcccttctccggcctcagcctcccgagtagctgggaatacaggcacccaccaccacgcccggctaattttttgtatttttttttagtagagacggggtttcatcgtgttagccaggatggtctcaatctcctgacctcgtgatccaccctcctcggcctcccaaagtgctgggattatggcagagaaatgtttgtttcaaaagtgtgttagtctctaaggaaatgaatacttccagactaaattctgtttatagtattatcattaataaataaactaaaacattacttctgtttcattgccccaatgtatattgtattaaaatgttcttttctgatcttctctaagttaaaaaaaaaaaaaagaaacaaagttgagtaaacaagctgagcaaactttgtgttgaaactttaatatgtccgaggaaaagaatcttgcattaagtccaatacagagagtctgataatttggtggagcagagagcctcatctgaggtggctttccgtgaacagcatctctgaggtgtcacctgctaccacattcactgtccaccctgggctttgcccctcaagcaccagggctcaggtctcttgttttgcctgtttctccctatagtctccctggcctgtgccttttagacaaaacagattaacatcacctttaagccgtcaatactgaacattctgtctttataaggcctgactcattaccaattttatttggtcaattttaccttccttgctttcaaaggaacaccatttgcctatgtcaagtgttctctttcttttatttttcccttccttctgtctttcccctccttccttccttccttcctccctccctcctctctcctctctttcttccttccttgcctccttccatccttccctccctctctctctttctttctttctttctctctctctctctttctttctttctctctctctgtctttctttctctctttctttctttccatcttcttttctttctatctttcttacttttgatgtagctgtcacgacctaatgaaaatactggcatgagtgatgccacctttagattctccaccttcctgttcctgtcctattcaccaacatgaattggtttgtggctgtaagtacttggtgggttattgctcatagattcagttgcatttttgctgagatagtgctgttaccaaaagcaggggtgctgcttgaagaagtaaacctaactctgaaaaatagagactctccagaaacatcataatcttaaggatggacatttgtggcctgttattgttacttcattctaggtgacagagtgaagtgagtgagggcaaaaatgactgcacacttatggaaagagggctgcctccaccacagacaggtagtgggaggtcccactcttccaggttgaacccaatatcctatcttctccttccgctcttggtacctgttgttgctattgtaaacacttccctcacctgggactgcatatagatgaaagattgctggggggtttcccaggatcttgggccagtgccaacaaatggcaaactttcaagtctagagatggtcctatggcatgactgggggacaccacttccttcaccagaacattcacatccttcccaaggtgccacgcccagttcttttgtccaacaataaactctgcgaagtggagtgaagtcaccacccaagccttagcctacctctgaccacagcctgtgactccacaaagataaatgaaaagaggaaagtcagtgatgttttctatactgtcagcagcaatctcacagcctcaatacattttctttcaaaagtttaatatgtaataactggcatttcttcttcattcctagttggttagactgcatcacatctgccatgccaaactattaagagtaatacaattcttactcttagtttattaagagtaaaaactattactcttaatagtttagcatgctattactcttttcttattttttaatttttttaattttttattttttgagacggagtctcgccctgttgcccaggctggagtggtgcagtggcacaatcttggctcactgcaacctctgcctcccaggttcaagcgattctcctgcctcagcctgccaagtaactgggattacaggtgcccaccaccatgcctggctaatttttttttttttttgtatttttagtgggcaaggggtttcaccatgttggtcaggttggtctcgaactcctgacctcaagcgacgcccccgcctcggcatcccaaagtgctgggattacaggcgtgaactgctgcacctggctgacgtgctattactcttacagcatctggacaatccctaacagtctgaaagctctataatgttgcaggtagtccaaaggccctatcccttattctagaacacaggctttatagcacaggctttggcaagtctgtaacagtctgaactcctccactgtattccacatactagggatcttttaagttgtcattatgtcctggcacaagcatttatcatatttctgggagcatgtagggttcaagatgcgagggcaagagagggctgagttgtttgttattaagctgacaggaaatggccaaggctcatgtgctactgcttgcagttgggcaaaagaggataaattaattgctttgtagaaattcctttctgcattctttagggaaaatttttccatgtgagctaaatgagtcaaagggggtggttttgggctcaacagctttgacattgtcccttcaaggaatgaaacaattaaagaaactgatctcctctgagaaaaagaccatttacaataacctatctactctacataaaatattcccagtagactcatcaaaacaagaccctctgataccacaccatactgggtttttccttattgggattcccccatgttttttctttaatgcttccccatgttttagaaacagatttgcttacccggaaccttccacactcaattccaaatttatcatagtactatcatttgggagtaaacaacatgtaaggggcctacacgggtggaaagcccattcaagaaactgaggatgatcaaatagtagagttgatagtatgtgtataatcccagggaggagtttcatgacggattagaaggtcaacactgcctgatgcagccgaaagatcacattaaaacaggacaggaaggaagtcctggctgtccagcaaaaggtctttagtggctatatcaagagaagcttttacagaagggtgagggtggtagcctgcgaacattggattaggagtgagagggactgaaggaagtagaaactcgagctcaggggaaggggagagaatgagcttgaggaaggccctctgatgaagggaaggctcttttctgatgccagtgagttgagcagacttataggaagcaaagaggagtctagggacagacagggattgtccaggtaatgtaggaaacatttgacaaggacagatctcgaataaaaacatgaatgcaatttctgtttcagatgtctcctttgcctgccccatcccacattctagaaaaatatttggtgcattaacagattttggacttcacagggcttcacttttattgtgcttaatatttgttccttggtgaaacacaaagagacaaactacacaaaaagagaatcatacttgatgaaaaaaatcaatgtttagaagttgctcttaaatcttttacccattgctaacatgggtatttggatgccatttggaacgtattccaggactacttatccatgaaaggattaatgatattggagccaggttcaaagtctcagcaacaagctaaaacctgctctttttagtagtcaggggcaaagcttagtatcctttcttctgaaagctttcgcatgctaagctttccattgccaagcccccgggaaggaaaataccagaagtttcactccgatagcagctttttctgagatgcgcctggtgataacattttccagtagggctatcttctgtctccttccttctctgtgtgtaccagtaaagccttgtacaagtctcttaacctttcttggcttcagtttccaaatttgtaaagtgaagataataatacctccctcatagagttgttgtgaggactacatgggctaacgatcagacagaaagcactcattaagtgtgactagcattgttaattgcagtaatagtagttctagtagcaggcttttccaggttataaggattaaagatacgctcatgttacctaagttaatggtgcattattttaagggtacaccaaaaagtaagaagaatgggaaactacttaaccagcacatggggtgcagaagcgagagcaattgtgttttctttttttttttttttttttgagatggagtcttgctctgttgcccaggatggagtgcagtggtgagatctcggctcactgcaacctctgccacctgggttcaagtgattctcctgcctcagcctcctgagtagctggggctacaggcatatgccaccatgcccggctaatttttgtacttttaacatagacgggggtctcaccatgttggtcaggttggtctcgaactcctgacctcatgattcactggcctcggcctcccaaagtgctgggattacaagcgtgagccaccgtgcccagccccaagggaattcttacagcctgacaggtttggaactctgagtctctctgtgtgtctgtgtctctgtcactccaccatatgtttagcagggttaattaatttgcccaagatcacacaattagtagatgattatgcaagatttgaaccagttgttattcattggaatatgattactgtgtaagttagcatgagaatattgaaaataaatgtcttgttagattcatttattttttaaaaaattcctatgtaggtcgggcacagtggctcacccctgtaatcccagcactttgggaggccgaggcgggcagatcacctgaggtcaggagttcaagagcagcctggccaacatggtgaaaccccatctctactaaaaatacaaaaaattagccgggcctggtgatgcatgcctgtagccccagctacttggtaggctgaggcaggagaattgcttgaacccgggaggtcgcagtgagccgagatcacaccactgcactccagcctgggcaacagagcaagactccatctcaaaaaaaaaaaaagtcctatgtatacttcttcacatcaatttaggcaggctttatttgttaacttttgttggtagccaacatgcatttaaactacttattattgtcctaatctaagaaaaactgagaaatggatgaagttggtcctagggtatcccaaagcacagagtgttttattctgtccttgggacagaggtttgattcaaaatgttttttcggaaactagccttgaacacctaattttattaatattctttttacactccatccctcctggaaaaggactggaccccaattcccaccattgcttttttgggacccattatcttccttagcttcctatgcatctacagggtagtctgggcttcacttcctcagtgtccctgtatgaaattaggtggatatagattagtctgatgtaggaatatcacactgtactaaggtttagtttgtatgttattctctcaagtaactgatctttcaatcgaactaaacacttcctatgtgctttaaggtggtgggaattacaagcatagcaagttatgattggtcacggatttctttcctctttaaatggtgacctactgcccattgtacctactcaaagcaactttctttaggaaaaaagaccacagtctactttcctaagcataaactcagttctcattccacctctaccacctgcaagatttgttaggcttaagcagtcccttaacttctttgagtgtttgttgccttgcctacttcattggaagtaaggctctggaacagggaaggtttgcctccataagactaaaagttatgctaatataagagactagcaaaatgggagacatattcagctctcttcttgtggggaataccttgcccttgaccaaaagccttgtcccagaaagagccgtgtgggtgttggctttgtgcccaacatgtggctcctctgccatgattgatggcttcatttaagaaacaggttttaggattttttcccctaaaatcttattcctgttaattatcatggatcaactttaccttagctcgtttaatacacagtcacctggtataaaagcatgtgaaaacccccagggatcgtaaccacatttatgcattgagaaaagagagtgaggccaagattttgagatgtgttcaaatgcaagaagcttttaaaatgcaaagtattctaaaactgttgaaagttgaagctaactgttgttcccttgttgaaggtaaaaagtaaagcatttttaggaaagcacttttccttatgtgtctaatatttgggaactgcataggagaacagtttaataggaaccctgatattgacagtaagatatattcttaatgtagtaaccagacccagggcagaatttgcaaacccatggtaggcatacaggtggctgaagaagaatcgggacagcaagatctcactgagatgcaattccattcctccatttgatacagattaagatttctgaaaaagaccatcctcctaaaccctcatggactctgcagataatatgaggccagaaaatgaataattcccaactcttgctatctcgttactggccagtgtgtctggcttcgctgagtgtgtgccttctgaagcgtaccctataattattcagcaggtatagtccagttcgtcctacttactttagcaagattacctttcttttatttttcctgtgaaaatccttctcttccttctttcctcctttgtctttcctctttgttaactttttaaatctaaagtgccttgaaaaacttgtttacatagtagtaagaaggaaaatgttgacttgtgctatcctgggaaccttgaccttcctgcattatggataaatcatttccctgcaggtggaagtggaaaattgcagatagaaccacattgactcacattctccttctacttccatttgagtgagcaccaagtatgcatcacgacttgagattataaagttggcttaatgatgagacaggtttctcagtcgggttttccattggctcgaagttcacaaggcagttgttgcttgtctcagagtgtccttaggtggactacatctgaacccttggcgttattataatgcagattctagctgtgctcaaaccaatgaatcagaatctcaggagggtggcgctcagaaatctgcatggttgatcagttctttagcagattcttatttttgtatgctaaagtttgagggtcaccactggagagattccagaacagggcctgcaagggaattgttcaaagtttgctcaagttaactttgttgttacagcattagcttgaatatcaggaggttttgtatttaagttctctaaaaaaagaaaaagaaaaaaagagaacagtctcaatatataaaaggaaaggttttcatatatgtgcccaattataagtatcttgagtattctaggagtctaaacagaatgtctttagatcatccttataacgatcctgagactcttttgactgttttgagttgaagacaggtaataagaaagaaatcaccaattaatgcagaaggaaataaatttctgtatataataatattcacatttgccatgtctcttttaaaaagtccaaataacaggcagagcgcggtggctcatgcctgtaatcccagcactttgggaggccaaggcgggcagatcacctgaggtcaggagtttgagatcagcctggccaacatggtgaaaccccatctctactaaaaatacaaaaattagccaggcgtggtggcacttgcctgttgtcccagctactcgagaggctaaggcagtattatcacttgaacccaggaggtggaggttgcagtgagccgagatcgcgccactgcactccagcctgggggatagagcaagactccatctccaaaaaaaaaaaaaaaaaaaaaaaaacagctcaaataactttaccgtacataactttaccatacatgtcctctagtctcttatcatttcttcatatgaagaataatttatactcattgatgtaaattttgctatattttatacaacaaacatagtattattttaatattgcacatagagaaaaatacctcttcccctcaaaattagaagggttggtatttttattcaggcttattgatttaaaatacctgcttgatccgtaattcaggccatacgatttcaccaaaacaaatatcctaatagttgtcatcttgaataactgtttagtgcacagaatgtagtctcatttattaagaagtgatttaagagattattacttctgcatctatcacactaacatgaccaactctttagtaagggaagagtaagggaacttattttatatctagatagaaattttattaaggatacagtattaggattcataggggaaatagtggatagatcacaagaacgaggctctttctgagccctgcaggaaagaatatttgcagaacaataaaggacatggtggcttcctggagaatgttggccgaagactgagccttacttctggaaaaggctcagtgctagagccaagtgagcatcgatatgccaatacaggcaagaaaatcctgcaagaggcagacttggttcttaggtcggaacaggctctgcttcagaacttgatccggtacccaattcgtttctgcttcagcttctttttctataaaatgagggtagtacttatcccatgagggagctgttatgaggataaatttggctttattgaatgtgcatgattcctggaacccataaagatgtcaaatttagaagcctcagagagatttcctttgctctgtgaataactaaatttggttagctggggtggggtctgggtacttttccttgtgaagaatttttccctcattctggtcatctcctcccctcctatagaggcaccatatatttttcttgtctcaggtacctatagtgataaaacaccctgagctgaaaggatcgctggatagggcagtctcaatacaaaagaatgtggcagaagctcaggcttcagtgcacatcagaatagaagcttcatgagggcagaggcttttgtctgctttcctcattgcagtatccccagaactttgagcaagtgcacactcgatgaatacttgaaagaataaatcaatgtcagacatctgggcttatgtctcatctttctactgttctcaactaagagattctcgtcattctacaactttcctgagcctgctctccttctccaaatattcacccttccaggcactgactccacctcccacatcagagctttttcttaaagtaaataacagtcaacaattaatagcttcataactttggaacagtgcagtgtctttggtttaagaagcattgtttccatcctccaaactaaaataaattttgagaaaagatggagatggtttgggactggggaagaagggaatggaagaagtgattatttgagggcacattaactatttgtacaaagtagaatatcttagttaaatttggctacatagcaagcaggtatcattaaatggatgtctgttagaatcttgattttcaaattaactagatagtcagcgttagttagactgagggagggtgattacagtcctatgtcactgagggagaatggtgaaagggcaagagaaggctggcaggtagagctggaatttttctgccagcaatagaccagtggttcccaaatgtaagcctgcaacagaatcatctggagggcttgttttttgtttgttgttgttgtttgtttgtttttggttttgtttttttgagacagagtctcactctgtcgacaggctggagtgcagtggcgcgatctcggctcactgcaccctcagccttccaggttcaagcgattctcctgcctcagcctcctgagtagctgggattacaggcatgtgccaccagcccagctaatttttgtatttttcgtagagacggggtttcaccatgttggccaggatggtcttgatcccttgacctcatgatctgcccacctcggcctcctaaagttctgggattacaggcgtgagccaccgcgcccagccaggagggcttgtgaaaacacagatagctgggcccatccctagagtttaggattcagtaggtctggcggaggcctgatagtctgcatttctagcttggccaggggatgttgatgttgctggtcccaggaccacattttgagaaccactgcaatagagagtgtgcatgaaaatacaacaacaattacctgatggtccttagcttagttcagttgtcccccacaggttgaagcagtgttcaagggcaaacaaaaactttctctctcagccacctccataagttccatagtttatttaacaaagcaaactcacaaagaaggaggaagttaggactgctccatttccccttatagcaaaggcatgtgtatttcacaactgcaatcagcttgaatagcagaggctggaaggctctccatgtctttactgaagtcacgtcactaagtcacacagacatgctgctaattcactgccttggccagcacatctgaaaataaatagcaccattataggccctttcatgaatatacagcatgtggcctctaaattggccaaggagctggctatgctgggacaaataacttagataaatcacaaatcagagtggagaaatgaggtgtttttaatcaacagcatccaacaatgtgtgttgagtttaactgaatccaggtagaggagggagtgggtgcaagagctcaaagtatgctgagaatagttttatttcaaaattccaggagacttagaaacaacatggtaatgatgaaaggagcctgaagagactctttttttttttttttttttttttgagatggagtcttgctctgttgcccaggctggggtacagtgtcacgatctcggcatactgcaacctctgcctcccgggttcaagcaattctcctgcctcagcctcccgagtatctgggattacagacatgtgccaccatgcccggataatttttgtatttttagtagagatggggtttcaccacgttggccaggctggtctcgaactcctgacctcaggtgatctgcccgccttggcctcccaaagtgttgggattacgggcgtgagccaccatatctggccctgaagagactcttaagatactttcataatagtttaaaaagctgtatgtgtgtttacaatttctgtcataaatctatggtaaccacagcacaaacattttagaaaaagaaaaaaaaaaacaactctcggttgagtgtggtggttcatgcctataatcccagcaatttgggaggctgaggcaggaggatcacctgcatccaggaatttgagaccagcttgggcaacatagcatgacccatctcgacataaaattaaaaattaggtatggtggtacatgcctgtagtcctggctactctcaggggactgaggtaggaggatctcgtaagtcctggagtttgaggctgcagtgagctgtgatctcgccactgcactcagcctgggtgacagagcaagaccctgtctcaaaaaagaaaaaaaattctattttcccacctctctaacataactgtgaatagtagtatttccttctagtttttaagtacactatttaaaaacatggaaggttttcaaataatgtacttagatttaaatgcatttttaagcttatacccatataataagcatagtaactaacagaatgttctttggagtcagatagtcttgggttcaaatcctccagacatttccagccctgagttttgcatttgttaaatagggatgataaacctggttcatagcattgctgtgtggattcactgaggtgctcatcaagtgctcagcacagagccctgtgtcatgtaagcactcagtaaatagtggcatcattttctgttttcacacacaaaaaatgagtcgaccttctgcaatcctaataatcagtaagttcttcttaatggccagaagtatacctatttttagtctatgcatttggcaaaatttcattccacaaattgtttggtggtcccaggagctgctttcaagatcttctctgaccagcttgtcgagagcttttgttatctgtgttttcctcaaagattagactcatgaaagatgtgtgaaagccaaaacaaaggaatgaccactggtgctcagagtgagagagattggtttagttgtttagccaggctatgtggctttgttcccagaccacagattataaccacaccattgtgggcaccacatatagccattttggtaaactagatatgggttgctagggacatgggcaagaaaccatgggtggggaggtgtggacctctcagccctgccctctcaagcctggccaacttcacatctgcaactgggactttgtttctgttccagacctgtttatccaactgccaacttgacagccacttggagtcctcatgagaacctcaaacttagtatgcccaaatgaaattttcagctcaccagaaggtaaccatactgtcttgagtcttacagttaccctgtaaacaaagggattaactttactagatagcaacttcctgcccataaagttaagaaaagagcccctcaatgcaaatgttggttttgcttatcaaataaatggattcttggttcttcaggatagttacagataacaatgggcagaatagccagtaaattcagtaactccttaaaattgttgaaagtattttgtgcactttctttatatcgctgcttagagtgttaattggtaaaatactctgaaggactaatacacaaacactttcacccagcaattccaattctaggactttattccacagatatatttatacatgtatgagttcacatgtacagttttctgaatttttttgtgctggcagaaaactagaaacaacagaaatgaatgaaagagactagttaagaaattattgcccagttttatagtagaatacatatgcagctgtaaaaaaagaatgagggaattattatgtatttatctattaagtgaataaagcaaaatgaagatcaccagcaaacagataaagaaattgtggtattcatacagtggaatactcctccataataaaaaggaatgaacaatgggtgaacactacaacatagacgactctcaagtactgtattcccatttgtgtaaataaaaatgtgggaaagaatgtatacatgtatttgcttataaactctatatgcacagaaggaaacacaagaaattattaccccgggaggcagagcttgtagtgagcggagatcgtgccactgcactccagcctgggcgacagagcaagactccgtctcaaaaaaaaaaaaaaaaagaaattattacctagattgtctatgcagagggaactgggtacctggcagacaggagtaggagggagacattgtacaatatgcttttttatactttttatatttaaaattgcaaaatatcttacatgctcaaaataaaaatagaatagcttatataactatgtctaaatattacatgtagttttcttctctggctattttctttttggtttttatataattttttaaaatccacttacttagcccaggcacataaatggaaagaaagatatgcttaaaattatgttatttgcaaaaacaaatatttagatgttttagagctagtatgtttttgttggtttctagtttagttctacatggcatcagactagctactctatatgatttctggacctttgcaatttgttaagatttgttttatggtcggggatatggtcaatatgtaaatgtttaatgtgtgcaagaagaatgtgtactctgaagttaggcatagtgttttctgtatatgtcaattagcacaagtctgtttatcatgttcaagctctgtgtatctctgggtttttttaatctgcatgatagaacagaagtatgtttgaaacttttattgtagttgtggatgtaatatttttcctctacttttgcagttcttgctttatatattttgagcctatattacttggtacatacatatttagaattgttgtgtcttcctggtggattgccctttgattatttaggaaatgtctctctcttcggtaatgcttcttaaagtccattttgtctgatagtactatagctacctcagctttcttttggctaggtttcataactttttaaattctttcactgtcagtctttttatgtccttatatttaaaatgtgtcaaaagaaagaaggagaaagaaagaaagaaagaaagaaagaaagaaagaaagacaccgcgatttacctatgttacaaacatgtatatgtaaccctaaacctaaaataaaagttaaatataaataaataaagtgtctcttcatgaaaactttcttagcatcattagtcattagggaaatgcaaattaaaaacacaatgagataccaccacatacaacatgtctagtataatggctaaaatgaaaaatactaacaacaccaagtattgttgaacatatggaaaaactggaacactgattatgggagtatacaaccatgttgtaaaacactttaactggtcatttacccaagaggaatgaaagaatgtatccatataaagatttgaacacaaatgtttacagcaactttatttgtaataggtaaaaactgaaaacaactcaaatgtccatagacagatgaatggatttaaaaaaaaccatgttatatccatacaaaggaatactcctctataataaaagggagtaaactactaatacacagtgcaatatagatggattgcaaaatgattctgttgaatggaagaagccagaccaaaaaaagagatatattgtatgattctatttatgtaaaattctcgaaaatgcaaaggatctacagtgacagaaagcaaattagtagttaccaggagacggagggtaaaaattaagaaggggcatgaagaaacttttttattgtagtaatggtctcatgggtctatacgtatgtcaaagcttatctaattgtatactttaaatatgtgcagttcattgccagctaattatactcaatctgtttttaaaagtaaaatgtgcttcttataagtaacaattttttaaaatgtagtctgatgacctttgtcttttaattagagaatttaatctgtttacatttaataactgatataggcagggcacggtggctcccgcctgtaatcccagcactttgggaggccgaggcgggtggatcacctgaggtcaggagttgaagaccagcctagccaacgtggtgaaaccccgtctttactaagaatacaaaaatgagccgggcgtggtggcaggtgcctgtagtctcagctactcaggaggctgaggctggagaatcgcttaaactggggaggcagaggttgcagtgagctgggattgcaccactgcacttcaacctgggtgacagagggagattccatctcaaaaggaaaaaaaaaaaacctgatatatttgggtataaatgttcaatcctactgtaggtttttttttccattttgcccacttgtttcttgttgctatagtcattacaacaatacatgtttgacttattagaatcctagtattaattagtacttttaccatttcccagatgatataatatgggctttaaaacacatgaaatccgtttacccctcaaaccttttgtgtatcattgatgttttaattctatgtatattttaaacttcacattattatcattattatatttatattgcacagtcactatcatttagatttacttatgtttacccttttggtgtatttcaatgctttcagcacttctgtgtttccctttgggattgcttttcttctgcctcaaaaactctccttactatttattttagtatggctctgctggtgataaattctctccatttttgtttatctggtaaaatatttttccttcattacttatgaagaatattttcactaggtagaaaattctagattgttagttattttatttcagcactttgaagatgtcattgcattggtttgtggatttcactttttcaattgagaagttaattttgttggttgcattattacactttgaagataatgtgtcttttccctggatgttttaaagatttttctctttgactttcagtagttctactatgatgtgtctaggtttgatttcctctgtattgattctgatgggcatttatagaactttatgaagctgcgtctggtatttttgccagccagtatttctttaaatattacttctgctccagtttcatctctcctcctcctttgggatccagcttacacaggttacatctgttactttatgactcaacacacttttctggaaagactctcttttctttaaacacaagacactaaatggttacaggtgttcttttaggtgattatgctgcttcatcagcagatggtgattatatcaagaaggaaacttatatgatgacatataaaagctggggagaggagatgtctctgaagacagtgagaaatccttctctagtcttgctgctggaaccctcaaacacttaagtcatctaataaacattctactgtcttcagaggaattttctcagtgaaagggatttgggacacccctgtgaggaagaaacataagttccatgccttccaaataaggggcaaacttttctttgtagtcatgtttccacctgttgaatccgttttatggaagttgtacagttatggcttgtctgtttatgagaagagatagagaatatgagaaacgataaaacctgaaataatccattgtgaggccacaggctgaagaacttacaaggaatttattctagactttatggctgaaaatatgtatgcatatatgtatatgagtgtatggagatacagttatggatagagatctatagatatatgtgtagatatatagatacataaagtttgctacagaaattcattttgtacacttttaaaagtgcactttactaaaagcatccaagaatgcatctcagaaaaagccttagatttcttttatgtggtcaactccaggaactactcactcttgagatagatgtgtgttttcagagcttatccatgccatgcacaatgatctaaccctttgatagctgcatcattcaaagtcagtttttctacatgcaacaaatttttaaaccttgatttttatttatttatttattttgagacaaagtctcgctcttgtcccccaggctggagtgcaatggcgtgatctcagctcactgcaacctccacctcccaggttcaagcgattctcctgcctcaacctcccgagtagctgggattacatgcacctgccaccaagccaggctaatttttgtatttttagtagagacggggtctcaccatgttggccaggctggtcttgaactcctgaccgcaggtgatccacccgccttggcctcccaaagtgctgggattacaggcttgagccaccgtgcccggcctaaaccttgatttttaaaaaaatactaccctgccctaaccttgtaacttaggaagtttggggagaggggtgtgtaacaacctttcactgcttatttgatgtaaatcatttctagtcctgaaacaatggctattttgcaaggtttaattatactgtgtgttgtggttgcatgcataggtacacccacaaatgtctgtcattaatacgtatcactagctttgtactttacactgtatttttggagtgttttacagtcgttcgttaccaagagtaaattatatatttgcttttctttaccccacccctttcactattgtttaaaacatgtcagattcaggaaaacctcaagagacccaaacctctttcaatacttatagacaaagtttttttttccttaaatcagttttaaaatccatccagccattttggctgccggccataccagcagataatgaaagaattttccttgagggtcaaaagccagggagaagccttccagggctgtttggtttcctagcacagctgctggagtagctcgtggtgctgattgatctgcttggagattcttgtgcatcttcacctgttagagctggaaagatgctcaggactatacagcccagcccttctggtttacatataatgaaactaaggcccaccttagtcaactaatgtgcttaaactcaagcaaatggcaaatggcaaaactcaggactctgtcaatgagttttcattctttttctttattcttctagacacatattttataaagaaatgaggcagcatgatgtttaaaatacttaaagtgagaatgagaaaaactgatgtctacatatcatgaaatggttaaaaagtttaacgtgcattgtcttctccattagaacttcttttacgaatttttttctcaaaatctggctcagaaatcttgttttaaaagctccctaaacattcctaggcagaattagtaacgccttcctctttgctaacaaggaactgtgcatattcctgtaatagaatacttaccatattatattgtaagtattaaattattcatctgccctcctcccacctacccactggatcaggcttcccaggaacagcaacagagagcccagcaatttgtgtgttctcagtgtggaatgaatgaatgaatgaatgaatgaatgaaccaaccattccttcacagtcttgcactatcagtgaatcttatgctttattgaacataaaaatcacctggaattgctgacttaaaatacagttttccaggctataccacaagagatgctaatacaggactggggtaggtccaggaattcgaatttttatctaagtagctgatgacttaatgcaaatgatccagcagccacactttgcaagctctacgctatgattagttgtggtttgtagtcccaattgtatatcataattatctgctgatctgaaaaaaacatagagcttctctacccactccttaccaccagtccatcaccaccattctgactccttagtcacaatgggtattgacattttaaataaatcccaaggctcccttccgggagaataaagaggataatatttataaactattttgagttccttagaagaagggtatcttagctcattaaggaaatattatcatgatataaatctaacatcatgaaacttatcttggacatgtcaaatttggtctaagaatcaaatgtagaggaaaataaaacccacacacagtacctgcatggaaacggaacctgtgcaaacacctgctttggctatgttcctttttgtggagacagatgtcccccttcactaggaccagggtagagatgaagaaggttgatttggacattggggtgctatatgttcttttgggactgaagttccatattaggaaacttaatagctgacatttacataacttttaaacatcccaagtagtacgctctgtctgcacactattttatatgtatgcaatttgtttgtttttgtttttgttttgagacagggtctcactttgtcacccaagctggagtgcagcaggcatgaacacagttcactgtagcctcaacctcccaggctcaagcaatcctcccacctcagccccctgagtagctgggactacaggcacacaccaccatacctggctaatttttgtattttttgtagagactgggtttcaccatgttgcccaggctggtctcaaactcccgagctcaagtgatccacctgctttggcctcccaaagtgctgggattacaggcatgagccactgtgcccagccatatggatttttttaaaattatgaacttacataacttcacaggagacagacctgaatgaggtagttattaaactactttctgactatggaaaggatttctgatccttgtagtatatttccacgtatattgttatactgttgtgtgtttgtatttagttgctcatactattttttactgtagcttactttatatgcaggtttccatgggtcaacctaatttatatttttgtcattttaaatggaaaaatgatatcccatatattttgtagtattatttgttcagtgttctttccaatgtgggatgctttggttatttctaattatttgctatcatgctatcatatacagaattcttatgttcatttctgctcaaaattatatttttgtttgtatgaattccacggtgtatatttcccaaagcgagatagttagataaaagagtaacagcagtttcatagttctggttgcatattacagtattactttccagacacacagagccaatatacaaccccaccaggggtgtgaggcatgctggttttcccacagcttgaccaacatgaaattttatcattccagcctatttctgctagcttaatatgtgtgtagggcctcactagagatattttattttgaagttcttcaaatgatatgaagcaattcttttccacgtggaatgattcactattttcattttaaggacaaaccattcgtttgtatttgacagttttgaagtgacaggtttaattgccttctgtataattgattctgtagggagagaaaataggagtgctattaggtattgggttaggctcaaagagtcaagaaagaagattagttgtgtagttctgaatttggaaacttgtatgtggacgactggaacagaaataccagttgaccctgtttaagaagggctagagagcaggaacattctgatttcatgatgacaaaaatactagagttttgacataggacaacagatcttgcttcaaaatgaaagcaagaccctatccttcctgcctctttgatcctctcacagtgccactttctttcctgaacattttcagatattcttatttcagatagaccactctggtgtataataggaccagttttagagtggccatgaagctaagacatgttatttgagagctcttaggggaagacctggacacagcagtcgcaggagaagtcagtcttatctgtaaaaaggtcagcttgatcacagaaaaaggctttggcttggttgtgttggccctccatggcttatgatcctctttcaagtaagcaaataaatgattgcagtgttggtttgagtcctgtggtgccaaacacaagacacattgttgctcatgcaatatagacctttgttttggacagtggtctaatctgctggtttttaaaacattggtgactgtccaacttataattaaaatcagtctatcaagcacttggagacaaaatctgaggttattctttcattcctagttgtcacactaattttttgccttcacttttgtctctgtagaatatttacacgtacacctatctatatctatttagatataatttatatactacaaaattcacccatgtgtacagttcagtgatttttaatgtattcacagtcatcactacaatcaatttcagaacattttcattactccaaacagaaaccccaaactcattagcagccactctccatttctctacaatatccccaaccttaggtgaccacaaatctactttctgtctgtatagattttgcaattctgggcatttcatataaagaatcatagaacatgtggtcttttggtttagcttatttcacttaggataatgtttccaaggttcatttatgttgtggtgtatataggtactcttttcctttttattgctgagtaattttccattgtgtggatatacaactttttgttaagtcattcatcagttgatggacgtttggattttttccattttttggcctttatgaataaggctgctacgaacattcatgtgtaagtttttgtggggaagtgtggttgtctttttttttttttttttttttgcaacagagtcttgctccgtcacccaggctggagtgcagtggagcaatctcagctcactgtgacctccgcctctcgggttcaagcaattgtcatgcctcagcctcccaagtagctgggattacaggcacacgccaccacacctggctaatttttttgtatttttagtagagatggggtttcaccatgttggccaggctggtcatgaactcctgacctcaagtgatctgcccacttcagccccccaaaatgctgggattacaggtgtgagccaccacacactgccagaagtatgttttcatttctcctgggtaaatacctttgagtggaattgctgggatacatgggagctctgcttaaatttttcaggaactgccagatggctttccaaaatggctgcaccattttatactcctaccaacagcatatgcgtgctccagtttctccacatccttgcaaacacttgttattgcccctctttcttgttatagccagcctagtggttgtgaaatggcaactcattgtgatttgatctgcatttcccatttccctcacggctagtagaatacttacttcctatcctagtttttccttatacttttaaaaaattaaataaagaaaacgctgtagaaaattaaggagcaaaatgtatgcttgcagctacagcttcctctggggtttcacacttccttgcctcatcatgtaacgggccaccactaggatgaaggtgctccagtcttattcttccaatcttctctccatttgtcattcagaatcctgggaaagagagacacttgtcctgccgtgagttatgtgcccactcttttgatttgtgtttctgcctagacagtgcacagcatgagtgttggcatcttgaaaggaaactggggtgctcctgagggagaatagatgccaaagttgggacaagagcccagtttcctgcctttctaggtgtaactcattgccaaggtcgggagcaaagcaaaccatgtaggaaacctcatcatgctgggtagttaataagtatgccctagcacacgttttcacagagaaaacataatacgcttcatttgtaatatttaagtattacatctaaagttacaatgtttaaaaatttatatatacccttgttggatacaaagcatgtttaaaatatgtgacctcatttgatcctcagtaatctctgttagtttctaattatattcagtagtggtattggtattgtatgttttggcctcattgtggtttaaatacacttttgtgaactagcctgagaatccaaccaccaacacaatgatgtaatgagaaaacgtgctctgagttccaaacaaatggctaacagataagtgctcagaagtcaacctttttgtaagctggggtatcactggccagcagtcacatgccagcaggtgtgagtagacagtggggaacaatttcctctcatgtgtatggctccctaaagtgttggctgagcattgtccacatgggtgatgcaaaggatcactgaactaggagcagttgggaaaaaatacaatcattgggaattcctgtagcatcgaaggtgcctacagggaggtagaagtattcatacaacagttctctggtgttctctgttgtagcaaccagtcagccaaaagggttcagctgcttgaaatgagaatggctggatcaaaatggcagctcaggatttaaaggattctagtcagataccagacatcctcacatagagaaaactctgaatggctgggggagaaggagtcaaatgccctggatctttttcttgggcctcaaagtcctccttctgtcatcatccttccagtattgggcaggacctgactgcaggcatcatggcctctgtgaacttctcaagggtatgtattatctgacaaaaactacgatgtccactaacaggccactgaaaaggtatcttagtcagttctgctcattgcccagccaaggcctacgttttataacatgatatcaaagattgcatctaaaattgtgatgatttcctaaaataatcatttcatttagatttttctattttaatccaaggtattcttcagcggaaataaggaaacagtttactctcccaccaaaccttggccagtaccatcgacagagcataagtacctctggcttcccctctcttcaactagtaagtatgagttccaggtttacttagcgattggtcaagtgcaaaagtgcccagggtatgtgtttgcctcctgttccttagatcttcctaccatcacctcacattctccagtcaccagatcctaactctgtgactgtgtctggacatcagacaatatccctctctctctctgccaaccggtacttagggtacataatagaacctctgggagctgtggttttgatgtctctagactaggtgggcttccaggtgactcagtctcatccaaattatggttcatatttgggggagaagggctagcccaaaaacttaccaccatttgtagtatgcatttttttggaaaagcatattccaaaatctgaaatgccaagttacagacctcctttttgtaaaataattttcttgctagtataatttacatataataaaattcacacattttaggtgtacaatttggtgaacttgggcaacttagagtcacttaacctttcctcagtcaagatatagaacacttcttttatcctaaagcgttccccagcgcgcttttacaatctcctctccccaggccacaccctccaactcacgcaatctctgactcacttctgtcaccataattttgctctatctggagcttcatatcctgttacagtatgtacaaaccttctttttttgagacagggtgtcagtctgtcacccagcctggagtacagaggtgtgatctcagctcactgcaacctcaacctcccaggatcagatgattctcctcccacctcatcctcccaagtagccgggactacaggcgcatgccaccacacctggctaatttttgtactttttgtagagacaggggtctcgctatgttgcccaggctggtcttgaactcctgggctcaagcgatcctcctgcctcagcctcccaaagtgctgggattacagtgagccactgcacctggccctaaaccttcatttttaaaacacatttcctcttaaattgaagattgcctacatttttatatcaatgccaattgttgagtgtgcctatatgtgttatattatttgagcactaaatgccagatgtgtgccaagtgagataaatctgacaaatgagatggtttgtaaaaccagcagtgaatattcacttcctctgtgagagagctccagccctcctgtactcacttcctcacacagcacagcagcactcttgctggttctgctgcttatcttgaagaggttaggttactttttgtttctacttattacttcgaaaccacttctgccttagaaattttgtaaccttccgctcagtttccggtaaccgccattttgtctcctgtaacaatttacgcgccgtgtaactgtgaatctttcaaaggtatgttttactggagtgatttctggttatttcagaaggataatttgtgtgttgcgtcattaatgaaatagtagtacgaaaaacctatagcatcttttactgcaggaggtaactttccatgccattttttcagaaaatctacttatgacttcagtggcttgctagactggcctttttatttgtacttttcctgtgtttcagaattgcagagtataataaaggcatgtcaagtgcatattgtgtccattttcaggtatattagataagctttacaccaagataaattagatatgcttattggtttaatttgtgctaatatatatttaattgaaaaatcaaaaaaatttttttaaattgactgaagttgtattccaaaacatgcaaaatttagtttaaaatagattggatacacttttaaattttaaacaaggtagagggtttagtgctttgcttttttaaaaagtaaatgaaggctgcagctttctgcagtagttgtcttgggaagtagtgtggacatcactcctaagagacgttaaggaagtttagctaacaggctttaaccctttctctccataccagcttttactcttttttttttttttttgagatggagtttagctcttgtcacgcaggctggagtgcaatggcaccatctcggctcatcgcaacctctgcctcctagttcaagcaattctcctgtagttcaagcaattctcctgcctcagcctcccgagtagctgggattacaggcatgcaccatcacatctggctaattttgtattttgagtagagacggggtttctccatgttggtagggctggtctctaactcctgacctcaggtgatccgcccgcctaggcctcccaaagtgctgggattacgagcatgagccaccatgcccggccaccagcttttactttaatgccacagccttaaattttctttcaggagaaattattttatgtaaagttacaaaggaaaataatgcttaatatctgtaagcattcgtttggtaagtttgctgcctcctcagtaagttttgatgaaagtgaattttgatgaattactaccttagccgggtagtgacgttaacatgtggcttagctgtccattttctaagatatcaagaaaccagcaacaataagtaaaattgttaaattatgcaagaatcacatgttcctacctgtcatcatttagtcttggttctatttgcatgtgaatatcctttagaatatattactcccagttattccgctttacttttctgaatctcttttcccatctcttgacttcaacttcagtatatggctcttgttccttctacctggagaacggaggcatgtggaagcccagaggattgaattcttttttttttcttttctttcttttctttttttttttttagatgaatagtctgcttaggaaatccatctccataatgtttacctggtatcgtgttgtaatgtcagaatgaagtggctgttcttccccttgagtcatcgtcccgaatgaaggttccccaaaagaaatcatcaacttatgtggtgatttccttttacctttaaaaaaaaatttcttttcatggaaagataatggaacatgtcggtaagattcatttctaggaaggcaaaggagtagtttatcatctaaagactctcaacctaaagctgttttagaaaactttccttaaaatgagaagccgtaggttttcgttgcattattttggctaattgaaaaataagaccaagtgcgttctgaccttcgtttctcttacctttatttttacaaccaccatttcaatggcccacttgctgatacaaatgattgtttaattttaaaaagcatttaattgaagtcaagttatttagaacctaatcatttacacgtctttgttgttgctgctgttttgcaagagtgaagagcttggagtcaggtgaatctgggatgaggtacagttgtcatttattagtcatgtaatttgtgacaagccacttaatctctctgaagacttcagtttcttcatttgtaaaattggcataataatgctgtccctagtagggaatatagaattatataatgggtcctttgtatatattggctagtattgctctcttacgatttggcactatggagacactgtgggagattaaaagaagatgatgaataaaaggtgacttcagctctgaagggctttatgatccatttgggagaacaggtaatgtagaatatactggcttcaaaagtggcaggtgtttagaagagaaaaggatacatgatgtgataggaggcaaaggcttgattgagaaggctgagaagacttagagtaagggttctcagccctgactggacattaaaattatctagggacaattcaatcagaattcctgggggtggggaccaagcatcagtattttaaagttccctggggactttaacttgaagcccaggttgagaatcatttaaacagctctgttatttatttatttaaaattttaatgtattttttgagatggagtctcgctctgtcacccaggctggagtgcagtggcgcaatcttggctcactgcaactcctgcctcccaggtccaagctattctcctgcctcagcctccccagtagctaggaatacaggcgtgcaccaccacaactggctaatttttgtacttttagtagagacagggtttcaccatgttggccaggctggtcacaaactcctgacctcaagtgatccacccacctcggcctcccaaagtgctgggattacaggcatgagccactgggcccggcctagttttactttttttttttgtaatggaatttccctctgtcacccaggctggagtgcagtgatgtgatttctgctctctgcaacctctgcctcctgcgttcaagtgattctcctgacttagcatcctgagtagctgggattacaggcagctgccgccatgtctggctaatttttgtatttttagtaaagacggggtttcgccatgttggccaggctggtcttgaacttctgacctcaggtgatccgcccgcctcggcctcccaaagtgctgggattacaggcttgagccactgcgctcggcccatttaaaaaaactttaaaggtagacgtattccaaatggggggaatatataaagaaaggtaacacttattttgccctgtgtgctttgaatttcagaaggtgtagtaagcaaagaccacttactaaccctacagatatatccttagaaaatacagtggtttctgtcataaatctgataaatcagatgagaggaagggtgtatgtttgatgttgatttttctttttgttttattggggtttttaaaaactataaatatcaggtctgatgactatgtgtataaacattttctaagtagataaaatattttcaaattttgcattttttagtatgaaggggatccatcatttgaagttggttttctagatgtgatgataaacttgtcccaggtctatttgacactcctaccaaaatcctttgtgaccagggctagaaggcagctgtggctagtaaataaccctgtgtgtagactcacttattggctttggcattctctattgccacagctgtgtgaatagattaaccagagaccctctggtgccagccacctattcaggcaaacaagtctataatcagtacctctgttaaaatgaaactgtaatatactattgtcttttcatttatttatttatttatttagagacagggccttgctctgtcgcccaggctggagtgcagtggtacaatcttggctcactacaacctccgcctcccaggctcaagcgattctcctgcctcagcctcccaagtaactgggaccacaggcgcaccattgcgcctggctaatttttgtattttttttgtagagacggagtttctccatgttgtccaggctggtcttgaactcctgagcttcagtgatctgcctgccttggcctcccaaagtgctgggattacaggtatgagtcattacacccggcctattttctgattgttcaaagtagaagccaggcacaatggctcatggctgtatgtaatcccaacaatttgggaggcagaggcaggaggatagcttgaagccaagagttcgaggccagcctaggcaacatagtgagaactcatctctacaacaaagttaaaaagaaaaattagccaggcatggtggcacatgcctttagtcccagctacttgcgaggctgaggcagaaggatcacttgaactcaggagttggaggctgcagtgagccatgattgagccacagtactctagcctgggcaacagagtgagaccctgtctcagaaaagaaaagagaagagaggagaagagaaagagagaagagaagagaagagaagagaagagaagacatacaaaagaagagtaacatacaagagaagagttaggagaccctgtctcagaggaaaggaggggaggggaggcgagaggacaagagaagaaagagttaggatctatgccctaaggaagtaaggaggatttgagactgtgtaggtggttaataaccttaagctacatattttatggagggaaaaatcctatttttaaaagtgagaatagaacaattttgaagtgaaatggaatgaattagctggaccataacggctctgactgaagaaaaggatgtaaaaagccacatcctggatatgtaccaaacaccatggttacatggcatgtttgtatatgtaacatttatttaaaaaaaaagtctcatagcttagaaggcatttatttttgttatgtgtataggcttctgtgcaataaagcagccttttttattttacagctcatgatgacttaaatggttaattgcctgataaatatggtcctcttttattcttctgattctgttgttcttttgcacttcatctttcaaggggttgggctattcttaggtttcactgattgcactggaagggacatgacggaaaatgaagatctcaagataattttcttgcaaattcacaatggaagataaaaggaaagagtggcaggcattctgcacacagagcagacgtttctttattgtcattgttcagcagaggaatcaactcagccttggtgaaactagagtgatgcccatggtggcatgtcagcatctccctcttagtggcatcagtgctagattgttgttgttggaagcaggagagtgtttagtccataaagtacagaacttcgatatcacagaagctagaagaactttactgccttcagcttcgtttaaagatagtagagagcttactcattcgttttagaaatatgtattgggtctctatgtcaggaactgctggcacagcagtgagattgaagatacaacagtgaatacaatagagggcctatcctcatagagtttgcctttcagaatgagggacagacgcagacaaatagaaaatgtcgattgtgtcagggagtattgagggctttgaagaatgaaatcgtgacccagaagagatgcttttagattggatcatccgtgaaggcctctatctagaaaggagacacttgggcagaattctgaatgaacttgacggacatctgaaggaaaaatattccagtcagaaggaacagtacgtgcaaagtccccaaaacttcaataagtgacgtgctccagaagcagcaaggaagcagaatgaggcctgaacagagtgggcagtaggaaatgcagtcatagagaaagcagggctgggtcacaggcctcagagactgtagaacattggctcctactctaagacaggaagctgctgtgagcattgaggttgggcgtggaaccatttgactttttatgaggatcactctggctgcagtgtggaaaatagactggacgagggagggcagttaggaagatgtcacggtaactcaggaaagcaataccggtgctttggacgagggtggtggcagaagagaaagtgagaagtattctggatatatttcagaagaaagtggataggattttctgatgggtgatatgtagagtgtaggagaaagagaagaagcaagattgactttaatgttttccacctgggcaattggtggactggaattgccacttgcagaagtgtggaggtatggaaggtatgggaagagcagattgccaggaaagttgagttagttttgaactcattgtgtttgagaggtctgttaaattatcaagtagtgatgttgaggtgtaattggaaaagtcaacctggaatttatggcagaagttgaggctgcagatataaacttgtaattttaaaaatgtatatttaaagccatgggagtgaatgagttcatttgagattgaatgcagattgagaagagatttagaattgaactccagggcactgcatagcaggaggaaaacctagtaaaagtggtatctgtaaaatagaggaacgaactgtcacaatttgcctggtactgaggattttctcagtacatgagactttaagagactgggacaccctgagacaattggttgccttccatgggaagaaagtatgtcaagagggagagagtgaacaactgtgtccaataaaccaggactgagcaaaaaccattgaatttggcatcatgaagtcttaggtgactttgacaaggcttgtctgttgtgaacagccaagtaaatgtgaggaccactctccaaaaggtaaagaaacatgcatgaggatacaggtgcgccagctggagacatcatgcctcttccccgtccccaccaggagtggcgtgaagcctccccagtgctgtaacgaggcagccaggtcctgtgtgactgcacatgtgacttggggcaagtcatttaacctctctgttttcactatcctatttgtgaaatattgtttagatttgtggtttgagtcagctatctgtatactacactgtgttaggagctatgtagattaattttcaacagatatggttctggggttgtaggaattttcaatttgagaacaaattgaatcttaccctttgtcaggagaaatagcctttgacatgtgttaggggcaagggaaatctcaaacttgcttaattttaaaaatgaatatttggttgtggataatttaagctttggtgatatttctaattattttttgtgtgtttctagtctactgaccagaagtctgaaaaaaacaactaaaaagaaagactgcataagccttcactagagaagtattgaaaattgcttgagggaagtgacggtttctttagcctagtgtctgtaggaccccagtgtagtgtttgttgaatgaatgaaaggaggcgtatcagtcaggttcactcagagaaacagaagctgtaggaaatccatatggatgtgtgtgaaggtattggcttgcctactgctggtgtgtggctaagcgagcttaaaagtccgcagggcagatagtcaggaaggaaatattcccaacagactgagctcccttgggcacaagctgaagcctggagtctgaactgccagagagcctctaccttcttagaaaaggcttcccactggctaagtcaggcccacccaggggaatctctcctttgattaacttaaagtcacctgtttagggactttaattacattggcaatagtcccttcacagaagcacctaaatgactgatgatgtaactgaaaaaatgtgtgtgtatgctacaaaatggctgcagtctcccttctgtcctccagctcttgcaggagaactctcttgtagctcaccctgtctgaaaacatactggaaaggaattcaaggaaatgtagttcagcctagccacgttgacacatcatgaagccgtcacaaaaggtaaagcctggtttaggagcatttgcatttgcagtcttaagtatttttgtcttatttttcaaaaggggttgggcacggtggctcacgcctgtaatcccaatactttgggaggccgaggtgagtagatcacttgaggccaggagtttgagaccagccaggccaacgtagtggaaccccgtctccactaaaatgacaacaattagccaggcgtggtggcgcatgcctgtaatcccagctattcaggaggctgaggcacaagaatttcttgaacccaggaggtggaggttgcagtgagccgagatcccgccactgcagtccagcaacggagtgagactctgtctcaaaaaaaaaaaaagtagttttggtttttaatttttgattttttcttatgttattacatataacgaatgatatgcatactctgaaaaatcatgacataaaggtgaccttgaaattactttgatgttcatttaaactagtctttggtctccactggctaggagaccacatatagcagaacagcagagaaagcaaaacagttaattttcatgtttggcttttgagcttccagggacccaagtcttgccttgaaccgatcttaggaaattcctcattccctacccgaccctgtttctaaactgcatccctgctgaaatgcaatgccactgtaactctctccaatatttgttttcttctttggcttaccactagatgtatgtatatatgtttgtgtgcctgtgtgtgtgtgtgtgtgtgtgtgttgactgcctcatagtaaagcctactcttgagattaagactcctgatagtttagagaacagaaatcttttttagttcctggttattacttgaatttgcaagaggaacaactgctaggaggcctagttaacagtagttagggtctccacccacttgccaagggcaagactagtttacaccacatttggaatgaccagtttcctcccactttagtttcagtgtagaaagagtaggggagacgaactattcaatgtcagcttgggtgtagtgccagaaccgtactcagtaatgctgtcattgctgttggtgcttaccagctcttcagtactggaatagcttcagacctcgagagtttatgactttatcatcaactgggtgtgttgcccttggcacattgccacacagtgcttaatgatgatatatgttctttatcaaattccccccaccaaataatggcattatttacgtgtgagaaagttgcacatttcaccacctcatggtttattagagtgcaattccgtgagaacaactgcctgtgatcctctgtatccccagtggccaactcaggagctcagtatgccctacccagtagatgctcagaacatcattgctgagtgaggaagtcagccatcattttctccctggatagtctctcctgtagataacaggggccgttatcagccaggtttttcatcatttgtggctttgaatttcagggacatgacaagtttgctttttgtttcgttttgttttttttttttttttggttttctagagacagggtcttcctgtcactcaggctggagtgcagtgatgtgatcacagctcactgcagcctcgaactcctgggctcagtgtttctcccatctcagcctttggagtagccagcagtataggtggtgtaccaccacacccatctaactttaaaaaaaaaaaaattgtaaagacagagtctcacttttttgcccaggctggtctcatactcctggctcaagcaatcctcctgcgttggcctcccgaagtgctgggactgcaggtgtgagccaccttgcctatccaacatgacaagtattattctctggcaggaagtgaaattttttctcactgatgattgcacacaaatgtcatatctccatgaggcttctactcactagttttacggctcatgtcaccttgcttcaaactatgcttcagtataattttgaagtgtatatttccattgcctctccttgagtaattgatattcttcacaataagtttacatttattatcacttttatttacttactattattactctgagcagccaatcttatgagaagctcagagtggaacgtgtgggtcctggtaaatatattatttgactcacttccaaacacacttaatattgcctggtgttttgattatttcaaaatatacagatttcttgaaaggcctgcaaaaggaaacaatcaaaattatagcggttaagaatgtgagtctgccttggtttgaattccagatgggccagtccctagctgtgtaatcatgggaaaattattaaatctctagcctcgctttcttcatctgtaaaatgagcatacaggctgagcatccctagtccgaaaatgcaaaattcaaaatgctccaaaatctgaaactttttttgtgcctccatgacgccacaagtggaaaattccacacctgacctcacgtgataggtcacagtcaaaacattgtttcatacacacaatacttttttttatttgtataagtttaagtggtacaagtgcagttttgctacatgaatatactgcatagtggtaaagtctggacttttagtgtctccatcacccaaatagcatccattgtattcattcaggaatctagcatccctcaccccctcccatcttcccacctctccaagcctttcatgtctagcattctgtgtccatgtgtacacattatttagctcccacttctaaatgaaaacatgtgatatctgtctttctgtttctgagttttttcacttaagataatggcctccagttccatccacgttgctgcaagagacatgatttcattctttgttatgactgaatagaattattcaggcacaaaattattaaaaatattgtttaaaattaccttcaggctatgtgtataaggtgtatatgaaacataaatgaatttaatgtttacatttgggttccatcccgtggatgtctcattttgtatatgtaaatatgacatgatatgaaaaattcaaaactctgaaacaccaattgaactcaatttgcagtaagaatgcatacctcacagggttatagtgaggattgaatgagacaatcctagtccaatttctttgcacatagtaatgctcaataattattacttaaatgggtataaactttatagtaatgaggttggggctggaaaaaatgcagtttcataatttcctatagaagtcattcaatcctgactctaaactctgtattccatgtggtggttgggtggcgtgggagagtcctctttatcctgtggggttggtcctatggaggtgtctgtggcagattggcagatgcatttgtcttgtgcatagatggtgtctgttgtttcctctggcagagttcaccagtgtcctaatgcaaacttagtcctcatctggctcctgcacaggctgatctctggctcctttagcccctcatggttcctgttgtttcattttcagagggacccttgtaaggactatagtcctctcttcagctgaccttcaggtccccagtcagaaccaagggaaccgactctgtcccttctcatagcacctgaaaaccccgggaaacgaggggaatgctttgctctcagctactgaggttgtcctgtcaccttctcttctgccctcctttgccatggcataggataatgtaagtcagcaatctcattactcggtatatagccagaggaatataaatcattctaccataaagacacacgcgtgtgaatgtttattgcaacactattcacaatagcaaagacatggaatcaacttaaatgcccatcaatgacagattggatgcagaaaatgtggtacatatacaccatggaatactatgcagccataaaaataatgagatcatgccttttgtgggaacatggatggaactggaggctattatcctttgcaaactaacgcagaaatagaaaaccaaatgctgcatgttctcacttataagtgggagctaaatgatgagaacttaccaacacaaagaaaagaacaacagacactgtggcctacttgtgggtgaagggtggtaagagggagaggagcagaaaagataactatgtggtcctgggcttaatacctgggtgataaaataattgtacaacaaacccccatgacatgactttagctatgtaacaaaccttcacatgtacccccaaacctaaaagttaaaaaaaaaatcccagacaggaagtagggcatattttgcctaatttgcagcttcatcctcactccctaacttacgccactcatgtctcctccatcatcagggacagcaagagtggggaggggacgaggcctgccacatctccattctctgatcttatttcctcttgcctcttcaacagcgctttgtctctcctctccagcttgaagcccttactctggtatgtgatttcaaagcgatgaaaaactggtttcgttagtacttcccttggatctgcccttgtctcccatcaaggcagtgcaagtaaagaatccaagatatttgttttgttggtccactggagggtagagatagagaaaaacagtaacttccccaccacccccaacctcccttgggctgatgactccaaagactgccataaatgaacacttcatagagctgctattaatatgacacaaatctacttgatctaagggattcttttactttcttagggtggtcattcctaagtctttggatttcacagaaaagaaaatatattttaattgaggactgacaaaggttgccaactttttatcaattataagaattgtttttataattaccatcaatttctattatttcttttactccccctctttccaactgtggaaggtaaaattgaagagcaaagaacacttatttcaaagtgagtaaatttagctatatgaaaactcagcagattgccctgagtttccttgcgtagctgcagtccagtggaaatttcttccagaccagcaccagtcgccccagtgacatttagaaatcactgccctggattgtttcagccaccgaaacactcggtgttcactgtcagctatgattatatatgaagtgctttcgagaaccaatgtatagcataacttaggccaaaagaaacactgtgcctaaacactcagccaaggagtgttgagtttgcctggatttctggaaaattgtctccgttccctagttcactgtatttgggtaaacaaaacatggcctcggagagcctttgcgggagaaattataaaaattcagcaaagctttgtgatctcattttggatctcctcaggattcctcatcaagttgcaattaaggagagaaaaattccgccttggggtgggattttaattactcatcatgttatgacttgactttctgtgctgcatttttttccatatcactacttctgtgtttgacagctcctccaaagagtcgctccgttttatgccaggagcgaagtacttactaagtcaaaggaaagcaaggcaaacatctactattgcctttgtgcttttaccagaaaactgggtgagaacctccttttccttttccctgcccctccagcctcagttttatgaccctgtggagccagtggactttgaaggacttctgatgacacacctgaacagcctggatgtgcagcttgcccaggagctcggggacttcactgatgacgacttggacgtggtgttcacgccaaaggaatgtaggactttgcagccctctttgccggaggaagggtaaatagttttctaaaatgtagatgtgattgggattgtcatgattgttttcaataagtgggtaggggagatgccttcaatctgaacttaaaaataaaataaaattactcaatccattcaaatgtgtgggacagctatatgatatcatcatgtaagtatagatagtttttaaattagtttggccagagattttgaaaagctatgtgaagactaagccagtgcaagggatgcaggaggaccaaatgaaatgctcaagaggaggttaaaagtgcaggctctggagccagaccacctggctgccagctcagtgaccttggctgtcacatgacctcccaaatcctcggtttctccatttgtaaaaatgtcaagatttttaataataattactgaaatgccaccatccagaagcattttaattgcttacagttatgagactggatcaagttagaaacataaggtaaacccacatttattgagcatctactatgttctgggtactgagataaaaagatgaataagtcaaagtccctcctttaaagaaagtgtcatgcagtgctaaaacagtggggagagctctgtagaataaatatgtgaatagctaattagggcttgagtttctatagttggctcttctatatgtttataggcttgggcattagtttttggcatcaaactaactgtggaattgtagctaaatgaaacgcctgttgcttctaaaatgtaaaaaaaaatgtctctttggaggtttaggataaacttttatttacatttattttaaaagccaaattaagattcatatcctcctggacaggttccatcttctcatcttccccagaaggtcccagaaagaagatcctgacacacagcccctgccctctttactctgagatattctagttctattttggattttatttcatcacagtttaaggaggttggatgataatgggctggtattattgtgaaccgttgctctcttgttcagacagtcctcactcacataggagaactgaccatatgtgtagctctgatgttttaaaaatacacacttcccaggaaagaaaaacattgtcatttttgggaaacatactcccccattttcagtccatttattcaggtatgactttagtataagttaacacctactatttcatctttagtgaagaatcatttaatttattcctttatgtaaaatttatggatgtttccaaatatggtcagaatcttggaaaaagctgtttaaaatgcttacagtagccagtcaccgcagcttgttcctgtggtcccagctacttgggaggctgaggcaagaggatcacttgagcccaggaatttgagttcagcctgggtaaaatagtgagaccctgtttcttacaaaacaaaaacaaaaaacagtacaatgaatttagaggaaggaggaggtttttttttttttgaaatttgataaggaagataatttctttacttagcatcagttttttagtatactgttgccttgtcaaaagaatttataggtaacatacctgtctgatgtctttaagacagcctctactatttcagttgttgccaaaaagtcttctgtataattaaggcaggggaaggtatcatcatcacaccagagtaaacaatagctgactcctgttgaacaacctgtgcctagcccagaactttatgttgagctgtgatggcgtggtagtgaaaaacatgaacgctacaggtgagctgcctggattcaggtccctgctccaccacttgctgtgtgacttggaacaagatccttaccatctcatttttctgcaaagtgagaataatagtaatgcctgccctatggtgctgattgagaattaactgaattaatacatataaagtgattgcctcagtgcataatgcacagtaaatgctacctaagtgtaaactattaatatcatatatgcgtcttattgtgtgccaggcagtcttctaagcactttgcacactaaccgatttaatcttcatcaaagctgtctactaaaaggggcactcttactactctaacagctttaaggagaggaaactgaggcacagaagggttgagtgactggcttatggtcacatagctataagcgatgaagctgggatttgggcaattagggcccagagactgcatgtgtaacctttacaatattttatctaatactaacagcatgtctctgttcttacctccttatcacagatgagaaaattaaggcttgtagcatttaagcctgtttatttctggtactaatgcatttgcaacaatagcaaaaagctttgctacaattgttatttttgatttcaagactctgaagcacttgaagagtattgctcatggtgcattccttaagtagacatgacaggaaccaactgaattaatgatcaccaacaaaagccagtgtttgcaatttcatcaaagcataagacaactgttctttttcctggctttcaaaaaggagaacacgcgtgtcctaacaaggttacacatgcataaaaaatatgtccaaattaccctgtcagagataggtatttatacttattttccttgttttgtattcgaatacagctagttctacctgtcttgtgtctgaatgccttcggggatagttataatttaacatgattctgtataataaagaaaacccacaaagcaaaaaaatgccaacatgtttgtctcatcaaagtaaaaatgtttattgccccaggaatacttcagacatttggaatgattgggcaagaacatcctaagcattctcactgataaggatttaaattcgtgtcatgttccttgctcatgattaggggttgttttgttgttttacccagtaataacgtgtttatttcattttctacctcattagggttgaactggaccctcatgtcagggactgtgttcagacctacatccgtgagtggctaatcgtgaaccggaagtaagttactttttttccactttttgtatataaatattaattttatattgctagtttttaaatatttcttaatactttgaacagttctaggtttacagaaaaattgcatggcaaatagagttctcatgtatgccttccttatccccactccatatcacacacacagttccccctattatgaacatctcactttagtgtggtacatttgttacagtagctgagccaatatggatatgttgttattaactaaagaccatagtttacattaatgtttactttttgtgttgtatattctatgggttttgacaaatgtgtaatgacatgtatatgcctttacagtatcatacagaattgtttcactgccctaaaaatcctctgtgttccacctgttcatcctccctccctggcaaccactttccttttttactgtctccataattccaccttgttcttcaatgtctttttgtggcttgatagctcattttttttattgctgaataatctttcattgcatggctgtaccattgtttatttatccattaacttactgagaaagaaagttctattttaaacataaagaatagactgcaagcttgcccaacccctagcccgtgggcaacatggagcccaggatggctttgaatgtggcccaacacaaattcataaactttcttaaaacattatgaggtttttttttttgcgatttttttaaagctcattagctattgttagtgttagtgtatttgatatttggcctgagataattcttcttccagtatggcccagggaagccaaaagtttgggcacctggaatagagcctttttgttgtcttctaattctgatgaattcccagggggaaaaattaagtgaattgaaacctggcctcagcttcagaggtggcattcgagtttatgaccaagaaataaattacttgctggccttccagtaagggatctttctctcctggattaatcaaaccttctgtgacattgttctgagctttttctctccatgccatggacctggacagcactctctcatgagaaacatctatgcacattgaaattctcagcctgcatgggtgtacctgttggggagtgagatgtggactctctacagattagggcacaccccactagagacacgtcacagaacctttgacaagacattagtagtttaaaattctgatagcctcactcctcctatacctcagtaagaattactattctatggggtaaatgatgaaagactttgaggattgggttttatctagctcctggaagggtgccattgagtttgtgctgaggttttctggagtaatgtcaatatgcacacattttcagcagcagaaaaagagaaagcattcattattaaaagttattaagagaaagttagatgccaatccatcatctgttctaaaatgaatggaaaacaaagtttgctgggcagtcagataaaattatggtttgctgataataaataaaagatttcagaacaagttgttctcaagtttttaaatgctatcattagaggtactttctggacattaaagatctaaaaaaaatctgagaaggaacaaatagaaagatccattttgatacatttggttttcagatttattttctatttcgggcttgtccactttttcatttctcatggcaatgcacgcttcttggagtagtgatttttcttgatcttgcacaaatgtaagagaaaaaaatgactctttttggaatactcgttgaaattttagaaataattatgaaacacaaatcactcagtttcactctagacagataatcatcatgaacatttgatgtctgtcctttgaatagtgttgggtttttttggtatatatttgcgtgaaaactaaataagattataatatcatttttgtaacatgcattttcagttttcacagtaaagagtgattctcttcctttgctattaaatatgcttcctcaatacaatgattgatgattgcataatatatttataccaaaatttatttaaccaattttaatatttaggtgattccttccttttcagtgttgtgcttaaaatgcaaaaacatccttctcaggaaaaatttgtacatatttatgatttttttctttggaattaattcctacaagaggaatttctatgtcaaaggatatgcacaaatttaaagatttggaatactagatcaaacattatgccgggcgcagtggctcacatttataatcttactcagcactttgggaggttgaggtaggaggatcccttgaacccaggagttcaagaccagcctaggcaatatacagagaccccacctctaaaaaaattttttaaaaaattaactggatatgatgacatgcacctgtagtcctagctactcgggaggctgaggcaggaggatcacttgagcccaggaggtcaaggctgtagtgagtgacgattgcaccactgcacaccagcccaggcaacagaggaagaccctatctcaaaaaaaaaaaaaaaaaaaaagccaggcacggtgctcatgcctgtaatcccagcactttgggaggccaagacgggtggatcacctgaggttgggagtttgagaccagcctgaccaacatggagaaacccagtctctactaaaaatacaaaattaaccgggcatggtggtgcatgtctgtaatcccagctacttgggaggctgaggcaggagaatcacttgatcctctaaaaatagctaaactgggaggcagaggttgtggtgagccaagatcgcgccattgcactccagcctgggcaacaagagtgaaactccgtctcaaaaaaaaaaaaaaaaaaaaaaaaaagattattgacactacatgcatgaatcctcaagaatattagatgttataatttatcaacatttccaattttatttgataaaaggttgtcttttttttcattttcttttactattagattaggcatctttcttctatatatttcttggccattttttatttttcctggtgctctgcttattcgtgaaatttgtgcatccctattaatgtatttgtctagtctgatttatttttataagcacttttttggtaaagatattaagccttgtctaccatgtattaaaaatgtcttccccagtatgccttttgtcttttaaagttgtttttaattttcaacattcagaattatttatgtcattaaatctatattaatatttttccttatgtttaattttggcatcatgcttaaaatttgattcacaaacttattattattttctaagagtatgggattaaagcattaatccagatcattagccacttgactgttgcttctgttcccttatgtgtctccatttgtttttatcttttctacagaagcaatggttacccatatatttattatatgcaagtttttgcatcttgttcccctaaaaaagaaaggaatatgtgttttaattttatgtttggcaacattctagggatgggattaccattggcccagttctctgcacccctgtgtaatggagcagttcccttcttaacggtcacctagtggacagggagaagtgtacaacttcagaactcattgtcagtttctggcaagctttcttgtagaaaagttgcatctctttctatccctctgcctcattctcttgcactctgaatctaacactctgcccatgaaaactaaaattcctagcacacactcctcccagggatcattctgtctctatatgcacctgtcgtattttatctgtggggagaatccagtacactattgccagatgtccttcatctcccaacctcacacagtacatttttagcttattgttttctgtgagttgtatctgtattgttttagaatgatggtagaaggagaaggacaaggagaaggtggtgattcatataaatgaaaccagctggaagctgtgatgctttcatagataagccactattatgaagaaggagacttcagatttctgtatagacactgaccagggactcgtgggcaggaaggtgtgcaacaccttcttatctttattcagtgagttcccctttggggagacaaagtttggtacatccttctctttccagctccatctgatccacagaggttctgtccagattcaggcattaagttatctcttcatttggatgagtttccagtttttctgtgtcttcataagtggtttactagaaagtcggaggaggatgcaataggggttgctggccatttgttaattagtgattaattatttagctctcctttaattggttatgtgccaaatcatgtatgattgttttgaaagaaatcaagtaatatggaggtgcattaaggaaaaggcaaatctcatgcctcactacttaccagtgtcctacccttcccttaactcactcttcactgcgtaaagcccagctgtgtagcttccagatcttttcataccctcacaaaaaatatttgtctatttatatttttcacataaagatatatgtattaatgtatgtacttatatattacaaacatttctttaaaataactgtccatgtcagagctatatcccattctactgaaatgctgcctagtattcaaagggtgaaggaatgtgtcctaagttactgaaactaaatgaccattttggttgtcaccatttttcataattgcaaataatactgaaacaaacatatctgcacatttgccccatacatgtgtgtgaatatttctgagggtagaaatgaagccagtgtacatggtatgctctgataggtactgccaaattcttctccagaaaagtcgtgctgtttcattccattaccaactgggcattaaactggcgtgttcccatattcttgccagtgctggatattatttattaaaataaaatttcagttcctccagtcttcttttagttattattttaatctggaagctattacacctactttctgaatacagtttcctatcaccaagtttcctttccttatgtgttctaaaatcccagttaaatatgcacttaaccatacaaccgtaagtcccactcttgagtatttacataaaacctatgtgcaaatacagcagtttagcagttttatttgtaattgccaagactgcatagcagttttatttgtaattgccaaaaactggaagaaaacccagattgtactcagttgggtagtagataaacaaactctggtaaatccatacaatggaatactactcagcagtgaaatggaacaaacaattgatatatacaacaacatggatgaatctcagatacagtatgctaagtgaaagaagccagacaaaggccgggcatggtggctcatgcctgtaatcccagcactttgggaggctgaggcaggtggatcacttgaggtcaggagttccagaccagcctgaccaacatggtgaaaccccgtctctactaaaactacaaaaattagctgggcgtggtggcacgtgcctgtagtcccagttactcaggaggctgaggcaggagaatcgcttgaacctgggaggcggaggttgcagtgagctgagatcatgccattgtactccagcctgggcaacaaagtgagattctgtcttaaaaaaaaaaaaagaagaagaacccagacaaaaaagataactgcatgattccatgtatctgacattctggaaaagatgaagctacagggatggaaaacaggtccatggttcccagggtctgggagtggggaagagggctgactacaaaaggacacgggagtgccctttgcgtggtgctgggactgtagtgcccatgatgtaaaatctgccttggaccattacattagaagaaatcaattccagttatcccaatattccctccaagtgaaatactttggtagcatatataataataattcaataagtattagctattatatttattaagtagtacctatcagaaaacatacttatattagcatgtcaaaggaatgaacacaaaattctctcccatatattgaacgcaccatggaggggggacctgccttcctctggaggaccatacttagtgaagccactttgccttataaggacatgcctttgttatccagaaccaagcagtcaaacactgatttagttagctcctttatttctcagttatctcctgctgatattacatttctccataatatctagagataggcttttatgtccttgctagctgtggtaatggttttgaatcccacttagggggcagaggagtagagtaatggccacttgtgttccctcccaccctcatcattctacagggcatttgccactcaagtactgtaattgagacatttaaatcatacaaataatgctgcccatgaaggatagaggaaatttttagatttccttttaaacctaacagagaaagattaagttacataaaaatgtaaaatacatgatctccagtacattgaaggaaatgtattttcttacttgaaatgtttgtgttacttagactggaagatttattaaatgatttccattctatcactcatgtttacagcaccaaatttggtgtccttgttctaaaaacaatagtacttttctccccatgacttttgaaaatgattactggtttactgattagcatggcgccatgtttgcttgtttgtccaaccttttatctgcatattttgataatgttgtgtggattaatatttgatgacatcctttgggtgatattaacgattttaagctttatttcttctgtcattttctctaaatgaaccaaagagggataaacttcagaatgtttttgatgcctggtggagagctgaactcttaagaaattaaacttgtttacatactatatttattcttgccgcagagacagtgaaacatttcatgagtgttatgggcagcatcataaaagcctttagactttgtttttcatctggggtgattaaggtaattctgaaggaaggttgagctcaaggagagctgagatatcaaggaatggggtatcatctgttttattactccatattttactcccagtgaagtggtaaacaattaaaattcaaacacatcagtgcatataattcagttactcccagaacaccataaaaatgtttccctgatcaataattgcttattatgacatgcatttgttgtgctagctgtcaaggtgcttagctatttgctttctaaaagtatgaaaagcacgcccggctcatcagcctatgtggtaacaaagagcaatccagctgtggatgtcacagagccactcttgacctgttgtgcatagactccctccccacaaatccaaacccactaagactctccaggctctgttaacacacaccagcctggttcagcttggatgccctcctcacaccatgtgggttctgattttccatgccaggcagtccatcttaaatggatgcatcctcaccgtgtttgggcttcaacttcctattctggacctcctcggctactccctaccccaaggcatggagggctgccttgttctgatgcaccttatgattttagcaccaaattgtacaggaagggagagaagggaaaggagaaagaagatgtgaaaggaaagagagggtagggaagaggaaaaagaagatgaggaacacgtattattttctaatcctcacaataggtcctcaaaatgagcaacatttccccctatttcatacttgaggaagctgtgactcagagagactaaggcacttgcccaaggtctcttagtacattaaggagccagcgtctgcacccagttccttctgactctagagcctggattctgctggctgcaccacactgtctttaaagagaacactctcaaaacgcgcttggtctttggattgtctcaaatgtgttagaatagtgttttaagaaaaggaatgcagatctcctgggaagcaataggtcgagttcatttcatgagaatcatttttctagccattggcctacttccccatttttctcctgtctgcatctaggtgcaacaggaacttggctttatttgactccattgccagggtggggtaatgaagctgggactctcttgtagccagcggcagtgagccagcagtctcactgcctacccagtgatggttccttctgtggccagcacttctggaatgagtcatctttacatgtttgccaacccttgtcctctcctccccagccaggttcacccttgctgctgtcaaggagctttgagactttctgagatttttaaatggggaagtagatgttaaacctagtatgaggaagagagggaaagtttgctctggtttcaaacacacagtcatagaagatgctagtcttaatgctttccatagcaaaaaccctgaaggcttagagtgtacacattgtgaactgaacttttaacattattgtgtaactcatttgttaatgcctatttgtcattgactgtggggtccatgtgaaaaactcccacaaacactctaacaaaatggaagacagaaaagaaagcaagcatcatttgtgtacaatagccaaagaacaatagccaaataaatttgatggtctcaaaagttaagcatcttttgaagagaaaatttgattttagggccaggtggggtagctcatgcctgtaatcgcagcactttgggaggcagaggcgggtggatcacctgaggtcaggagttcgagaccagcctggccaacacggcaaaaccccgtctctactaaaaatacaaaaattagctgggtacggtggcgcatgcctgtgatcccagctacttaagaggctgagacaggagaattgcttcaactcgggaggcggaggttgcagtgagccaagatcatgccgctgtactccagcctgggtgaaggagccagactctgtctccaaaaacaaaaacaaacagaaaaaagaattgattttgattttttcagatacagtgcatgaactttttatcataaaatattaaagctggggaaaatatcttagaattcacctcatgttcatgctttaccctgtgaagaaacagaggcacagagagaaataacttgaggataatggaaacaagcacacatctgtaagtgtgtgtgtgtgtgtgtgtgtgtgtgtgtgtgtgtcagagagagagagagagatgttcctttgtaagtaaacactcttggaaatagccgcattttattataacacaaaaagtaatgctaaagctgatatagttctggttgctaagcttcacacacaaaaggtctttaggtagctgcttcctaatttttatttctgtggcccaaaagtctccttgtaaaccttcgtgtcatgtcatactaaacctttgacatcaataccctttaaaatgtacaagtccttaaaaaaaaaaaaaaggcaaagggcaaatactaatgtgggaaatttgaattttaattaactgtttgtttcaatgttaggataaattaatgttagataaattctttggtaatttttccccctaaaattggatttttcaagaaacatcactggttcagtatattgttatttggggtagcataattttaggcgataacttaatatttgcatatatttgtcactactttgagttggtttttgtcccctgacccccagccaggatgttagatcacacagatttttttttctttgagcccttagggagagtccaaaacagtcacttcatgtactaggaaagtttacccagtcagcacacacagatatgttgttgcctacatttatatttgtgagagtgactgttaagaaactagcaggtttataaaatccgtgtgagaatttctctcaaataactgttaatggacaatccagcaatcctcccatctcaggctcccaagtagctgagactacaggcaggtggcaccatactcggctaattttttgtgttttttgtagagatgcggtttcaccatgtcacccaggctggtctcaaactcctgggctcaagtggtgctcccgccttggcctcccagagtgctgggattacaggtgtgagccactgcacccagcctgtacattttccttgaaatcgtttttggatgtttagtcttatttccttattcagagttcacctgtttattttttttttcatttccccaatttagcctgcgtttcacccagccctagcaatataggtttgggtcagagaaattcaagcggccaggggatgctgaagatggcccattatggccgggcgcggtggcacacatctgtaatcccagcactttgggaggccgaggcaggcagatcacaaggtcaggagatcgagaccatcctggctaacacagtgaaaccccgtctctactaaaaatacaaaaaaattagctggctgtggtggtgggcgcctgtagtccaagctactcaggagactgaggcaggagaatggtgtgaacccgggaggcagagcttgcagtgagcagagatcgtgccactgcactccagcctgggcgacagtgagactccgtctcaaaaaaaaaaaaaaaagatggcccattgtggtaagccttgacttgaattagtcaccaagctagtcttatctcttttctaggctaattcttgttttttgtttggctcaaaacaaattgtttgtcttcagaacacaataaaatccagggagagtgtcctgttcttcctacagacgtcactgggacatcttattctttaattaattcagtcaactaaaattggtcaaatacctgctctctgtgccagagttataaactttgtatttgtataattgctagtagctctcttacatttcttactttatctatctggcatttgatctacctaataccttccaatatcacctcatgtccctttaccagcttggtggtttttctatagttcaggaaatcaaacaaaatggtgtgtgacctggaggtactagaaaaacaatagcaaaccaactccaaagccagcagaagaaaacaaataaccaaaatcagagctgaaaaaaattaaaacgtgaaaatccatacaaaagatcaatgaaaccaaaagtttgtgattcaaaaaaaaaacaaggttgatagatcactaactagattaataaagaaaacaagagagaagatcgatccaaataagcacaatcagaaatgacaaaaatgacactacaactgatgcctcagaaatataaaaaatcctcagagactgttataaatacccctatgcacacaaactagaaaacgtagaagaaatggatagattcctggaaacacacaagccccctaaaattgaagcaggaagaaattgaaatcttgaacagaccaatagtgagttctgaaattgaatcagtaatacaaaacccaccccaaaaagcccttaatcagatggattcacagccaaattataccagatatacaaagaagagctagtaccaatcctactgaaattatttcaaaaattcaaggaggaaggactcctctctaactcattctgcaaagccagcatcattctgataccaaaacctgggagagacacagcagaaaagaaaacttcaggccaatatccctgatgaacatcgacacaaaaatcctcaacaaaatactacaaaccaaatccagcagcacattgaaaagttaattcatcacaatcaagtaggctttattcctgggatgcgaggttggttcaccatacacaaatcaataaatgagactcatcacatagacagaattaaaaacaaaaaccacaggataatctcaatagacacagaaaaggcttttaacaaaattcaacatcccttcatgttaaaaaccctcaacaaattaggcattgaaagaacatacctcaaaataataagagccatctattattcaactatccacagccaacatcatactgagtgggcaaaagctggaagcgttcctcttgagaactggaacaaaacaaggatgcctactctcaccacttatatcaacatggtactggaagtgctagccagagaaatcaggcaagaaaaagaaataaaagacatcccaacaggaagagaggaagtcaaactagctctgtcacagtgcaggcaatataattctgtacccagaaaacactgcagaccctgctaaaaggctcctagaactgataaacaacttcagtaaagtttcaggatacaaaatcaatgtacaaaagtcaataacatttccacacaccaataatgtctaagttgagggccaaatcaagaatgcaattccatttattttatccttttgaataaaatacctaggaatacagctaatcaaggaggtgaaagatctctacaatgagaattatgaaacacactgaaagagatcagaggtgatacaaacaaatggacaaatattccatgctcgtggataggaagaatcaatattattaaaacagccatagtgcccaaagagatttttagattcactgctattcctatcttaattagcaacatcattttttcacagaatttaaaaaaaaaaacctattccaaaattcatgtggaaccaaaaaacctgaatagccaaagcaatcttaagcaaaaagaacaaagccggtggcatcacactgtgtgacttcatactacactacaaggctacagtgaccaatacagcacagtccaggtacaaaaacagacacgtagaccaatagaacaagataaagaaccagaaataaagctgcacgcctacagccatctgatctttgacgaagttgacaataacaagccatgaggaaaggtctccctattcaataaatggtgctggagcaactggctagtcatatacagaatattgaaattggacccctccttttaatcatatacaaacattaactcaagatggattaaggacttaaatgtaagacctaagattacaaaaaccctagagaaaaaaactgggaaatactattctggccattggccttggtaaagaatttatgaataagtccccaaaagcaatggtaacaaaaacaaaaattgacaagtgggacttaattaaactaaagagcttctgcacagcagaagaaactatcaacagagtaaactgataaccaactgaataggagaaaatatttgcaaaccgtaaatctgaagaatgtctgatatccagaatctataaggaacttagataattcaacatgcaaaaaaccaccccatttaaaaatgggcaaaggacatgaacagatacttctcaaaagaagacatacatgtggccaaaaaatatatgaaaaaatgcttaacatcactaatcattagataaatacaaatcaaaaccacagtgtgataccaactcacaacagtcagaatgcctgttattgaaaagtcataaaatagactgggcatgtggcttatgcttgtaatcccagcattttgggaggctgaggcaggaggattatttgaagccaggaggttgagaccagcctgtgcaatgtagcaagactgtgtctctacaaaacatcaaaataaatggaaaaaaaaaaagaaaaagaaaaagaaaattaactgggtatggtggcgtgtacctatactctcacctactgggaggctgaggtgggaagattgcttgagcctaggaattcaaggctgcagtgagctataatcacaccactgcactccatcctgggtagcagaacgagaccctgtctcaagaaaaaaaaaaaggcaaaaattaacatgttggaaattagttcagtcactatggaatgcagtgtgaagatttctgaaagaacttaaaacagaactaccattcaacccagcaatcccactactgggtctatacccaaaggaaaataaattgttctacaaaaacgacacatgcactcgtatgttcctcacagcacaattcacaatagcaaagacatggaatcaacctagatgcccatcgacagtggactagataaagaaaatttggtacatatacaccatgaaataccacacagccataacaaagaacaaaatcatgggggtttttttgcagcaacatggatgcagctggaggccattatcctaaacaaattaacacaggaacagaaaaccaaataccacatgttcttatttataagcaggagctaaacatcgggtaaacatgggcataaagataacacggtagacaccagggattactaaagaagggaggatggaagcaggtgtgggttgaaaaactgcctattgagtaccatggtcactatgtgggtgacgtcagtatcatgcatacatcaaacctaagtgacatgcaatttacccatgtaatgaatttgcacatgtatcccttgaacctaaaataaaagttggaaaaaaataaaagataagatatcccgtatcctcaataaaaataaaagtggcgtgtttgtgcacttgactttgtaacatgttttccaaagatgtctttgagtcataaaaatgggaaatacacatgttggtttctctagtcatcacttgacaacttacatgttttacctttcttatgatggtctgtctcatttcttcagtgacagggctagacattctgttttaaactcttcccacagctgtatattattcaacacaactttaacagagttcatagagtggagattgaggatgtttgcaaagttaaatcatttatttttattttttcttaaccatgtcccgcctgctttattcattattaagaacattgatgtgaagattaaatggttttctctatttttatcttcaaacgatctctatttgtggcttctgcacattgctagatttattccagccacttacactagggtcatagtttagcttcagctcggagccaaatgccccacagctgaaatgaccgcacctctgaagtggcattttcccaggccatgcctccctttaataatgagccagccagggggtaaatttgtatctcattacaacagagccttgtattaggcctggagaataattaaatgtgaggaattataattggttccctctttgaaagctctctcagcaccatgtctacacttaagccattacttttatttttaatctaatggtttgccgctctctctccctctttctctctccaaattaaatatcaaccataaaagaaaccaaggaagtccagaaatctgtggctttaaaaagactggatctcgaaaagattttcacaagacgcttccgaaacagacgtttgagtcggaaaccttggagtgcagtgaacccgctgctcaggtatttcctgtcaacaaacatggttaccaggttactgggctcttctgcccagggcatgctgtcagttttacaaactagaataaacgatagacgcatagaaagtttgagtaggaggaactttaccatctgagtcagtgattttttttttcaaacttatttgtagctgtagaaattggtgttcaaatgaaaacccagaaacccaatgattaaaatagaaaaaagtggaaaagctctaactgggggacagagacaccttgggcccatccctacgacagttcctgcagagactcttggtgcccctaaggcaaactacagagtaatgaaaagctctatgctgaggccagaatacctgcattctcctagtgattctaccatgtactaactctctaacttcaagcaggataattaaacttattgggcttcagtttcctcccctgggaaacaaggatggtaatactaactcatgaggttatttgagtattaaatgagttaatatccataaagaattagaataatgccaagtacacttagtgcctagtcaatgctggtcactgttattgttattgtcattattctttttcttttttttttttgttgagacagagtctcgctctgtcgcccaggctggactgcagtggcacgatcttggctcactgcaagctccgcctcccgggttcacgccattctgctgcctcagcctcccaggtagctgggactacaggctcccgccaccacgcccagctaatttctttttgtatttttagtagagacggggtttcaccgtgttagtcaggatggtcctgatctcctgaccttgtgatccgcccgcctcggcctcccaaagtgctgggattacaggcatgagccaccacgcctggccagttgtcattattcttataaagtaattacagtttaaaattcaagttaaagtgtacatattgtgaaatgagcttttaacactattctgtaactaattttttaaatgcctggggtcatttgaagaactccagcaaacactctaacaaatagaagacagaaagaaagcaagccttcatttgcataaaacggccaaagaacaatagccaaataaattccatgtttccaaaagttaagctctatacacctatgctcacagcagcattattcacagcagccaaaaagtagaagcagcccaagtatccatccataatgaatggataaacaaaatgtggtcgccaggggctgggggagggaggagtaggaagttattgtttaatgggtagagtttcggcatcccaagatgaacagcattatggagatggatgctggtgatggttatactgcagtgtgaatgtgtttaacactactgagctgtccaacctgcccattttatagatgagaaaaataaaattgagaagaaaaaatttgttcaagtttgcacagaacttcttgtaaactaatatagttttcagcttccatgtgtcttcataatacaggaatctcaccatgctggaaatgattcgaggtttttaaataatactaatttttcagacaaggtggtccccctaaagcaaagcccactacttacttggagcttcacagtagaatcagccatcatttccagcgctaaatatgacaggcttactgagggatagaatacctggatgctctgctctatgggagatttaaggaatttttcatcagtaattttgactgaattccattttcaccctacatgctgaccaattaaattgttcctcttaatgttagtcagatagaagccacggtaggtatttcagcagaagaaatttaacacagggaattgattaaaccggttttggaggtctgagagaaccaaaagggaaaaatggaggctatcctaaaatcgtcattatgggaaacagcacaccagcctggggctggggtatacggcagtggttctccacttcagcttcatcagaatctcccagagggtttgttcaaatataggttgctgggccctgtctgctggaatttctgattcagtaggtctggagggtgaacctcatactttttaattagcatttcctaagtgatgctgatgctgctggtcccaggaccacaatttgaggactgcaggtctaggggaagatcttggagttgtcagaacgtagaagctcagaagaggagcctgagagcaaggactgaaatccctgagaaggtactgcccagctggtggtgttgtctcaagatctcagagggaaaaacctcatgaagcctggactcacgcctcacaggaggagaaattgcccggctggtgctggtaccttcaaggaggtaagataagggtgattctggaagtaccaaaagaacctgaaggctagaaccagctgtcactacgaaggtgagaggaatagcaagaggaaggagccaggccctttgacctccttgaaccatccggtaaccctgtagtgctccctattgacagaacctaaagggagcagcagacacagcggaaatatgatttgctgacctagcatcaaagaacaaggcataaaagggtgaatttggagcccagaaacaataggtgaagaccagcgtacacacaaagcacacgctttcctgcagcatactagcagagaactcaagtcactgtgttgtgtgtggttttttttgttttttttttttttttttttttttttttttttttttttgagatggagttttgctcttattgccaggctggagtgcaatggcatgatctcggctcactacaacctccgcctcccaagttcaagcgattcttctgcctcagcctcccgagtagctgggattacagacatgcgccaccacgcctggccaattgtgtatttttagtagagacagggtttctccatgttggtcaggctgatctcgaactcctgacctcaggtgatccacccaccttggcctcccaaagtgctgggattacaggtgtgagccaccgcacccggcccactgtctgtgtttaagagccaacttgatcatatgatccagcagtctcactactagatatatgtccagaggaaaggatatcagtatatcaaagagacatctgcactcccatgtttattgcagcactattcacagtaaccaagacgtggactcaacctaagtatccatcagcagaagaatggataaagaaaatgtggtatgtatacacgatagaatactattcagccataaaaaaatgaagtcctgtcatttgcatcaacatggatgagtctagaggataagtgaaataagccaagcacagtaagactaatactgcatgatctcacttatatgtggaagataaataagttgatctcatagaagtagagggtagaagtggtaactagatgctgggaaggatggatggagaagggaatagagaggttggttaacggttacaaaattatagctagataggaggaataagttctagtatttgatagtactgtaaggtgactagaattaataataatttattctgtgtttccaaatagctagaagaaaggattttgaatgttcccaacacaaagaaatgataattgaggcaatgggtacactaattaccctgatttgatcattacacattgtacacaggtattgagatattacactgtattccataaataggtacaactattatgtgtctattaaatttttttaaagagccaaattgtacaaaagttgtttgttttgaaatattggaataatactcatcatggagagaatctcagactgcgagatgacagcaatgttttcaattccactctcattcttgtgcaccttcttattgagtagaatggtgaggccacatagctagatttataaaatttaaacaagtatatgataagattccttggtacacgtagattttataaaaattagattatattatgcataatattgcaaaacttcctttttcatattagcaatatactgtgattatctttctcttccaattaatacgtgttctttcttttttagagacagagtcttgctctgtcgcctaggctggagtgcagtggcacgatcttggctcactgcaacccctgcctcccaggttcaagtgattctcctcccttagcctcccgagtagctgggactacaggcatgtgccacgacacccggctaattttttgtatttttagtagagacggggtttcaccatgttagccaggatggtcttgatctcctgacctcatgatcccccggccttggcctcccaaagtgctgagattacaggcatgagccaccgcacctggccaggttctttcttttaatggctacataacattctattttatgaaagttccaaaatctcttaacacttcctttttgggggcatttagtttacttctattgttttgctatcacgaacagtgtttcagagatgcccttgccctcacattcttgcacacttgccagttataccctacggataaattcttagaagtgaaatttctagattaagggatgagtaatgttagatttttttacttatatgtatcttgatatccttttaaataaatttgggaaattaaagtcattttccttaaactcttataaattttaagaaaaacaaaagtattaataatcgaagtgttaatattgattatttctagcacattcagtttggggaaaatttatgatctagtagagtagtacttttgtgaggtagatgtcacaaaaaatgtgtagtatggagaaattgtccagtagtatgtccatttagtagaattttgagaataacattttgccataaattttatagatatttaccattaatccatttgtagtcctacaacatatagttgattacagttatacattttttgctgagtctttggttcaaagcatgcagttcccaattacaaagacattcctaatggaataaaacatccactttgtgactgatttaaggttgttttcttaaagcacaccgcagccaaaagtggacacagcttgaatagcaaattttttcctttttgttgttgttgcttcatccaataactgttaccaaattcccgtagaaaagtgttgcccactcccacatcgacctttggaagcataacattcagctttggtgtctatacacaatttaatttggaaggctcctcacaaatcatcttattttccagtttcaaaaaccaagttctgagtggagattaagacagggtctctttatttcccagtgcagtctcctatctatttatttgtgaatgaatgaattagttaattaatgagccagggtttcactttgtcacccaggctggattgcagaagaagtcatcgtggccaagcgtggtggctcatgcctgtaatcccagcactttgggaggccaagacaggtggatcacttgaggtcaggagttcaagaccagcctggccaacatggtgaaaccctgtctctactaaaaatacaaaattagccaggcgtggtggcgcgtgcctgtaatcccagctactcaggaggctgaggcaaaagaatcacttgaacctgggaggcagaggcagcagtgagctgagattgcgccattgcactccagcctggccaaaaaatgtgaaactccgtctaaaaaaaaaaaaaatccaatctttcctattggctttattaaatacactttaactttagaagcttagaagcacaataattagaactggcctaactttaaaaaaaattttcacaaagaaattagtaacttgtagggtcatttgtaatctttttctctgttgatttttacagttttaaaaagttaatacaataatttatttacttattttttgagacggagtctcgctcttgttgcccaggctggagtacagtggcaccatctcgggtcattacaacctccacctcccgggttcaagcgattctcctgcctcagcctcccaagtagctgagattataggcactggccaccatgcccagctaattgttttgtatttttagtagcgatggggtttcaccatattggccagtctgatcttgaactcctgacctcaggtgatccgcccacctcggcctcccaaagtgctgggattacaggcatgagcccaatattttaaaaatagtacattattacagaagctagatgtgcactttaaattattatcagaaaattagtatgacagacaaattctatgattgtcccatcatctgggcctgtgacattcacacctttgtgatgttcatccccgactgtgggtgggacctgggacttgcttctgtcaaaacaatatggcaaagcatgagaggatgtcacttgtgatcatattagatagcagccaaaatggattaaagacttaaatggggccgggcgcagtggctcacccctgtaatcctagcactttgggaggttgatggcggcggatcacctaaggtcaggagtttcagaccagcctggacaatatggtgaaaccctatctctactaaaaatacaaaaataaccagatgtagtggcggacgcctgtagtcccatctgctagggaggccgacgcaggagaattgcttgaacctgggaggcggaggttgcagtgagctgagatggcgccattgcactcaagcctaggtgtcgcagcaagactcggtctttaaaaaaaaaaaaaaggtaatcatacctcactgcagccttgaactcctgggcggggttcaagcagtcttcctacctaaacctcccaagtagctaagactgtaggtgcacgccaccatgcctggctaagttttgcttttttttttttttttaagagactgagtctcattgtgttgcccaggctagtcttgaactcccggcctcaagcagtcctcccaccttgtctacccaaggactgggattaaaggcataaaccactgcacctggcccagtctcctttttgttacaacttcctccagctctgttttgctctggtgtgagacatgagcatggttcattaagaggcttggcccccccagccccaggaaagaacaagccaacaaccgataggaatgtagtactgtttttagtcctttcctcaggactggtttgtctgcataagatgagtaactacctgcttccaggtgagaagaagacatttaattttagagtagtccagccaggaagctgagatgtcattcttatcaaatccgcagtttcttcagaagacttgaggcctggctgagattctgtagtcccaaattggagcagtcttgagacatccaagattcttcggttctcattttagacttgccgtctctctcacaaagacccactgttttctctcacaggcaggcccccgccacttaaacgtgctgtgcgacgtgtctgggaaaggccccgtcactgcctgtgactttgacctccgcagcctgcagcctgacaagcggctagaaaacctcctgcagcaagtgagtgccgaggactttgagaagcagaacgaggaggcccggaggaccaataggcaggccgagctctttgccctttacccatcagtggacgaggtgggtgccactgtttccatactggagaatctcagtgaagactctgagagtcatgtggacaattgtgttgttcattattactatatagcagcccatggtgtcagggctcacttgtatgatttctggggcctcgtttttcactcaggcaagcctgtgtgtcatagcagagccattattgattatcacacagatgggattctgataataataacaactggaattttcatagcactttacaaaatatgttcactaagagcatctcatttaatccccaaatgtttcaagggtctacatgtagtaatcacacccagcaagtcaaaccatcctattatttgaggggatgtgtggtcactaatccattgagacatacattacttaaactttgatgttctttagtgctttgttactttctttttaatggtctctatgagcaaccagagagacctgctttgaaaacatttcaggctaggataatcacagcccatgctcccaatgtatagaactttgggatcttgattgtttacttcttcatttattggagctgactgacaacaataggataatgtagactttgcctgtggtcactgcctgaggcactttggatgaaatgagaggtgacgattattcaagccttttgtctgtttgaactccttatactgtataggaggctctcagttttcccctctgcgtgaggttatctacacttctgggtcttgccagaacagattactgctatatctctgctgtccaaatggtattgaaagttcagttggaagaaacaggatttgaggaaactgcataaaagatattctatccatccatgcctctaaatatttgaaattcgatccttggattaagtgagacaatcagagagcctgatacccccacccttctggattgtgtttgctaacctgcccttcagtgagctcacgactggtcagcaaggaggacaataaaggaaacagcagtcatgagataggatatcacgtccacatggaaatactattgttgacattgacctactcaccatctagcaccttcctctttgatgatctaaagggcaattagccttcacatcttccgagaaagaagaagcacgcttctgctgagataatacaaacacttagagattgtgctcattttgtaactaactctcttaagttctttacttagagcaaacttctgtccaccttcaccaaatgtggcaacttaatgattggggtcctgaatttactccagctttcttttcttttcttatcctgattttctaagcaccttggtttcctcatctatttttattttatttgcagtttttgtcagcagcctcaaatggtcttctgaatgaggcagaatataaaaataaattatctcacttatatatagaatctaaaaaagtggatctcatagaaacagagtagaaaggtggttatagcaggggctgtggggagagggagaaggtgttggtcaaaggccacaaagtctcaggcgggaggaatacgttttagtgacctatcgcactgcacagtgaccagagttaataataatgtgttacatatttcaaaactgctttaaaaaaggatttttaatgttctcatcacacacacacaaaaggtaagttggtgaggtgatagatatgttaattagcttgatttaatctttctacaatgtatgcatagatcaaaacattacttgatttaatctttatacgatgtatacatagatcaaaacatgacactgtaccccatagatgttcacaattactacttgtcaattaaaaaataaattaataaagtatgaataatgtgagcaatatcatcatctcctttcctcagattaaaaagcaacaattaggctaaagagctttttcaagattcaacagataaattaaattacaaaatggggccctaacccgctaactacaaagttcgtgttcccttgtttatgtatctacatacatatgactacctggtatgttgggacacataactgaaatccaaatatgatatttttaaatatcatgtaactttttagtttccatccacgacattaagactttttaccagatttgtcaaaacatattaaatcagactgatttggcctttactttccttcctcttcctctcagttctgtgatggagatgccaacatgtaatagagggacccaaagtggatgccagaagagagagaacaattaaaggatgcagagaatatgtccagtgagacgtttgcttgtcagtgtctccctggtggtattagaggggagaatgttccatctgaacagattaaaataatgaaacgtagcctggttttagaggaactttgttttatgatctttgaaacaatgcagacgctccattgggactgaatgttataatctgggagcaggcctaatggggcctgcttttattgagtagagagaagtgcttcgtaattagtgttgcagttatttgtaaactggcgtgtctaaaatgcttgagggcctctataccagccctttaatattttgaagctgttgtcacagaaattgcatttgtatttataatttgtgctttctccaaagaaagttctatggaagaaaggtaaatttctgcctactctgacatgattacaaatgctggttttttcgatgacacaatcagatttttaaatatatcattacttgatttccctgtaaggaaagttagaagagaggtaaactagtatatccaagttatggctgagtctacaggagaagcaaaagttggacttaaccaccaagcttctataaggcaagttctttccctaattcattctgagtctacaaaaggcggttattctacaaaaggcattctatgtcaatccctaagaaagattccactgatactccaaattatagaaaagtttgctgaggctgttggttacaagtgacagaacccaactaaaaccaattcagaaaaaaaggctaggggagtacttcttggctcacctaagaaaatcacaggtaggcaaatgtggagttgacctctggatccattgggagagtaaatgaaagaatatcatctctctcatactgtctctttctctctcattatctctttcattccgttcatttatatatatttttaggatgatgaaaacaagaggtatccattaatgtttcacatttccactttctgtttgcttgggaattagttgccatttcagttagctataaagcctgaggaaattcatatagcttagaagagactgaggaaatatatcacccaaatgtcatatgtggaccttgtttggatcttgatttaacaaaataacagtaaaaacaaattgagacagtcagggaaatttgaaactgacaaaaattatttagtggcaataagaaattattaatttttaggcataatggtattgctgtatgtttttaaaagtctttatcttttaaagatatgtactgaaatatttatatatgtatatggtctctgggaagttgcttctatgtaatccagtattgagcgagaaaggtggtaagtgggtaaatagatgaaaccagaatgcccctgaattgaacttgttgaagctagatgatgggtgaatggttcttcattgcattgctctctcaacttttgtgtatgtttaaaattttcccaatgaaaatcttttttaaaaggatttcaaaaattagaatctagaccaaaggcagtcccagaaatccatgagtgtctctaccttcaggttgttttccagttagggagatcttccctttagatatgtctgttccaatgatcctaaaaggtccagattgccctgagcgagtaggcatcaaaacaatgtctcctctgaaataaactcagccattccacccagcaacatggccaaccgccgtaaccacaaggaatggggaccacagggagaggttggagtaatgatgagcttaccacattgatcattccatcaaagtgggtacatatttaccaggaaggtgactttactgctatttgcaagaatgttaagcttgctgtggggtattcactggaaagctcccaggaaaagacagtgagatgtgaccctgttctttggacccttgcgatgggcagagcactcaccagtgtttggaaagcatactgcaagagtgggaattactgttttcaaggatttgcactacttatttttgcatacatgaatataattaacatagaatgatagttcagatacagatgttaaggttacaataggggcttgatatttctctttaagtgtttagtttctgtgcggtaaaataaacaggtagagctcttaatttgtcattactaaatttcatatacctagcactttaggaagctctaactgcataagcctgtctagaacttgtcaattcaaccccaagtctctatcatctgtttaagaaaacagtgaactgagaaagtgactctgtattataggatcaatggtttacagccttaagtgaaccattctgactcagatttcaaatctgaaactcacatacttactagtaaagcccttgacaggagaaatattgcaaatgtgtaattagagtgggcaaaaaacacacaaaaacatcaacaataggtataagattttgcaatgccatctggtggatgttactaagccatatccatgttcacatttccttccttcctgcttcagtctctttgtcttgaatgcttgggtttctaaaaggagaaactgttttgctgcaaatgctggctttgaggttgggggttggaagagaaactttcttataaaaggcagagtgttagaaaaaaagcaaatctaagttaacttgagccgtggagggtagccttcccttccctgggttaactctaattggagctccccacagaattcactaatgatttccttacgatgtgattaaaaataggaggatgctgtggaaatacgtccagtaccagaatgtcccaaggaacacctgggcaacagaatattggtcaagttgctgaccttgaagtaagtatcaacaaacacactgccaccgctttgagatttatcttgccttttacatacaaatgttgtgtttattatcagagcttgaatcaaagcggagctcccaaaatacgtctaacagtgggcagctgtggagtagtagaaagggcacgtttgagtccattcctggattttttttctaccaacttcttgatggtcattcttctacaatagagaaggcaaacacacgtgtctactaaagttaggcaggtaaggtcattgagtgaaatgacctacattaagaaaaatagcgcttaagtcagtggtgtgctggagtcgactgtactaactcgtgagatctgacagtgcatatctcttcctgggttcggtgaagtcacattggtaactttaaattggccatggcgaaagtatttacaatgtagaaatcagccaatgctacacgtttgcaccaccctcagcacccggagattatttgtaaaacatttaccagtatgccactgttgaaacacaatgataaatgcaactgaaactcagtgccaggggacaatagggagtggtgaggactgtagtaaactatgttaagggggcactcactgctagcaacagactcttgccatccaaataaacaggcccatttttgtcaactgtcttttctattttttcaagagaagctgaaaacccagatttttctgcataatataccgactccctaaatatgttctcattccctttataaacaccatataattaaaacacgactacagtctggtttcatcttgtgggccaattatttgccacatctacttcaaagtagttgcatccaaacgtttcaattgtatactatgatagcaaaaaaaaaaaatcctctatagacatgtattaattttgtactttcatattaaaatattatctacattataaaacataatagaaattttaaagatgaactagataaatctatataaattctagtattttcttcttccactgcaatagattgtcttgtgtaccctcggagtgcctccatacctctcttcgtctctgcagactgctattttcaagaattagttctccttcaaatccacagatgaaaactttaaagttgtacatattttacctaagcaaaactacagaagcgtaacatttatttatatactattagatgggtcatccatctctcaaagtcacttcataggtcccttcagcggcccctggtttgcagtgagaaggcatctggattctggatgtaaggctgggtttcaacccctgggaacttccctgggattttgagttcttccctataaatgaagttgatagaccttatggtctcaaaattcctacctaccacaaacttctatgattctaacgcatagcctctgccaacttcttctgcctcagaaaacaagccagcaagtctgctcacacagctatgggtggtctcttgatattatagtctcctcccgctggccagttctaccagagggtcttcagggccttttgtacggagaaatgagcagcccataaaccagctgagtgtcaagtaatgggcacagaaaagcaagctcttgcccttgcaaaccaacctggcagtgggagcttcctcatctgtctggttggcgggaggactgagtggaagtggctcttcccctctgcattgtttaggaagccttcgctattgtctgagggacacacctgccccgacaggatgcatcatcaggctacttttagatgcagcgactatgtcatttgagatggcagaaattctcctctatggtgctcatagccaagctttctagacctctccagtgaatgagaggcagctgttctcacaggtgggaaaacatggtcactaagagagatatgtgttattttaaaaaaatgttaatggaggccaagtgtggtgactcacacctgtaatcccaacactttgggaggccaaagtgggaggatcgcttgaggccaggagtttgaggccggcctgggcaatatagtgagaccccctctctaccaaaaactaacagatgtgttaatttttagccctagctacattgggaggctgaggtggaaggatcgcttgaggccaggagttcaaggctgcagtgagctatgatcatgccactgtattccagcctgagtgacagagtgagaccctgtctctaaaattaaaaaaagaggagtcacttgaatatctcttaatgaaaattgtaaagtgcagtttctagtgatgtccccgcaactgccaaagcagaaattaagtcgaattgacatatttgccaggtgcacttggcctgctcatgtgttttaaatagtatctatactaacctataactgcaagagaagagatagaccaaaaagacagccctccgagtaactacttagagtaaactagatgaaagaaagaaacaaattcttataggtaagcctagaatgtgacagtatgaatagtaaaaatataagggtaatattaatggcaaatgttttcccatttacattgatatgtaggattctattcataatactacatgttttagcccctgaggaatttgtttaaagttgtagacatctgtaactgtctctgtattgcttttcagaaatatagaaaccctcaaagatacagagagaattagggtcctgccaattctgcaaatgtttgtaacagaaaaaaaaaaaaagaatgacaacaaagtatttttctgttttgtgttttaaatggagaaatattttaagatttaataccatcttatgaaaagtaatctcagctcttaggagtcttcttgatggtgaaactttaatgtgcagaaaatttgcccaggcagtttcttttaaatgcagattttggaggaccttccataacaatctccctcaagagattctggttgagtaggtctcaggtgggatcaagaaacctgcatgctggctaacttcttttgcttcaaaatgctagattctggggactacacttaaagaacaaacactcacggaaaaagcccaggttctgtgatcagagatggctgggctcaaaacctgaccgaacactcacggaaaaagcccaggttctgtgatcagagatggctgggctcaaaacctgaccgaacactcacggaaaaagcccaggttctgtgatcagagatggctgggctcaaaaccggaccgaacactcacggaaaaagcccaggttctgtgatcagagatggctgggctcaaaacctgaccgaacactcacggaaaaagcccaggttctgtgatcagagatggctgggctcaaaacctgaccgaacactcacggaaaaagcccaggttctgtgatcagagatggctgggctcaaaacctgaccgaacactcacggaaaaagcccaggttctgtgaccagagatggctgggctcaaaacctgaccgaacactcacggaaaaagcccaggttctgtgatcagagatggctgggctcaaaacctgaccgaacactcacggaaaaagcccaggttctgtgatcagagatggctgggctcaaaacctgaccgaacactcacggaaaaagcccaggttctgtgaccagagatggctgggctcaaaacctgaccgaacactcacggaaaaagcccaggttctgtgaccagagatggctgggctcaaaacctgaccgaacactcacggaaaaagcccaggttctgtgaccagagatggctgggctcaaaacctgaccgaacactcacggaaaaagcccaggttctgtgatcagagatggctgggctcaaaacctgaccgaacactcacggaaaaagcccaggttctgtgaccagagatggctgggctcaaaacctgaccgaacactcacggaaaaagcccaggttctgtgaccagagatggctgggctcaaaacctgaccgaacactcacggaaaaagcccaggttctgtgaccagagatggctgggctcaaaacctgaccgaacactcacggaaaaagcccaggttctgtgatcagagatggctgggctcaaaacctgaccgaacactcacggaaaaagcccaggttctgtgatcagagatggctgggctcaaaacctgaccgaacactcacggaaaaagcccaggttctgtgatcagagatggctgggctcaaaacctgaccgaacactcacggaaaaagcccaggttctgtgatcagagatggctgggctcaaaacctgaccgaacactcacggaaaaagcccaggttctgtgatcagagatggctgggctcaaaacctgaccgaacactcacggaaaaagcccaggttctgtgaccagagatggctgggctcaaaacctgaccgaacactcacggaaaaagcccaggttctgtgaccagagatggctgggctcaaaacctgaccgaacactcacggaaaaagcccaggttctgtgatcagagatggctgggctcaaaacctgaccgaacactcacggaaaaagcccaggttctgtgatcagagatggctgggctcaaaacctgaccgaacactcacggaaaaagcccaggttctgtgatcagagatggctgggctcaaaacctgaccgaacactcacggaaaaagcccaggttctgtgatcagagatggctgggctcaaaacctgaccgaacactcacggaaaaagcccaggttctgtgaccagagatggctgggctcaaaacctgaccgaacactcacggaaaaagcccaggttctgtgatcagagatggctgggctcaaaacctgaccgaacactcacggaaaaagcccaggttctgtgatcagagatggctgggctcaaaacctgaccgaacactcacggaaaaagcccaggttctgtgatcagagatggctgggctcaaaacctgaccgaacactcacggaaaaagcccaggttctgtgatcagagatggctgggctcaaaacctgaccgaacactcacggaaaaagcccaggttctgtgatcagagatggctgggctcaaaacctgaccgaacactcacggaaaaagcccaggttctgtgaccagagatggctgggctcaaaacctgaccgaacactcacggaaaaagcccaggttctgtgaccagagatggctgggctcaaaacctgaccgaacactcacggaaaaagcccaggttctgtgaccagagatggctgggctcaaaacctgaccgaacactcacggaaaaagcccaggttctgtgatcagagatggctgggctcaaaacctgaccgaacactcacggaaaaagcccaggttctgtgatcagagatggctgggctcaaaacctgaccgaacactcacggaaaaagcccaggttctgtgatcagagatggctgggctcaaaacctgaccgtgccagtccctaactgtgtagactttggcaagttccttattccctgggaaccttgctttcctggtgtgttaaatgcagataatatctgcattacgctgtagttgtgtaaagagactgatgtgtggaaagcacttattataacacaattttaagtctttaataaatgtcaattctctttttctttctcggaaccacagaggacttactactcagtaccaacctaagtatatcacagcaatattcaggccctttgtgtagtagggagtaaacaattaaatatagattgagcatgccaggcagcagctggtgagcctaggcccaggaaagcctccaattggcctggtgcagtggctcacacctgtaatcccagtactttgggaggctgaggcaggtgagtcacctgagctcaggagtttgagaccagcctggacaacatggtaagaccccatctctactaaatatacaaaaattagctgggtgtggtggcacatgcctgtagtcacagctgctagggaggctgaggccgaagaatcgcttgaacctgggtggcggaggttgcagtgagccgaggttgcaccattgcactccaccctgggtgacaagagcaaaactccatctcaaaaaaaaaaaaaaagaaagcccccaattaatgtgcaattacctaataatagaaagaataatcatagaaatcctcaacactgggcttttcggtggtaaaatgtatgtaacataaaatctaccatctttttttttttttttttttttttgagacagagtctcactctattgtccaggctggagtgcagtggcatgatctcggctcactgcaacttctgcctcccaggttcaagtgattctcctgcctcagcctcccgagtagctgggattacaggcacttgccaccacgctcggccagtttttgtggtttagtagagacagggtttcaccgtgttggccaggctggtcttgaactcctgacctcatgatccgcttgcctcggcctcccaaagtgctgggattacaggcatgagccactgcgcctggccaaaatctaccatcttaaccatttttaaggtacagttcagtggtgagtacattcacattgttctgcaaccatcaccaccatccatctccaggaatttttctcttcccaaactgaaactctgtacccgttaaacaataactccttattctccctactccccagcccctggcaactcccattctactttctgcctctatgaattttactactctaggtgcctcatgtaaggggaatcatgaagtaactgtctttttgtgactggcttcttttactcataatgtcctcaggttcatctatattgtagtatgtatcagaatctccctccttttatggctaaataatattccattgtatatatgtagcatattttgttatggcctcatatatgtatctgttcatggacaagtgggttacttccaccttttggctattgtgaatagtgctgctacttggcattgtttttaagatacattcacacacatcattatacgtgatcctcacaacaaccaggaaaatggaaaggcaagcatccttaccttattttgcagataaataaatggaattcagaaaggcgagtaacctgattagggtcgcagaattagcagatggtggaggaggaacagagtccaggtctctgcctgggtgccctgggagtctgccatgattccaaattgcctcatttccaaaggcgccatttgagcaaataaccctttttgtctgtgctcatattctgtccaaatattcttctaaaaagtcctcttttgagacaaagctatccattgatgaggacatcctctcacacatacctggagacaaaacatgactttattgacatgatgtctgaggtaatggtggactggggcccttttcctggtgctctctgcaggtaacatccaaagccatgggacatcaagctgagaaacttggaagaccttcaccagtgttccatgtgcacctgtaatgtccaccaagatactaaaggcaaataatgcaccaggattatgctttgggattcaccgtttcgaggggaattggcaattagggccaatatgagggctcatctttctagctctcatggggcccaggcacctcagtgtttatctgctgtgctcaagcccctccctgacctcaactcagcaactccccagtaatggagttaggaagggccagacattcatccccatcaaaacccagccttcttctgactgtcccactacaaatctaaggaaaagcaattgaacttttcttttgttgccatctgaaaagccccattccttagaattgaataatacagattctatcctttaaatttttttatttcaatggctttagggtaagtggtttttggttacatggatgaattgtatagtagtaaagtttgagattttagtgcacccgtcacccaagcagtgtacattgtacccagtatgtagtttttttatccctcatccccctctactctcctgcttctgagtctccaaggtccattataccactctgtttgcctttgtgtactcatagcttagctcccactaacatacagcatttggtttccattcctgagttacttcactcagaataacaacccccggctccatccaagttcctgcaaaagacattaattatttccttctattttatggataagcagtattccatagtgtatagataccacattttctttatctactcattggttggtgggcaattaggttggttgttggttccatatctttgcagttgtgaaacagatactatctagcaataaaatgtgaaatgtgaacaagtccattacctcagacagaaagtctaccctctgaaaacacagtagttacaataagaaggtgaatcacactaaaggtccattcagcccactctctcttgcagtgagtgagtgaatgagtgagatattccaaaaatatccaccatgcttttgtaatgtccaccatgatctcaaatgattaggaatttttcacaaacctcctatatttctctattaatatcccagtgcgattctcatatacttggagttttccaaatatttcgggaaactgctcatatttttaaccagtttatctatctaggtgttttcagaaaattcaaaattatctaactcaaagccacatagattttcctctctttctatggtaggttcgagattgaaattgagcccctgtttgccagcattgccctctacgatgttaaagaaaggaaaaaggtaagaaagcaaagaaaaatccatccctaaggcacatatattgttcatgattctttgcatgtatgtttttaaatttctttgcagcaagaacctatcagatttgaaagcaaatgatctttgatgagtccagttctgttgcctttgcaatttttcaagcagtggtctgagaatgtaatttatgatctttgaagaattttagagggagaggctactggaggtgctggcctggttggaatagagaaagaatgaaatagcgcatggggttatgtataaaacaaacccatttaaatacatttttaacaagcttggatgcgcatgtaaagcttcctcagtttgagagttctttgcactgtgaaataggctcatgactgaagggcatcttacatggtagaggtctcaatttgtcacagagttcagaccttaccaactgtaatgtgcttttaatgaaaacagtgaccaagacctctcgtgtgtttttaatgtttagtcattttgtgactcctagaagaggacagcaatagcaaatccagagtaggatggacacttctgcccttctttacccataatcattctgtatttaaggaaacaagcatctcctgcataaatattaataatcactgagatttgtaggataggttaactgctaaaacaagcagaacccaatctcagtggtttaaagcagtagttctcaaacttgagcatgcatcacaatctcctggaggacttgttaaaacacagattgctggacctcacccacagagtttctgattcagcaagtccaggtggggcctgagaatttgcatttctaacagtcccctgctgatgctgaagctactggtcaggggaccacattttgaaaaccgctggcctataagcaagaagttgctgtctttgtttctttaaccatccagggtgggaggagggacccctctgttccacgcagccactcagaaatacaggctggcagtggctcctccatcttcagtatgttctctccccaaattactcttgtcactgccattgctgcccctgaagaagagaaaagaaggatggaggaggcctggaagtttgatacattgcttctgctaacaattcactggagagaattgagtcacatgatcacccctcattgcaaaggaggctggtaaatgtagtctctgcctgggcagccactcaccactaaaattctcatggtgatgaaggagagaacccaaccatacagtggctcttaagtaatacgacactaagagagccaggagcactgttcacatcatgctcttgctcagaatcttcactaagattcattccctacaaccaggctttcttcatgatggcattcctctaccttctttccatccatagtctatgcagagtcaagctagaccgctgactaagcttcccccagccgttcaagcctctgagatatttattcatactctaatctctccctggcacatcatcaccttccacccctgcctatcagaatcttctaaggcccatccatctccagtgctgcttccatgaaaagttgtccttgtcacccaactgcaaatggcctgtcactctggaacttccacagtgcttctttgtatgcatgtggtgacttgtattttgcttttactgtagttagttacatgtttaccttttccctcacctttttttttttttttttttgagtcagggtctcactctgttgcccaggctggcatgcagtggggcgatcttggcttactgcaccctctgcctcccgggttcaagtgatccatcctcccacctcagcgtcccaagtcgctggaaccacaggcacatgccaccatgctggctagtttttgtattttttgtagaggcagggtttcaccatgttgcccaggctggtttcaaactcgtgagctcaagcaatgtgcccgccttggcctcccaaagtgctgggattacgagtgtgaaccaccacacccagtccttccctcattcttgattgtgaattaattgagagcagaggtcctcctcttctgtagtgaagtaactgatactcaggaaataccggtgggttaataaacatttaaatgtttcaaggaacatctctcaaatggctccagaatacctagacattgtgacaaaacatttgtcagatttatccaggagccactttcctaaaccacatctgtgattattacacttactccttcagcaaaatttctctgtggtgtttttactcctttttaacatgtttaaaccatgaatgcaacaggtctaacttatatttcactttgctgctcatttacagatctcagaaaattttcactgtgacctgaactctgaccagttcaaaggatttctgcgagctcacacgccttcagtggccgcatcaagtcaggcgagatctgcagtcttctcagtcacctacccgtcctcagacatctacctggtagtcaaggtaattcagtacgatctgatttgcccaatctgatgttttcattgctgtgttgttcccagcacatgtttggggtgcacgcaatctcagaatgtgtccacatatcctctgagattcactttgtttccttctcagtttaccccttttccgttctaagtaaactgtttcagatactagaaagactaggttttggagacacacagacctaggtttgagtcctggctttacaacctagtaattaaatggcattggcagtttcctggtctttctgagactgagtttcctcatctgtgaagtggagataatcacactgacctcagtggatagtcatgactacagaataaagcttggcacatcttgggcacccttctcctaattaaggagagttccctcagtgacctggtgcaaagaagctgctgtggagaaaggaacaaaatctctgggctagagtttcctaacgatgttcatgttgctctagagatgcatagttacgtgttcccaagtccagcctcttacaagctgaagcgtgggctgtggttttcaagtttcatcctccttttttttttttcttcttaccatgtcacagactgtctctaatgagagttgaaatctatggggcaattgtaagtagaagagcctttcattctaggctatactctttgctgttgtaagaaaaccagatcctttctctgtacaccaaaatgactggttagaaattaacaaacatcaggtattttacctaccttaggccagataattggtcttattgattcttttttttttttttttttttttttttgagaggagttttgctcttgtcacccaggctggagtgcagtgtcaccatgtcggctcactgcaacctccacctcccgggttcaaacgattctcctgcctcagcctcccgagtagctgggattataggagcccaccaccccaaaccaggctaatttttgtatttttagtagggacaggatttcaccatgttggccaggctgatctcaaactcctgatctcaggtgattcacctgtatttggttcccaaagtgttgggattacaggcgtgagccactgtgcccggccgtaaaatcattgtaaaaacaaaacaacaaattcaggtgtctgatttcatgtgcccccagcctcttaggtttggaacattatctagttagtacagtgttttatgtctgtagtctcagtgatcgccccatgatctcatggattccaaataattcaggtagctttgaggtcacttaacagatggcaaatgtcttttcactctagcttctttaacaccatataacaaagattatgagaggttactgtagcttgaggggaacttatttaagcttatagaagtatagttaaaattatattgctgaaaagacacttctattgttgtcaaacttcaatgtgtctccttttcgttgcaatattacttagacatacaggaaaattaaagcccactatgatagccctgtaggtaagttcacaattctctgtcagcctaggaaactgaagaagccaacactagttctatagagccaaattttatctcaaactctacttcccagtggatgactttctcttgattaatccgtcatattctgccaagtaacagtggttacccattggttcctatcacttactaaatatgttccaaaattttcaaatgtataaatgtgttcatttggcataacaaacatactaaagtgtttggataggtttaagaaattgaaatctactcagcaagacagcccctggttggctttctgtttgcttttctttatcgtaatgccatcattgttgcttctttccctttaaatatatagtaaatggtgttaaactatttagcacatccaggcagacattatttggtaagaggggcttctttcttttttgtttatattcccaggccgaacatcagggtctttactgtattttaggtagcatcatctagttcaggtgttgcatataatacggctttaagggattatttccgcttaaaagtttaattcaagattttgtgaaatttttttttaaaaagaatttgttttacaatcaaggaaagaagagtgaaaatgggattgaattggaaacttttcaaaaattgtttaaaaattggtatgccgtgcccaatttaaatatttcataagttgcgatgggcctatccttatgtaagggccacatagtttgagaaaacacaaagcagagagcctagcactttagaagtcttgcagatgttaaatttcccatcttaaagagtttacaatccagttaaaaaaacaacttggcattcaaagaaatgggttcaaattcctattttgctacatttgctgtgtatggtagcaagtttagtctgtcagtctaattggacaatgatccctgtgcctgagtggttttgaagaaaattgaaataatgtatgtaaaaacacctaccctgtacctgacataccataattaggtaaacaataaatggccatgaaatatgaaaaaaataggtatgccaagtgttaatcctaccccttctgaatagagcagaaagtagtctgttcccttaagaaaagttttaggttaatctgataggcttatttgccctactttccatggttatgaggagtcatgcatttcattacacacttttgcataaatcatgagggaacaaacaataggttctcatgtcggtctgcagctccttctcatgaagtacctggagttctccttgcccactgcagccagggcatagtatctgctggtctggtcaaatctgacttctcctgcttcctgtatgttccatgatacacactactagtgcatgaagccgtggcattccccttccttgcttcagggtcctaattaagaagttcttcatctctgttcagaatttattctaaagaccacatttttaatccattcacttcatggaaaaattagcttccttccaatttgttctacaagctcctgactatgagcttcaggagaatgggggcagtgtttatcgccaccttatctcccagctgctaccatatagaaggtactcaacaataagtaaacgattgctgattagcaggaatactggtcagtttctagctcaagtgttacgtgcttatgttttcagtgtggtgcatctctcagtgggattcgccttctcttcatgctgtggcaatgggagggggttttgaacttctttgatgagaagagagacttcctgcttggagtcctccctgaagcagatattcattgagtagcctcatgctgcttcctttgaaaccccataaatgcccctttatcatgggtattgttaaatactttgtgcctaactcacagcacctattaagtatgtgtcccttttgtactgtgttgacccaaattctttcttcaaggatcatctcaactgatgggactaaatccactggttttactcttcaacatctaagttaaattttttttgagcagagagttaggaaatttcaaatttctccttgtctttcttttaaatatggtgcccaaatttatgacaactggccagccagtcactttacctgaagcaagacagaagacacttcattcattcttattaccagcattcattcctatcaacagccagttagcaaagcaagaagctgcacatcccaatgcttttgagtttctttccaagtctgttaaatccagagaattagccctgataggaattacaagggagacaattacagataatttattcggttcagtcattcattttgtggaaggttttagtccctaacccaactttcacagagaccatatctcttttttacattgtaagcaataataaagaaaatgagttttccacttcctacgtatgtctcctgggttttgttttataaaataacttttattgctgtttttattatatacataatacatgtttattgtttaaaatagaaaatacacataagcaatgggaagaaaataaaaatcacacataatcccaccatagaaagttaactactattaacacttgctgcatttgctgagtatctactgtcacccttttaatatgcctttatgatttgttaaataaaattgtatgctattctttatataaattttttaataaaaaaatatgtatcacagatagcttcctatgtcatcaaatattgtcataaaatgtaattttgatggttgcatagattcctttttatggatgtaatttatgtgccttattttaatattctttttattggtagattgaaaaagtcctgcagcagggagagattggagactgtgcagagccctacacggttatcaaagaaagtgatggtggaaaggtatggtaatttgagtgttgttaaatggagacatcttagaagaagcaggtattttcagaagtgttacacaaatagttaatgggctttagtccctaatgtgtccctatataagacactactacattttaattaaataaaagaggaaaagaaaactggtcaccgatgatgactttttttttttttttttttttttttttgaggcagtgtcttactttatctcccaggctggagtgctggagtgcaatcacggccccctacaaccttgaactcctgggcttgaatgatcctcccccttcagcctcttgagcagctggtactacaggcacatgccaccatgcttggctagttttttatttttttttagagatggggtctcactgtgttgcccaggctgctctcataattctggcctcaagtgattctcctgcctcagcctcccaaagtgttgggattacaggcatgagtcaccatgcccagcctgatgatgattttttagagaaataaatccttgaattttctaatgttgacatacagcaaggtctgactgcataacttgattggggcaaggccaccccctgttgtcttcattctgaggctctgactcagctggttgggaggtccgtggagaccccaaaactaaacagtgccagagctctcctggccttcctcaacagcatgggccgctgccctttcaggtatgcaaataactgggaattggctgccactaccatgcattatatatattcattagcacagcataggtgttgagcctatgaaaaggatatcttttctcaacagcaatttgcaaagattcccagtgtgatttttaaaacatggccttggccgggcgtggtggctcacacctgtaatcccagcactttgggaggccaaggcgggcagatcatgaggtcagaagattgagaccatcctggccaacacggtgaaaccccgtctctgctaaaaatacaaaaaattagccgggcatggtggcacgtgcctgtattcccagcttctcaggaggctgaggcaggagaatagcttgaacctgggaggcggaggttgcagtgagccgagatcgtgccactgcactccagcctgggtgacagagtgagactctgtctcaaaaaaaaaaaaaaatagcctttctggaataagacttaccttattagtattgtactctacagactcataaatgtcaagtaagatttattgaactcaaggcattttttttttaaaatctgtcttttattctgaactcagaaagaacaccttggaagtattgtaaacttcctaaggagttgttaggaagctttttagaattttttggagttttccaaggtgacttttggagaaacaggttcacttgggagcttggtagatgatatactaaacttgatttcaagattcttttatgcaaatccaagtcacatagctagccaccaaaagaattgataatctgatgtaatgagtctctttttgttttcgttagctaaaaatgtattttactaattaaatgtagcctttttgtaaactcctcgttttttaatctttatttccttatcagctagacccaagtgcatcatttttctgcctattcactgtttttattttttagtgggaagatatgtttttactctttttaatcagtagggtttggattttggagatggctgtcatattcaggtcagaggcagttgacttggtgctgatgcttgtttcagcttgtttctttccattttcctccagagtaaagaaaagattgaaaaactaaaactccaagctgaatccttctgccagcgtttggggaaataccggatgccctttgcctgggcacccataagcttatcaagcttcttcaatgtctccacccttgagagggaggtaactgatgtggactctgtggttggtaagattttcacctgcagtgggaaagggagggctccccagtgtgcgctgcccaggtccacagcttactagcggggactgggggcacagtgaggtgtgggaagtggggaggcagaaggagataaatagaatgaaacactgttatgactggattacgtagatttggacggtgatctccaaaagaaattatcacgaacattggtgaagattaagtatactcttatagtaagattttctagatggtatgacactttaaaaagctgatttttgctagccacccgctctcaaaagtaaaactttaacaagaaaatgtagtaaccatctgtagtgtgttaagcagagacaccatggtcgactcctaaacctaaaaaaaaaagcctctgttacaaaggcttcaaaaagcaaaactcaacaggaacagggcgtggtggctcacgcttgtaatcccaccactttgggaggccgaggtaggcggatcgcttgaagccaggagttcgagaccagcctggccaacatggtaaaaccctgtctctactaaaaatacaaaaaatttgctgggtgtggtggtacacgtctgtaatctcagctactcgggaggcagaggcaggagaatcgcttgaaccagggaggcgaggttacagtgagccgagatcaggcctctgcactccagcctgggcaacagagcatgactttgtctcaaaaaaaaagaaaaaagagaaaaactcaagtttcccagcaaaatttccagttcgttaaagtttactttgccaagtgcaatgaaaaaatgggcatccaaagaatatttactgttttagtttatttagcatatttctttttcgtcatctcacccgtgatctgaatcattcattcctacactgcttggtgtagaaattttcaaaagggttgcaaattttcaagtagacctgcccatatcacctgtggtggggtttctctttccctaaatgcttttgtatccaccaaatatagaagtccatgttcacatcttttcatgcattccttaagctaaggcttaagccacttctgaaatactaccttgagcagggaagtggaggaaagggcattttgtgattgctgctgctattttggagttactggtacataatcaccagtcagaactcctgggttatttctggttcgtcaataacaaacctcactttaccacatcctgatcttcctgccacagctttctttaatgccgtctatgtagacccaagtaacttattgataagagttatgtatagagcttagagggcacacaagctaggtaattcaggatagggcatgctgaggcctcaatcatctctaggtcaaggataacctgacaacagagactgattcttaaggagcaaccagaagatgcaaagatgtcatgtattatactgaggcagaatggcaagtttaggtgggtagaggtagcaagaaattctaattcaacatcatggtaagaattaaggataagaagatactcaaagacgggttggaactgctctagttctaagcaatttgattatttacaagagaacccatgagtttttgcaatataaaagcaacaagatctccacccaaatcccaaaaggggataagaaacaactgggcaaactatcagggtcccagcccaagtctgagtgtgatttggggttctaattcccattgggcagatcacccaaggcagaaactcagtcttgctgcctggtccacataatgagagcagaggaatgctgggattcagagtgtacacaggctgaccccagcatgtttgggtcacaatcacaaatgccttcaggggcatttgagtacatgcctctcccagtggaatgcaaatatagaaataaaagaaaagcaaacactgtgctgactaaataaagcttatcaggagaccctgttctggctatagctctggactcttgccgggtggcatttgggctaccctaatttccatgtgggaggggcccatggctgctcctggcctctctcctctggtcggaggaggattaaggacaccaacaggaggactaagaaaggtaggggccaatggaaggacattttcattcaaaacaaggatggccatattcagtgttcctgatcagtgactttaatcatacatattgtgaagttaataactgctgtgtgtttgaacagaaaggcatactttggagtgacaattgtttttcttaaagggagaagctcagtgggtgaacggaggacattggcccaatctagaaggctttctgaaagagccctctccttggaggaaaatggggttggatccaacttcaaaacctccactctgagcgttagcagctttttcaagcaggtatctcttcacattacagtgtgtctggatttttccccatactggcatgggcactggaacccacaggaggaggatacgtagtgattaagagagcaaattagttaagctcactctcttagttcattttctgctgcttataatagagtatctgaaactgggtaatttaaaaagaaaagggatttgtttctttcagttttgaaggctgaaaaatccaaagttgagggcccacccttggtgagggctttcttgctggcggggcctctctgtagagtcctgaggtggagcacggtgagcagctgagcatgctagctcaggtctctcttcctgttcttataaagccaccagttcccctcccatgatgcagattaatccattaatctgtgaatggattaatccagtcatgagggcagagtcctcatgattcaatcacgtcttaaaggctccacttcccaacactgccaccatggggaccaagcttcaccatgagttttgaaggggacattcaaaccacagcattcacaaagcctcaatttcattagccagaaaacgggaacaatagtacttaacttcatgtggctagcaggaaggtcaggtgacatgagacctgtcaagctcttcttagagtgcctggaatacagtaagtgctcaatgaatgttagctattttaactgagagaagggttaggttttgttccttgtgataccaactatcctatttgaactatcttggccaatccattcattatgctatgacaacagtctggctgggccatctccttcccggtggatctcagggtttcttggcctggctattcatgtgcaagtttccactttcactactgcttgatgtgcaagtttccagggctccctgcttgctcagagagggtgaccattccagatggtactctttgttagctcagtaaacatcaagactatttaaaaaaataaaaaacttcctagacttgtcaacggtatagagacagaaagtagaatgacggttgccagggtctagggatagaggggtggggagtcactggttaaagggtacagagtttcagattttttttgcaagacaaaagcattctggaggttggttgcacaacaaagagaatgtgcttaacactactgaattgtgcacttagaaacaggtaagatgggccgggcgcagtggctcatgcctgtaatcccagcactgggaggccgaggcaggtggattatgtgaggtcaggagttcaagaccagcctggccaacatggtgaacccccgtctctactaaaaatacaaaagttagccgggtgtggtggtgcacacctgtaatcccagctacttgggaggctgaggctggagaattgtttgaacctgggaggtggaggttgcagtgagccgagattgccccactgcactccagcctgggtgacagagtgaggctccatctcagaaaagaaaaaaaaaaagaggtaatatggtaattttatgttagttatattttgccacacttaaaataaactcgcttggtctgactctgttttggaaagttttccatagctacgcagtcttcgtggagcatttaaaggggttacattaacaaactgaaatgcaaaagggatgctgagggcgcctgtgcaccgtgccacatcatagaaatagtaaaggtctgaaaaggtttctattcagcatacatgtacccttcccaatcttatgaccttggaggacaaggtacttaactaagtctggatggtctcactgggaataagacatatctacccacttaccttactgggttgttgtaaggattggagatcatgcatgtgtgctcctgacccatcttgggcatatgtgggggtggacagcatttatacttaaccttgttcgagacaaatgtgaagaaaatgagatggaaagatgctttctccaccttcgaacatttgaagaagaaagtaaacttattctgtattgttccggggggtaatactggcatcagagggtgagagttatcggggggaagcttttggcctggttttctaatggtcagacgggcttccttagaatgcagcagatgccccatccccagaaggactgataagaggccgaggcacagtgagtcacagtgattgagaaggatttaacaagaagtggagctcagtgatttcagagctgtctataatcctaatttctatgaaagacttgtgagaataaaacttaaaggtaaaaatcttcccagaaatcgtttgtccccaacccaagagtcaaaggtgcatctacattaactctgacttttctcttggcaggaaggagatcgccttagcgatgaagacttattcaagtttttagctgactacaaaagatcatcatccttacagagacgagtcaagtcaattccaggtgtgaatgacttatctttatcctctttagctgtgccaaaactgcttatcgttagacacagtctttgtctaatgccagaatttataaaatcatgtttgccaagtgaaatgtgagattttgtgttaggggttaagaatctgaattgttctatgtctttggcaaacctattaatgtttttttaattttcttaaaggattgatttagtaaacaaaccttgtgctttagatctggtttctcagataatgagataattgtttaaacagaggagcccctttaatcaaataaaatattatacttagtattaaaaaagtaaatgtgagatgctttggtagaaggcaaaggcatcttccttatcctcactcggcagccctggaggtacttctgtagcatcctcaggtccagggaagccagtttgtgtttgtttttgtttttttgagatggagtcttgctctgtcaccaggctggagtgcagtggcacaatctcagctcactgcaacctctgccttccaggttcaagtgattctcctgcctcaacctcccgagtagctgggactacaggtgcctgccaccacgcccagcttattttttgtatttttagtagagacagggtttcaccatgttggccaggattgtctcgatctcttgacctcgtgatccacctgcctcggcctcccagagtgctgagatgacaggcgtgagccaccacatccggctggaagccaattttaaaactcccaatttttactgctagcaatgcagggaagttacttaacaatgtaaaattatactgtggtaattcaggaaagaactttaaaaatcctctaatccattccttctcattttacaatttcttgctttatattttattttatagaggctaaatctcgaaagttatcatgacacacttttctcaagctgtaggaaattagctccaaaacttttttacagtactatagtttgttcttattttcatgaaagaaacacagtgcaacaatctttcttgattccctcataacatgacagtttctttactagaacattcctattttctctctttaggcttgctaagactggagatttctacagctccagagatcatcaattgctgtctgactcctgaaatgctgcccgtgaaaccctttcctgaaaaccggacacgcccgcacaaagagattttggaatttccaacacgagaagtatatgtccctcacactgtgtacaggtaagaaacacaggctcgggctgggcgtggtggcttacaccataatcccataactttgggaggccgaggcaggaggattgcttgagctcaggagtttgagaccagccttggcaacatggcaaaaccgtgtctctacaacatatacaaaatttagctgggcatggtggtgcatgcttgtaatcccagcaacttggcaggctgaggcaggagaatcgcttgaacccaggaggcagaggttgcagtgagccaagattgcactactgcactccagcctgggagacagaaccagactctgtctcaaaaaaaaaagaaaaaaagaaaagcaggttcttggaaaaccgttgagctcacattctgagttttatttgaataacgttttctcatccttcaacctgtcttcctacttcctaagtttcagggaaatgaaatgtgatatttatgtaaccgtaggtgattgccaaatctctttctaaacatagtttacctaattctctttaacaagaaagggttacttcagatgtaattgtagtttaggattatagtggacatatgttttccagagattaaaaaaaaaatctgctagccattacctttgttctcctctgtgcagagggacatattagaaaaagagcaatgtgaccaaaatgtgctagttgtcaaaaggacaggttttcagctaaagattagctctttccaacagaatttacagcaataacataataatagcacacattccaatagcatttacagcaataacagaaagttctgtatgtgtgccagcagtacaatagccactaatcacatgtagctgttcagcatttgaaatgtggccagtgcaatggaggaactgaaaaattgattttaattaattttaatttaaagtcaagtaactgtatgtgtctactatattggagagtatggagctagacactgaaggcctaacaggttgggctgccttggtttctgaatcgcttatggtggcacctgacctattccatggggtctggaaggagtgcttgtcaacacatatctgccaaaggcattaatgctcatgcacttctttattttgagactatttcctttaatgcagaaaaggatgccttctataaaaatcatctcttccccaccatccagaaatgacattgttgttttctgtgtttttatataaaagaaatacagtggtactgattcagttgaagtcttcttttatccccagtctccagtcacagacttttacctcacctcctagacttttatcatcatgaaattatgtatttcctattttttctccttttacacacacttacacacacatctgtgaacgctcaatggcattatcttcatattcatttaaaatgtacgcaaatgacttcacactctaggtcaggggtccccaacccccgggccatagaccattactggtccttggcctgttaggaaccaggctgcatggcaggaggtgagcatcgggtgagtgaagcttcatttacagccactccccattgctggcattaccacctgagctcctcctcctgtcagatcagcagtgacattagattctcatgggagcatgaatcctattgtgaactgcatatatgaggcatctaggttgtgcgctccttatgagaatctaatgcctgatattctgtcgctgtctgccatcactttcagatgggaccctctaattgcaggaaaacaagctcagggctcctactgattctatattattgtgagttatataattatttcattatatattgcaatgtaataataatagaaataaagtgcacgataaatggaatgtgcttgagtcatcccaaaaccatcccctgccccccgctgccaccccagtccatggaaaaattgtcttccatgaaaccagtccctggtgccaaaaaggttgaggattgctgctctaggtgttatattacactttgtttttgtcactcaaaagattgatttgtttttcttttttctttttttttttttttttgtttgagtattactatggagtcgtgagtcatttttctttctacttacccagatttccacaagttttaccaatgggaactttttaatggcttgcatttttggaaatatcagtattgattcatgtaaaggtttgtgggtttttttggggtttttttcgtttttttgtttttttttgagatggagtctcactctgtcacccaggctggagtgcagtgacatgatctcggttcactgcaacctccgcctcacaggttcaaacgattctcctgactcagctgcccgagtagctgggactacaggtgcctgccaccacacccagttaatttttgtatttttggtagagacagggtttcaccatcttggccaggctggtcttgaactcctgacctcgtgatccacctgcctcggcctcccaaagtgctgggattacaggtgtgagccaccatgcccatcctgttattccttttaactgctgtttagtattcctttgtgaagaggccatattttattcatttccttgttgatacgcatttaagtctttttcaagttttcagctcttacaaacactatgaagtaagattttttgtctttgcccctctgtacacgtttgtgaaagtttctttaatatatctaaaagtgaaattaccagatcacaagtaatacacatttcagtcttaagttttctaaaattttacatttgcagtcctaacagcagtgtgagagaattcccattttccagttcctcacccatactttccagtatgacgtatgtgggactaaaatgcaaagaacttcagagctcacctgatccaagcattcccacccccacatttccagatgcacaaaattaagacccggaaaggataagtgaatggttccttgaggtcaaaaattacagcgaggtggccagacacagtggctcacactgtaaccccgctgctttgggaggctggaggactgcttgagtctaggagtttaagatcagcccgggcaacatagtgagacccccatctctacaaaacattttaaaaattgcccaggtgtggtattgtgcatccctgtagttctagctacccagaaggctgaggcagaggattcttgagcccagaaattcgaggttagccttgtgccactgctctccaaatcaagcaacagagtgagaccctatctctaaaaaaaaaaaaataatttagaaaataaaattatactgagaaatacaaacagctattcacacaggaatggagagttcttctttacagtattcaggaggtatacacttatttccccatttaatccttcctggagcagctcttcattttcaatcctcattccttacatctaaacttagtccccacgtctccctcctagaggagataagcattctcaggatgcagtagtttcgattctctattccttagaggaagatgaaggcatgaaaatgtttgcttatggatgctttgtatctttttagaaactttatcctataatcgggaaacaatgcttgtggcattggaagagacttgcatccaatgaattctgtagttattcaacttcccctcagcatttaatcacccacaggtggcatttacaatgttctctactcgttcctgcaaacattatcccttaattacatcacagtgggacttagagtgcattagtgcactgaatgatccagaaatgtaggagggcaaaggaggacaagtctggacggattacaatggacccaacttgtcatcatgagaaacagacccacaaatacagagttaatcttcttgagctgtactggccactgtagaagtgccaaggacaccccgttagaaatgccaaggccaccctgttagaaaccaggtcttggggaatgacagaagagatttctctccagtttggttgtggccccttctcttggctcacagttcttctctgtggctctcaggccaccatattttatagtctatttaaggaaagagagagataatgaacttggtttggaatcttacttcatgaaaatttcacagaatttaggaagcatcttgtctaaatatcttgttctaaatttttagtgttcttctccagtccttgtgtgctttagggtggttttgattagattgggcttgacagttacccagtcccagatgagtgtcccctttcctgcacctccccccattcacgacatggaaatggaaagaatcgagtgaggtctgaaccccaggtaaaattggcaagctgactaagttcgccttgggtgacctcaccttttcatttctgtccattttcctctctttttgttccttgccatctccccatatctcaaaaaacctggaccttgtagcttttctatactggcccccaaaataaaagtctcttttcaagcaacgatctctaaactcatttgctatggtattgataacaggtatggattagtcttatcactcccaagagtattatcattttgggccaggtgtggtggctcacacctataatcctagcgctttcggaggccaaggcaggtgaatcacctgagtgaggtcaagagttcgagaccagcctggccaacacggtgaccccttgtctctactaaaaatacaaaaagtaactgggcgtggtggtgggtgcctgtaatcccagctactcaggaggctgaggcgggagaatcgcttgaacccaggaggcagaggttgcagtgagctgagatcctgccattgcactccagcctgggcaacagagcaaaaaaactctgtctcaaaaaaaaggtattatcttggcagggacagcagttcctatttcttaattgaagaaatccagatttcttctcattccaagagtctgtcaggtaactttcactgttgatgttgctatttccatgccaatcaataatcctgatcatacctgtatcccttaaggaaatcaaataactgaaaatgaagatctgtggggcagataaattcaggaatatttcttcgtttatagaggattcacctcatgaatttgaaatatggcttggcttataaaaagttgatctgcctggagcttgtagctaacacctctgtcgggccaaacaataaatgcttacactgagaaagccaggtttgggatttcaaattaatgtgcccttaacataaactgcagagcccccctgggtggagggaactattacctggttctaatagcagatgttttctggccttgagtgccagtggtaaccagagtcacacattttaggattttggtattgatgagggtttcagctgaatattacttgagttgaactccagttatctttacctgtcttaaaggagcagctgccatagtgcctcaggtaaagttggcttgggataggctggcattgccttccagtccccagcctcaccttcctcccacctcttcactgcctcttttctttgccctgccccttcaggtgtcctgcgtggggcaccattcgagttgcattctagtgtattaggttggtgcaaaagtaattgcggtaatgtgtgtgtgctgccccgtgtctctaccttattcaagtttctttaaggaacagctgtagatgagttctggtagaactgggtagtgctcccagaagtatccccgtgggtccgtgagggttgggcattcataaaataaatccttgctctaacgatagagaccaacttctagagccagaagtgctcatcccaggaatgaccaggggctcccaaaccagcggctcgggccctctgcagtgccatgtgcagcctctgtgggttagaggcatggagctagagcagggtcctctgaaccagagccaggcaggacactctgagaaatcacaagcagaaggacagcaattctgaaagcagagcagaacagctggaaaaactgagctgatgaaaaggattatccgaatccaagcttggcgttccttgctctgtgtccagattaagaaaatgctagtggtttgcctaggaacacatttgcaccaactcctggcttattttccatgtgacccaacagctggtactagagacaccagctgctttctggtgggggcagaatgaaaacagcatgggctgaggccaaggcccagcaaggtcttcaagggcatcctatcctgcggccgccagaggggtatgtgcggagatcacaggcaatgaggttgtaatgagctgttaagctccctgccgtccctttaatgggtgattacagtaaaaagagccacataaagtacgttttcatctctcacttcagcccccgagagcctctgaggtcttgtttatccaattatcagacttgctgtggaggacggtgcttgctgagaacaagcatatcagttggaacatgatttctctgatggataattagctgttttcaggactcctcctattcagctgaatgttctcagaccagaagtctgatctggcctaacggggatgtgctcccatatcgcagtggagtcttaaggagtactacccaccttctcttctgcgggggaaaaggaatggcgtagcatgcatgcaggacctgaccggaaggaatgtctgcgagttatgatttagtgactagaacttctaaggaaagaaatgaaccagaaataactgcaaacgaagtggttaggaagaggggcaggacatggggagtatccttgaaagggacttaatttcatccaaggaaataggttcccagtttaagcccagttagctctgtattcagagtggatcttctcagtgctaggtgaaggaagggtggttgtgcatcagagtaagtgtccagccccaccctgaagactcccattcaggtggtctgggatggggcactggtggtctgacactctcttttgttcaaaatcaaagcgtccccctccttctcatggaagggaagcttccaccaacccttaatgagttcctgtaccatatggagttgtcaaatgctccataccgggcacagcggctcacacctgcaatcccagcactttgggaggccgaggcgggaggatccattgagcccaggagttcaagaccagcctaggcaacatagcaagaccctgtctctacaacaacaacaaaaaaattagccaggggtgggggtccacacctgcagtcccagttacttgtgaggctgaggtgggaggatcgcttgagccaggaaggtcgaggctacagtgagccgtgatcatgccactgccctccagcctgggcaacagagtgagactctttcaaaaaacaaaaacaaaaaactctgtcctaagtatcagatgatgcggaagcccagtacttggttttactaggcttagcaagcagtcgcttatggaacagaagcttttataaacaaaccatgtagttaggaagggcagtggcagcccaggcaaaatctagtcatttgaattagccaaggaacggagacaaagacaaagtgaatttctggtgctagttgcaacttggtctcgataataaatcaggaacacaatccccacattcctaatgccttgctccaaaactcagcaatcctcctatttgtaagaatgaaaaaattcaggagggaaccaattgcctaaggttatgacagcaaagctaccgttccagtataatattcagccactagaggacacaattcactcactttctagattcagacacacgactacctttttcgttacaaaacatatgaagtcgtgatttatgaaagtaggacacatattgtattttttgcccttgaagtgcaagaccaggaaaaactgaaaagtattgcagcatcctccgagatcactgttgtcattttttcgcaaaggattttattctagcctgtcagtttctgcctcctttcattagtaagtcctgaccttagacatctggcatttttttggaaggtgtagtggggagggggaccaagagatgcatcccttaatgtagctaaagatcgaaatcttctcattttggggagagttgcttactatacatatttacacattcaccaattttgtctcatatgtaaaccacagaatgtgccgaattttcctagaatcatggttgaggcaggtaggagtaaggaggtgctgtgtacattagtgtcactgattccaccgttcacaactccataccactctccttattttatactcttgagtccacagtgctttggtgttacagcccatatagaacggtcctacctaaaagtcctgcggtcggtttaacagtgacgagtgtcatttttccactgtcctttacatagaattcagcaggaagcttcatgaggcaccctgtttctacatgagttgccctggttggtggaggcagaagcaatggagaagtggtgatgaaattaagtcaaagttaggcttgcatttgactctgatcttgaatagtttgtctagattagagggagcacctaaaatccaaaaagccttttgtctttgatttctatacttttgttagttttacaaattattatttaaaatcagtcctttgaagtggcttcttctcttctgacgggacagctttgggaaactgtttagtcttatttcttttgctattgggaagttgtgggggacgctattttgcagctttttcatcctcagttctgacctcctcatgtgctttacagatgcccccaaaggtcagcattcatccacctttcactgagagtgtttggccatctctaaagcagaggtattttaacagctctccttaatggatgtcctgtggtttcaggcctcagacaggctgcccttgggccctcagcagaagtcgggaatcgtcttatacttccagatcgtcttttactcaggcaaaatatgagatgctgtgtcagggtttcccaagggaagaaactgagtgggaggtgcaggtaaaccccacagtacaaaataaaacagagctgtgagtagttgaaaggactgtgttttgacagcgtaataaggtaattgtttaaaaccatggctaattcatcagatgtcatgtgtcttttatagttaaaagatgaaatttctttacccactggtgtcaacaacagaaagattctaaaactttcaaaaaatgtgccagtcctggctgctttgtttcatgttctttgacaactttcaaaatgtaaattgagattcatgcaactattaatggaaatataaatatcatggcttcataaggataaaattagaggagctcaacataacggctcattttaatgatttctaaggggtttccatgcccaggctaataactgtacatttagcaataagcaaatctcaaagcctatttcttatctttccctagaattacagcttttaagcccaagctggtcgttccttttataccactccactcacttgataggggtgacatgggctgagctttctctcctatcagggctcaaagacaagtttagcagcgtttctaaacttctgtcaatcagctcacaggacacagaccagtttcgttatcccattaacagatttacatttctgttctctggaagtgtcagttaatgtccttaaaggtaatatacacaaatgtacacaatagtctctgaatttttctcagaagacacactcagaaaccttagaattctgattcattctctttggctcagacttggatgaatttgcttctcagagtagggacatgaaaattattcttaatttatacttcatgtaatctgtttcttctttctccctccgccgccctccaatagctcttctgagcttgtttgttcttcccctaactcccattgttgaaaacatggcctcccctcattctcacctttccaggaatctccttgtgctcctcaagttcggctcatcgcaaacttggagttctgttttctcatgcccttctttcattttcttcttttaagagacaggatcttgctctgtctccaagattggagtgcagtggtacgattctagctcactgcagcctcaaactgctgggcttaagtgatcctcccaactcagcctcccaagaagctaggaccactgctgtgtgtcaccacaccagctaattattttatcttttctagagacaaggtctcactctgttgcccaggctggtcttgaactcctagcctcaagcaatcttcctacctcagcttcccaaagcactgggaggtgccactcttcttgtgttttttacctttgcatttatttcctggttacaatacttttaacttaatggctgctgaactagattctgccaatgtacgtgccgtccaggacacgttcatgccactttaattttcttagaacatcaatgagatagtcttactagggagagataaagggcaggggtttggttttctggcaggttttctttcattttaataacgagccaacccacggaggaaggaattgattgatggctgcttcctcttttgtaaagaacaaacatcaaattagtggtttgtcctcactttgcggataagcagaataataacacctgtgcctctccctgcattattttgaaactaatataattttgtttggacagaacgtagatagcaaccttaatggggaggaatgtggaagaggaattactgaagggggaccagtcagcctgtcaggcagcaactctggtgccaaagaatggacataggatcagagctgtggacccccgtcctgtttgtaaacttcctgagggtggcagagattcataccctttctcccatcaggacaaaaatcagtgtgttggagctcactcaggaaatgctctttgggattggcatgggaaggggatgaggccgattgacaattagcctagttcactgggattttgttgtaggagctgggtggtggcaccatatggccaacaggggatgccagcgacatccctaatttctctggcttcctgataggtcctggtagggtcggggttccaccgggatttgcctagtatggtctacctctgactgaaattaaactctaagtaggtaactggggaacgcctttctccagagagaaggttttgatgtgatctcatcatcggggactggattggacctggagaaatcagtttttctatagtcttgtttctagagtggcaccctggtcttgggcaggtcagaaggacagatagttggtcaccatcttcaacacaaatcatggctggaaaagggccccagtagggagtgcctttctcactcaccaatcaccaaggctagaagatagtctgcagattctttcagatgccacaaagctgtgattacagctgcccattggcaaatcaggtactagtttttgttaatcacattgcagtcttccttcactgtttcttcccctggtcccggaattaaggctgggctccatttgacaagttatcttctgtgcaggtagagcagcaggctgtgttagctcacagcatctactcagtaggcatggaaatatccactgaatgggactgagaaagtggaatgggaggggaacgtgtgaagaacaggaagtttgcctctttatgtccaaagtctgtctacttagagcaacaggatggtgatgatgctttctggttaaagatgtcatggcaacagtcttccctagacagctctctagcaatagccagtggcatgtaaaccctgcatttttgcactgtatccagtgtttgcaactcccttgtagaactttccctgaagtcagcaagaaccctgtgagaatcaggatttgtctagaaatttagcatttacctaatcaatgattctctagacatgtcagtacctccaagtgattcatatgcatgtttggtgggcgtcgagcatgtggcagtttggagaaggaagtggagaatgcagcagcagcaggagaaatgtttgatgttgctaaacatcaaccccacagcaagcctagaactcggggaatgggaggcatggtgcgggtagctgctgacacacagctctagagatagctgcctgcaaagctggatgggactccaggcaataggcttcagggcctaactgctctttcaaggtcactgattgttacaggagccatggtctgcagcattgagcatggaattattattactattaagcatgatcctcaccgtgatgctcttggggtggaacaaaagagcccagagagaatatgcttattttatgcaacctctaacgtttcctcccagagttgtgatgaaactgaaccaaactctagcatgagaatcggcatcccaggccagcagccaaaacaagtggtgacacttggccaggcacggtggctcatgcctgtaatccctgcactttgggaggccgaggcgggtggatcacaaggtcaggagtttgaaaccagcctggccaacatagtgaaaccccatctctactaaaaatacaaaaaattagctgggcgtggtggcgggcacctgtaatcccagctacttgggaggctggggcaggagaatcgcttgaacttggaggtggaggttgcagtgagccaagatcgcgccactgcactccagtccagtgacagtgtgagactctgtctcaaaaaaaaagtgccgatactttatatatcttctgaaagaaatgaagtctgtaagaaggactgttaaccctcagaatggtctggggatgctacatccccttgtggacttgtcacactggtatgagtgtagggagtgggaacacttcttctcagctccttcctcaccatgtgtcattcagggacaaagggagcaggatatcttccctttgaaaaatctcatatgcctggcaatactcgtcaccctgtgaataatgttgatgcattcacctaaccagtattataagcccctgctgtgtgtcagacactatgcttggtgctgaaatagacaaggaggggactgcctgtcttggaaggcaaatcccagtctcctaagagacactagaaccacaggcaaccatgctgatctatgcaatgacatgtaatgcaactttgtcctgcaaccaccttgagatctttgaaagttctcctacctccaaaactcagacaagtcctctctcttgccaagtgcctaaagcaaggatatgtttatagaggcagctgggggcatctggccaatttatttcccagcagacctgctgcttcccctgattccaatactttcttccccaacccaaaccaaggcgtctggcaatgttaaaaacatcaagaatgataaaacaagcattttaatgaagattattgatgtattcattggctgtttctttaaatgggtagagaactaataaaggatctaccccaaataaccaaaaatatcagcctcagcaccagcagaaattggaagcgttctggtatttatatgtgtttttctcagctggcagatttgttttaggaaactatttgcaaagcctgggaaaaatgtgctttctctgtctgttaaaggaacatgcaggttggttggtgctggttctccatctgacagttctgtctggtggcctcaaaaaaaaagaaaaatacagcatagtccagatttggactatgcaaatggtgtcttgaaacttaacttttaggtcttgagcaaagccaagtattattgaaatgtttattttgtttttatctgcaggaggttttcattcaaaatgtggtgctttgggggaaaaggaagggtgtttgtactaggtactttttagcattcttcttattatctgacctatcacagcctcttcaggagacattaattaatttagttcatataatcaacactggaaccaaggaaaaattatttatacttttagaaattctcatgttcttatacttctttggagattgaattgactccaaagagactattttgtgattaagaatatttttgtggccgggcacggtggctcacgcctgtaatcccagcactttgggaggccaaggcaggtggatcacctgaggccaggagttcaagactagtctggacaacttggcaaaaccctgtctttactaaaaatactaaacttagccagccgtggtgacgggcgcctgtagtcccagctactcgggaggctgaggcaggagaatcacttgaacccgagaggtggaggttgcagtgggccgagatcacagcattccactccagcctgggaagaatatttttgtgtggggagtcgttatattatgtccttagaccaggaggtccaattgaggcagaaatttttgaagtaaaaccattttttttgaaggaaacacatatttaaatatcaaagaacactggacgtatacttttaaaaatttacatacttgtgttagttatctattgctgtataacaaaacctttgcagctcaaaacaacagtcattatctcacaagtttatgtaggttacgcaggtgcagctgacctgcttggtctgagctttcgaaaagtgcagtgaggatgtcagcctaggctgccgtcacctcaagggtcccctgggggtggatccacttccaagctcactcatgtggctgttggcaggatgcagttgctcacgggttgttaggctgagggcgtcggttcctcactaagccagaggcttccttaagttccttaacatgttttctcatggggggcagctcacagtgtagcaattggcttcgtcaaaacaagcaagcgggagggtaagagacagaaagcaagacagaggccagggtctttcacagcctaatctcaagagcagtacctcatcacttttgtcctattttgacaaacgtcgtattgacttttgtcactacatcagaagcgagtcactaggtctagcccacactcaaagggagaggatttcacagagcaagaatatcaggaagcagaatcattggttatttcattagaagctgctggcacagttcttaatgaagctacaaaacattgaactgggaggaatatgggggtaggagggtgacagggagggcaggttaattttgtggatgctgaggacaacgtgcctcatgaaaagtgttcccatcagactggtgtatttctgtttcttttcttttttttttttttttttttttttttttttgagacagagtctcgctctgtcaccaggctggagtgcagtggcacaatctcagctcactgcaacctccgccttcctggtacaagcgattcccctgccttagcctcctgaatagctgggattacaggcatgtgccaccacgcccagcttattttttgtattttagtagagactgggtttcaccttgttggccaggatggtctcagtctcctgaccctgtgatctacccaccttggcctcccaaagtgctgggattacaggcatgagccaccgtgcccagcccagaatggtgtatttctaggacatctgcaatgcatcactctctaataaaagaaaaaaaaatagccactccttgacagatactcaaaggtgtggagtcccttactaaaccacactccaaagaaataagcctgcaaaatagggaaaagttgttttttacctagaaagcagattctctgcattttcttattttcaaatagtggggagaaaccctaagctgtacatatgaaggaatggattcatttctcctcttgcacagcaccccagcaccttgtacaccctattcctccctaactcccaaccgcacactcacctcccaagcatctgcagatctacatacatattatcaaatgtacagagtactgagtgaaatggtcactgtagctatggaaaggtgagatttgcaggctgtctgaaatgtttcttgctaaagtagttccaatccttcccccatttagaaaaaaatacattcttagtaaatgactttcaggcagaaaaagaaaaccacactggaaataggattctaataaaccaacatggggctctagctggtgaacatatttctgagccatccctatacagaaaccacaagacaaataagaaaaagtaaatccagatcacttagacccttcaaaccacatcctgggttccaaggacagtggctgcgagttaggaaagatacatttatccagtggaccttttgactgtcttgtcaatcttaagaaaaaaatgtagagtaaaaaattttggctgggcgtggtggctcacgcctgtaatcccagcactttgggagaccgaggcgggcggatcacgaggtcaggagattgagaccatcctggctaacacagtgaaaccccgtctctactaaaaatacaaaaaaaactagccaggcgtggtagcaggcgcctgtaatcccagctactccggaggctgaggcaggagaatagcgtgaacccaggaggcagagcttgcagcgaggcgagattgcaccactgcactccagcctgggctacagagcgagactctgtctcaaaaaaaaaaaaaaaagaaaaaatttggtttgggtcccttcccaccttcccttgcttcatcactttccttaagcctctaagcatccagatcttccccaaagcagtgcttcctagtcagtgattaccctatcctctttttattccttttcttcatgcacaccttcagtccataaatccaagctttttgtaaggagggagggtgagtaaaccaattcatactaaggtgagagtgaattatatataaacctcttaatatattaaatctaccaagcagtgtttcagaaggaaatctgctaacatgggcatcttacttgaaaaaaatttcagttggttcaacaaagtatggtttagaaatcattttcaatcaggatcggggagagaatttttttttttcttaaagcagttaggtttccccagcagatttcgaatgcttggatatttgtgattcttttctatgggaatctgatctggataagacctaagaccataaacactctagctttccctttgggtctttgctattgaaaactagttggacttaaacaagtgaagtgggttttaaggatggctcctttcacccatttctaaaagatagcattcttgagggtctgctttatttagcagaaggaatgctggttttccaatctctcactcaaaaggaacttttacttatctcatagaaaagaatgggatggagattaatgtaatagaaaaggtattctacaaatatcatagcagctatatttaatcaattcatgttcaaagatcaattagtagtaataagagttgtgctgtataaaatcaccatatctcatattcaaattgcagatcatcagttgaaaaagcatggattgttttctcactgaaagaaatctttaaaagtggtaccataagagacattaagactggctattgttttatttctctctctctctctttctctttctctctttctgtcatttgatttctgactttcagtggatttttttaacattacaaaatcatagagaaagaatattggaccatttattgtagagtttttaaacaatttgataccattttttttttctggcgtcttaactgcatttgctgtttgtgaggggtgtagaggtccctgatgttcagagtacagtaccagcgtttatgtgaaatattgcagcctggcctgtggaggacaggggttactaaggggcaagctgctgcttgcgataacacccccagtgcctccttctaatcttgcgccatttcccagggcagacagccttgtggggctctgactggtgccctggaacatgttttaccttccatttttcttgctctgatttctgaagacagaatgttctcttcaacctacacatcaggagttttccttctgttttcctttttcactggttcctttgtgaatttgcacttttatctaacctaaaacattggaaacaggaataaacacaaataatggcatgaggccgtggccacagaatgacaagacaggacacagcaaatgttttgggtttttttcacatttatgaaccttctcattctatttatttatttatttacttacttatttcttgagacagggtctcattctgtcacccaggctggagtgcagtggcatgatcatagctcactgcagccttgaactcctggactcaagtgatcttccagcctcagccttctgagtagctgggattacaggcatacaccaccatgcctggctaataaaaaaaaaattctgttgtacagatggggtctcactatgttccccaggctaggctagtctcgaactcctggcctcaaacagtcctcctgccttgacctcccaaagtgctgggattataggcctgagccactgtgctcaactgcttcccattctaaaaagtgtctaaggcagttatagaggttatataacaaggtataaaatttctgagtgaaaggaaaataaggagagagaaataaatctaagtgtgtgtaaggttaatatgtacacagaatgtttattaaggcctttgacagttcctttaaaaattacctgcaggccaggtgcggtggctcatgcctgtaatcccaacagtttgggaggccgaggtgggcggatcacttgaggtcaggagttcaagacaaacctggccaacatggtgaaaccctgtctctactaaaaatacaaaaattagccaggtgtggtggcatgtgcctgtagtcccagctacttgggaggctgaggcaggagaatcgcttgagcccagaaagtggaggttgcagtgaactgagatcacgccattgcactccagcctgggtgacagagggagactccatctcaaagagaaacaaacaacaacaacaacaaaacctgcaaatttgagctgcctagcagccaagcaataaagggaatcacaatgaacgataagattcatatatctgccaatttaaaaacaaaccagttctcttgggtcagtgcttctcaaacttgaatgtacatttgagacacctggtgcattgttaaaatgtaggttctcatctagcaggtccatggtgcatttctaactggctcccaggcaatgctatgctgatgctgatgctgacgctgacgttgatgctgctactcattggactgccctttgagtagtaaaattttagctcactcagaaaaacctcatagtttatttggagtaacatccctttagcccttgtagatattataagactacattacaataaagttctggtgagtctaattgttgaccagagagattgtttacttcagagcacctggatttgaattgcagtgtgccacctgctgctgtgttacctggtacaagttaatgcattctcttcacacctcagttttatcatcttctgaatgaggctaatagtagtacctgtcatagatgcttgtaacagtgcctgcatagagtaagaatgaaataatgttagctattttttattgttacatttaaaatagattttgctggtagtgaaatatgaatgataaaatcatctcctcagctgttttccttgcataagtaccttaaaataatgtatttgcaatttccttctgaatccttgaataaaagacaccagataatcagaagatgttactgacattagtaggcatttgaagttcactctgatgggatcagtctatttacaacaaattgctatagagagtaaaaagcgccaaccttttcctgtagtttttgaatgacagcatctttgttcatgcagttggctttgctgcatttccacttcatcaattttttggctctgtctttgcaaaaaaaaaaaaaaaaaaaaattacagagggagaattttaaaacacaaatgaagaaaaagaaattactttgaaattgccaaaattgtttggctgaaagagcttatttagaaaaacagagctttttatgtataaacctgtttcattggtgttgtatcagaattgcatgttgctagtagtttactatcaaaacaacacttgtgtttcaagctgttaaaaaatgaataaaataggccaagtatggtggctcacacctgtaatcccaacattttgggaggccgaggcgggcggatcacttgaggtcaggagttcgacaccagcctggccaacatggtgaaaccccatctctactaaaaatacaaaaattagccgggcctggtagcatgctcctgtagtcccagctactcaggaggccgaggcaggagaattgcttgatcttgggcagtggaggttgcagttagctgagatcatgccactgcactccagcctgggcaacagagcaagactccatctcaaaatttaaaaaaaaaaaaaaagaataaaatagaaacactgatttttctggtattttatacccttccccgaatatccatacccaaggcatttttaagatttccctaagctggaagcaccagaccacatgttatttaaaacatattaagatgtacctactgtattatgtatactttgtatatcattttataacagtctgcaaagtagcaggaaaaaatttttgccttcaggttaaactcagaagagttgccattggctaactgaaaaattttgcatttggtaagcatttaattaaaaatttattgatttcggttttgaggttttacttttcatatttttagagccaataacttctggaatctcagacatttttgtggaatcttaagttgttcatagatcctaggtgctgtgtttgtcatcctgagagcttaaatggccctgtccaaacctcagcctcagctcagagtaggaaattgtcaagcacttggtaactggtaagcaaatggattttagtcactaaatggagcgggaggaatggagtgctccctcaaaaagagcatttcagctggtcacagtggcttgggcttgtaatcctagcactttaggaggcccaggcatgaggaccacttgagcccaggagttcgagaccagcctgggtaacacaggaagatttcacctctacaaaaagtaaaactaaaaaattagccaggcattgtggtgccttgaatctgtagtcctagaaacttaggaggctgaagcagaggatcgcttgagcccagaaagttgaggctgcagtaagctgtgatcacgccacagcactccagcccaagcaacagagcatagactccatctccaaaaaaagaggctgtgacagaggaaggcagggggatgttaatcagagagacatagagactgggagagtctgaaagagaggcagagagacttacacaaattaaagacacagactgagagaaatggaaaaatgaagagaggatcccagacagattgattgacttcccaggtaacatataatatcttacaatcctgcagaatgtttaaagttgcattttaaaaggcactccgtttgttcacacaatcctggtaagaagatcatcttaattagtatcatactttgcagctttcaagcagttcttaggcatcattgcgtttaagacctggctccagccgttttattacagatgaggagattgacttgttcaccttacatttgtagagcattttgcaatttttttgaaggacatttccacccattatctaatcacaagtctccataaatcccatctcccctggtataaaagcagcttaaattacaggtgctactaagatgcaaaatgcagcccacaaaatcagcaaatattttttctttgtttcctccttttttaaaaaaggcgtagatttcatattactactttgtttcaggccgtatattgaagtaacaaaaataaaaccaaaattgacaccaattttatttcgaaataaaatctacttttttcactttcccacatcattttctagctgctaaccttcatgcatattcaatttttgcatatttacagccctgtcaaagataaaattttattttctgcattttcactcaacattatacactgagtattggccatttcactcatctcagtgccactttcaaagagatacccaggaaaagcagcagcaagggttgttcgaccttgaacaactacagataatactttggctctctttgagatttttaaggccctgtaagtaaaatattttcagattacagaaggcttgggattctgtctttatcacatgactgattggtcctccatgttctccttggcagatgtgggtatcagtgacacaatgttttttactcaaaacatggtttagcttaccagtaccaggaatggccgatgcatacgcattctcattgtgaaggtttatttgcacctccactcttcttaaccaggctattttcacagaagaaataaccccaacttcatgaaccctattcccatgacctatttgccaatctgttaaaataatggccaactcaaatgatcagtaatgattgactcaccatgacatcatccatcacctttgtcactggaagcccacttgccttaaagggtgcagcatcttccaactttgctccagcaacttcagctcctcattaaatccctccctgtaggtcatccctgcaaccagttgacactggagctcagcagccagctgataggggccttcactcctcttgtcgagctgctcctctctcctctcaaagccctctttccttctctcctgctggctgacctagaagctcagctaaagaggtgttcaaagggtccagtcgcttaaacaggtggccagtgtgctttctgctataactccttgctccttgagctcagctccaagctgtagaaggccatggaagagcacattgatgtcatcttgggaataattaacagggtccggtttttctgttcgtttccttgcaccagatgaagagtaggataaacttgggagaagccaaagtgatgtttttgtattgtggctttgaatgatttcaaggtcccttggttaacctattctcagcaaaagaaatagaagatggtcccaagatggtaagagcagagtgtttggttgataatttgatctaaaagtgaccagactccacaagttaacccccagagctgctcaattacagcagtttaaaaataagttgaggattcgttgctaaatcagtggaaagaatttggagtttccaaaatagtttgtaatcaagaaaagccatctgaggaggccctggagggaaaatcgctgatgattatcaaatgtccagttctcaatgcggtggtatatgtgactgaaaaaaaccacttttgtccacatttggggaaagataagattatactaaatgcctggcacatacactggaccttcagttacctagaaaactttcaaaataactttgccataacaagtggcaaattattaaggtcatgggctgtcttctcaaaattacttagataacatgattctctggccagtatgagacccttaatttatcacgtatgaagcatatgagcctgtttatccgttcgttaatcattatttttatctggcttgggctctgggttactggccatgcaggcagatcttcccttccaaaaggaaacgttattattctcttgtattcgtttctttaaaaacatgcagatttaacaaaacatattacttagcactcttactgatttagaaatatgatgacccttaggaaatgcatctccttaaaagaaattccaggcaaactcatttaacctttctggatgttagtttcctgaccttcaaaaaatgggatgttggaccaaattatcttgaagtttccttccagctgtgtgctcggtggggagtgctggcagtgtggggcaggacactgaatatctgtggtggtgatgtttggatacaggggtgagcaacccctttggaagcaacatgcaaaattgctgagcagtggtgggggtgcatgggaatgggtggcggtgcccctgtattggagtgtaagagacaagtgtggtgagagcagtctggcagggctactactgttatgatttacacagtccctttcatccagctacttcaaagcaccttcacaaactctggctcattattccttcaaacacagcattcaagaaagattgataggcgccttttaattaattcaaagatgatgaagctgagcattacagaatataaggggattcttccaaaagtatctgcactgcagaggggcatgatatataaagtgttcatcacaggtttctaactgaaacaaggaaatgacctgaacgcttatttttagaggagaccagtatatattatggcatattcagaatatgcaataccatgcacccattaaaatcatgtttattaagaatagtcacattagggaaatggtcataactgaacaacgtttagtggcataaaaaaagataaagctttgtacatacagtatgatgaaaatgtttaatgtggctgggcatagtgacttgtgcctgtaattccagcactgtgggaggccaaggcaggagtatcactgaaggccaggagttcaagaccagcctgggcaccatggtgagaccctgtctctacaaaaaatttaaaaattagccaggtggtcatgatgcatgcctactattctagctactagggaggctgaggctggaggatcactggagcccaggaggtcaaggctgcagtatgccatgatcataccactgtactccagcctgggcaacagagtgagatcctgtctcaaaaattgaaaaaaaaaaaaaaaaaaggtttaatgtgtagaagggaaaaggctaaatggaaatgtgttaaagtcttaacggtgatcttccttggagcaatgatatagtgggtggttgctattcttttctttatacttttatgtacttttatgttatgcaaggttgaaaaaatgggcacatattgctttcatagtcatttctgttaagataatcatatgattatgaaagagggagtgtgtgtgtgaaagtggaatggaccaatcaaatagaacagtaggaagacctcagaagatatgacacatgagctcaaccccaaagatgagaagaaccagccatttagtgaatggggaagccctctggggaacagaaggcacgaaggaaggaataagtttggaatgttctaggttttgaaaaaaggccagcatgggagaatgatgaaagataaggtcagagccattgccaagggcaaggtcatgtaggacccatgacgaaaagtttgggaaacccttgtaggggactgacataatttattttacatttttgaaaaatccttctgaccaatatatgaggaacattgtaagaggcaagtgtagaagtcaagatctattgagaaggcgttgcaggggtccaggtgagaatgaggatggttcagagtggagagacagggacaaggtaagttggagtgtgggtctgacttgttagccatgtggaggaaataattatcataataactatcatgtatgtttttagggggctctataacttcagtatgttttcagtgttcacatttgtaggtttacagagtttgtacttgataaggtacagaagtaagtcacttctcaaaaatcatgcctttagaagcatatatcatgcttctattatagtaatgataataatagaagtctactgctagtcataaaacttatctgttcagagaaggctttttttttttttcagagaagtcttccaggtttcagctgttgctcattaatgctcaccacagccctttgaggtcgatgcaattatgctttggaaaagctaagtaacttgccaaaggccatgcagctaaaagaagcaaaagctggattcaaatctcagctctctgcctccagagagaacaccctcaatcccgcttaacagacattagctctgcttatttgattggtggcagtggagatgaacagaagtgaacagtgagcagagaggggtctgtaccccacacacatccctgcaccccaactgtcaactgtcttccatcatcatttactatatccacgtccactcctgacagcatcagtggctcagtcttaccgacctgcatcagggttttgggctctgcctctgtttagacagagcacgatttgggaagtgctgctaagtcagccagtggctgagtagaaacagccctgcagtgggcctctgcctgctctgtggctcgtttatcatgtgtctcatctttaaaagttggggctcagtctaggtgcctcctggcctgagcaccccagaattctatgctgatcccttcattgtgacatggcctgtcatctactcttctgggaagaccatctgcacctcactgatacttgaagctcattgagtattgtcacatatcagcccagaaagtcacagggtacagcaactcatacttgctcccagcaccaggccagccccattctgcctccagggagtcacccaaaatagagagatgagggtaaaataagacctaggaatactatttatttgcctccatggcctttgaacttgcacatccaacgtaacggctcctgtgtgttcttgattgttccaattatcatttttcctctcgaatacctgagagcattcattattttgcaagagatttgagaatccctgtgccctaacttttctttccttgatgtgggatgttcttctgtgactaggtaagtttatctcaatgtgtccccaaataatttctcagaatgttaaattcataaaagctaccatgaaaggataaataaatgaaaggagttctgaggtcaaaacatttggggaaagaagagtctttctccttctgaggcattctcagtgcacagtaacctgtttatctcgctttgccttgctctttcccaagcacatttttgctcaacgccccctaccttccccatacacttgttaacactttgcagagcactagggctctgtgggacaggctgggaaatgcaggttgacatgccactgttaatacctagaaaattaaggcaaacttgtccctgagagatgtcaggatagcacagtatggaaaggccatgcttatcagggctcttatctgagagaatacagtggttatgagcatgactctggaactagacagtctgggttgaattccccgctctgccatttagttatatgatatggggtgtattacctaacatctctgtatctcatttgttcctcacttgtgacatggggatgatgacaatgataatagtaccaacctataggatagctatgagaattaaacaaattagtaaatatgaagtatttggaacattggcctgactcaggataagtcctgtttaaatgttagtatcattattattgtttcttcaagccaggaatatacttcatcaattatgtgtacactcattccttcattcaacaaacacttacttaatactcctgtgtcctaggcactgttctagtgctggagatacatcagtgaatcaaaaacatgagagaaaaatccctgtccttgtggaacttacactgtagtggaatctactactaataatgcaaatagaaagaaaaatatatgcaagttacccaggcactgggtagcctagtacctgtcctatagttgtcaaatggatggatatattattcttattgttgttgtcgtttacagtaattgagcttggaggtttgagctgccatcttagataagaacagaaagctaagccaatacgagtgccatgccagtaagaaaaggaaactattacataaagattaggaagaaaaaagagaagaatgacaagtaggccattatctatggccatgagttttatttaaaatgagctggaccttttttgccttctttatctgtgtatcagatagacaattacctctaggcagatttccacattccaagacatgaagactttctaagctgcagcagacacatctttacttgtagcaaaacagagagcgatgggggttattttcagatgactgtagctgaagaggaagaatcaagtaattcactccccccaataataattcacttctgagaggaaaaacttctttggaaaaagcaccccatgaatggaagtctcagcatttgctgaagaacttagttaaaataaactctagacctttttcattgattctttatctcttcttttccagaaaccttctctatgtctacccacagaggctgaactttgtaaacaaactagcatcagcccggaacattacaataaagatccagtttatgtgtggagaagatgctagcaatgcgatgccggtaaggagggaaacgaacatttgcctcaaatcagggtgggctgctcacccctgtcacttcacacaagtccgggactcatcagtgtacaaagtccgtctattccaggccaatactgctcagcatgtgcaagggcttctgtgcccaggatatcagtggggaaacagggtcagtcttacttgacgatctctttctcggcttattctgtagtgagcttggaacatacagatcattttagaggattaaaaaaagtcataaagtctttccatactgcccataggaccaccccactctaaaggcatacaaagtaaagagatggctcaacacgtgcgccatgtttgctgagtgtcttccatgcacaaactgtacacactgtgttatacacacacagtgttacacacttactcaagcctcggaccacagtgctgatgaatacaaagtaccgcctagtaattataaacacacaccacctccacaccttctaggagtggatctttgttctgaggcaaaatataaatcaaattattcatatatatatatatatataaaatgcagtgtgctccaaggaactcaaaatgccagaatttatactttttaaaccatctcctactaaatgagatggtggttagctattactatttcccataagtcatagaattcagttaatataactttctttctttttttcttttttttttttttttttgagacagagtttcactctttttgcccaggctggagtacaatggccgcaacctccacctcccaagttcaagtgattctcctgcctcagccttccaagtagctgggattacaggcgcgtgccaccacgcccagctaattttgtatttttagtagagatggggtttcaccatgttggccagggtggtctcaaactcctgacctcagctgatccacccgccttggcctcctaaagtgctgggactaaaggcgtgagccactgcacgcagttaatatacctttctaaaaagaaaaagaaaaaaatcctttctcttaatgtcccacccaaagaaaaaaagaaaaaaaaaaacctttctcctaacgtcccacctgtcttcccaatgcaaggtgtcttaagacagcggtggggtcctcttagtcctctctgctcaggcccctggcatgccactgccaggagtgccagatatgcttgtgcagatcctgtggcaaccaagatgcccagccaagagtgactgtgggctaaagtccagtctgttcttcattcactgagccatgggttctggtgttgggattactgcatctagaggaaagagctttttttctctgcacaaaggtgagtgcacttgttcataatgcatcctaaatgctgcttcaggcccaaggaggtatctttttctaaatggcacaaatgtggataaggcagtggagattcaaatcacctaagtgagtaggtctgtatgtttgagagagaagaacctggaactggggatttctcactcaagacaaaagtatgtaactttggcctgttggatagacctctaggcagtgaggcagagtggagagagtactggttttctaatctcacaaacatgtggcctttggtcactaatatagccccttggaacctcatttcacccttcatagccagttcctttgcactggtgtgcttgggccagttgtagtcccagcacttttttttttctttttgagacaggatctcactcttgcccaggctggggtgcaatggtgcaatctcgactcactgcaacctctgcttcctaggctcaagcgatcctcttgcctccgccccctgagtagcagggactatacgcatgtgccaccacgcctggctaatttttgtatttttttgtagagatgaggtttcgccatgttgcccaggctggtctccaactcctgggctcaagccattctcccacgccgacctcccagagtgctgagattacaggtgtgagccactgctcctggccaacccagcactcttaattgtacaaaatgcagctctatgagaccagaacatcctgttggcctgatgatagtcaatttgatgtacccaaatgttactgataatttgatcctttctctactggtgaacaggtcatctttggaaaatccagcgggcctgaatttctgcaggaagtgtacacagctgttacataccataataagtaagtctatttcagcattctaaatatatgccaagatggtttcatcatctcctggtttttccaagtcccgtgggtggttcctcctaactatttttataattcagggactgaggggcaaaggaaatccatgccagttccgtgactctgtgttgaagatgtataactttgccattaaccaagactgagagaagaacgtgtcttcaagaatccaatatagttttgacttttccagaagcttctattctagtatgatgcaaagaggttgtattacgttaattaaggaaacacatttcctaacttgctttgagaccctggaggggaccagaagcacagtccggctccccttgccctgtgtgtccctgtccgctccacttgacacctgccccactgtctgcctaggctgaccaaaggagaaatggaacactcattattccaccggcaaatggagtcatgggataatgcccaccctattattcatgttccacagggaagggagagacacctgcacagtgttggacggaattgggtttgatccgggcctgataacctgggcctaattaagtccttcatttaagcacattctgggattgggatgaggattaagtgaggtaatgtacattacatacctacattactttacaatgtacgtaatgtacttcgtaattaatgaagaacctagggcttcataatgcagttaaattggttcctttttcctcctgcctcattcatttgcttctactctttgatgagtgcagctaggtgctaggcttggttccttgggtagaaatggaaaaaggaggtcacagcaggagtccaaacctcatcctttcttcaaattaagttgttggagttttccattgtgtgggggagttgttttttgttttttgttttttgttttttgtttttcctgacaaagcctttagttcatgaacagttttatgtaagggaagtgcatctaataacataagcttggtctcagggacttccagcttcagagcagagtaatgtaaaatgaaaagcaaaacaccaggcaaattctgaggagcaaaggggctgtggcgttttacaatcagagaagtcatcattcttgctaaaagttatttgtgtataatgtgcttttgaaacaggtctcctgacttttatgaagaagtgaaaattaagctccccgctaagctcacagtaaatcaccacctcctgttcaccttctaccatatcagctgtcagcagaagcaaggagcctccgtggaaactctcctgggatattcagtgagttgtttccagcctgctgactcacactgcagttgttggtgcatctgaggtccctgcagagataaacaaccaaattctattcacttgattttttccagtcagaagtagcaaaacatgctaagccacattatagcaagaggcagaaatgatttgccttagcaaatgtcaaatttcaggaatggaaagctagcgggtgatagatgttggaagaatactcatctgttttttaaaaagcattgcagtgttcactatttccaaatttaatatccatgcttcacgtatagaactagctttgtcccccaagaagaaaccattttttctttaaaagatataaaaggtgaaataaacattgatgttgttcagacacacacaaacattggctacagagaaaaatgctactgctttagctccaaaagcaataaatcatcaatattaccatttcaggaggtctcggagatttaaaatgcaaagaactggacagaaattactgccaaaaagagtactggtcaatatctactcactgtttagttgcatttgattattgcgagctagataaattatcagaattatatgctgtaataaataccactttattatttacatcatctgtttcagtggctgccaattctcttaaatgaacgtcttcaaactggatcctactgtctcccagttgccttggaaaaattgccacccaactactccatgcattctgctgaggtaattggcaagctggccatcagctgtttcttgtccagctgtagtcttggaccaccttcccagactcactttccattcccatgtggccatggatgttcatcatgttctcagagagcacattgttctgataggatgggaggaataactgactgtgaaacctcattcttttaaatgccaccaaatcagaatgttcagtagacgcaacctacacccaaggcagcataaccttgcattatctaccacagagggattcccagaataatgtattatagaagaggaggcaaactaaggccattcatagtaaacaactgttcccatcaaggatccttataaaagattcccaggccagattcatccgtttctttcttgggtcagttgtcacagccctccggtagataccaaggtatttattctcctaccaatcccaatgccaatagcctttcccacttcctgtttctggcactttctcttgctcatccactctgctgcagtgcacccatttaaagagaagcccaggtggatcaactgaggtcaggatttcaagaccagcctggccaaggtggcaaaaccccatctctactaaaaatacaaaaattagctgggcctgctgttgggtgcctgtaatcccagcactttgggaggccgaggcaggcagatcacttgaggtgagaagttcaagaccagcctggccaacatggtgaaactccatctctactaaaaatacaaaaaaattagccgggcgtggtggcgggtgcctgtaatcccagctactcgggaggctgaggcaggagaatcgctttaacctgggaagtggaggttgcagtgagctgagatcacaccactgcactgcagcctgggtgacagagtgagactccatctcaaaataaataaataaaaaataaataaagggagcccaggggactgtccaccctgactgcaccagctgtcacactgctagcccacttctcagttccttgcataggtttacatcaataagtattattttgaagtaaatctcggacatcatatttcattttagtctgcatcttaaaagataagggatttgtttttaaccatcacaataccattgtcatactttaaaattttaactgtaatttcttagtatcatcaaatattcagtcactgatcaaatttttaattatcccactaatgctatatttttgacgcttgctttttaaaattggtattcagataaggtccacacactgatattgattgttacatctctggagacgcttttaatctacagatcctccatctcttttgctttccttgcaattttaagttgaagaatttctcagaaatttgaatttaatttcaaccgttccagtcaactttcttctctgttctttcgccatctaccgtctcacttccggctgttttcctcttattttcttttttccttaaagagagaaccaacttttgccctggaccacaggcatgtgtctggtaaaccaaaacttctctcatcaaagccatctaaggggcaatccgagtatgtccacagacatttccctgattggtctttatgatttggacatcaacacctttcagtatccctcaaaaccaccttcttatcatcaagttgcacactctaatttcttagaaccccctattatctttttaagctataggaaagacctgagtgttggagagagacaaatctgtgtccaaagtctagattctgccactccctagctgtgtgaatgttggtgagttgcttaccctctctgagtctcgaagatgaaactgagcccatatctgcatatctgcctataaggttgctgtaagcattaaatgagataatgcttgccaaacaacaaactcaattcctaagtaaacattaattcctttttcttacttgcgctatgctgtgtttatagatatacccttagcctctcttagtatcctttaaacctgcactgtctgataagatagccactagctgtatgtggctattgaggaaaatatggctagttcaaactgagatatgtgctataagtaaaatatgcaacagatttcaaaaacttcatggggaaaaatgtgaaatattgtattaataattttttacattgattacatattgaaacagtctttaggctgtattgagttaaatgaaatattactttcacatggtccttttgtgtttttttttttttttttttttttttagagacagggtcttgctctgtcactcaggctggagtgcagtggcgtgatcacagctcactgtaatcttgaactcataggctcaagcagtcgtctcacctcggcctccttagtagctgggactataggcatgcaccaccacgcccagctaattttttttttttttttcattagaaacagtgtcttgctatgctgctcaggctggtctcaaactcctggcctcatgtgatcctcccactttggactcccaaagtcctgggattataggtgtgagccaccatgcccggcccctttttacttttttaatgtggccactagatgattttaaattacatatatagctcacgttatatttccactggacagtgctattttagatcacagatggcaaactcaagtgcccacaggatccagatgagtaacataaatgaatgccttgttctggtggcatctgttcactctggagattgtctcttccccatctgaaggtcacagctgttctcttcactctgcagattggtgacatgctgggatataaggccaattttttcatttcttccagtactcaaatgaagttagaaaagcagtcttttataggaaattttcaggctttcaaatattggtaattaattttttaaagttcctaatacttcaaacagaacgtgtgtgtaggctagagcccactttgggccccagcttttgactgcttcagatagctttaaaggtctccatcccctgtacacatctacctttcattatgatgaaagacatacaaacctaggcgaggccctcactcaacactgcaggacatctctaaaggaatgcaatttcaatgggaatttaaggcaagaaactgtctgtaagacctacgaaggtaatgatatataaacgtataaaagagtcactttgagtaattaaagcaggagccgacctggcctagaaacatgtgggaaacacttggaaaaactgtggtgaaagggaaagtaatatcgggtactcaaaagtattaaaatttcatgtcttgtaaagatattctatactttgtcctgacaattctgattaatggggaaattgctgggatcttaatttattttaattcctagaatccagaatcatcaatgctggtttggaacttagagacagattacaccgttcagccctcttctcacagcatgagaacagaacactaaggcccagaaagtttagttgagtcgtctaagtaaaaataactagtttgaagcggggcacagtggctcacacctgtaatcccaacattttgggaggctgaagtgggcagatcacttgagcccagaagtttgagaccagcttgggcaacatggtgaaaccacatttctacaaaaaatagaaaaattagttgggtgtggtggtgtgtgcctgtagtccccgctactccagagactgagacgggaggatcatttgagcccaggaggtcgaggctgcagtgaaccgtgattgcaccactgcacttcagcctggcgacagagtgggaccctgtctcaaaaggaatgaataaatacataaatattaactagtttggtgtagaattgaagttgaatccagggctcctgactccaagaacagttagattagttttcaagagagttctgtatttgtataaccctgacatttccagtcaagttggtctgcattgcttgttagtaatcagaaaagggaattggattgctaatcttttttttttctctttaacacagaaagtcccattacagaatcctcccattaagtgggctgaaggacataagggagtatttaatattgaagtgcaagctgtttcttctgtacacacccaggtaaggaatgtcaaggttaatcatgaaggtaaaggtgcagcggaggagcctttgaaggacaggccaataaaagatcagtgaaaatccttgtctacagataaataaaaaataaccctttagttctttgtggggacatgcaaacctctttaggtttcatttgtcattggaatagaaagaccttacaaaaccgccgagcacctaaaggaaagaacctagtatctgcactgttggtggagaaactttgcagggggacttgatttgaaactctcatctgctgttacttcttttccctctgtaactctgccactttgccagcttttaaaaagaaattccgtactctctcctttacctgccactgtctgagttctgcatctgctgagacctctctcttggcagtatgcttacctggtacgctgacctctgcttacagaacatgtcagagccaaaattatttcttctttagctaataattattgaaacgttcaacttcatgcaccacattctacaaagaagttcatagcctcggtctgaaacatcatgtcttagaccttctggtctgaaacgctggataagaggttctacccataaagagctattcgattgtgtttgtgaatccactggtgaacattgatggtataaaaccccatgaggcctgccttctcccttcgcaggacaaccacctggagaagttcttcaccctctgccactccctggagagccaggtgaccttccccatccgcgtgctggatcagaaaatcagcgagatggcgctggagcatgagctgaagctcagcatcatctgcctgaactcctcccgcctggagccgctcgtgctcttcctgcacctggtgctggacaagctcttccagctgtccgtgcagcccatggtcatcgctggccagacaggtatgaacctgcagggctgggctgggaggaggcaggagcaagcaagcattgccttctttaatgaaaaatgactttccagaaatccagagacaatgtgatcttcctttccactgatgatgtgtgctcaagggaggccaagtcttatgctattttttttttgagactctctgcatgttggaaagaaaaagaaacattaaaatagggttcttaatattatagctttttgtaaactttattaaatgattataggcagtctttaaaattccatttctggtaattgatgaatttattttaccttgaagatatttttgttttcttgactaacaggaaatggaacattttaaggtaagacaacctgtgttaaatggagggaaggaactctctacattgaaatgcaatgcaatcaatttttaaagttaaaacataaactcactattttaaagtgtatagttcattggtttttagtatagtcacaaggttgtgcaatgatcgctacaatctagttttataacattttcatcacctccaaataaaaccccatcactccctattcatccctccccctagaactcatccgttctctcttacagtctattttaaatgcttacttttaacaagttaacactaaatacaatgtgtacattttcccttagaaataatctcaaaagcttatcctggaggcatgaccagagtccagtggttctcctaactcttccagggtagactggctggtatagggcatctttatttgccaccattttcagctgtgcctatatagctctttgctttccagtccagcagacgtcttttgggtaccatccatatgcccagtactgtactaaaagttgtaggctttgtgacaataaccaagagcatctcagacctcagaggacttataatatggcaaagagtcagcagcacaggacaagactcctcaaagggacacagctaaattttgcagtggttgtggggagggtggtatcaaaggagagagtgagaaaacatccatctgggaggatgcaggaggtccacataaagagatggccttgaagaagggatagagtgaaaaccgacagaataggggcaatgagatgagtgcagcactgcagagaaccagaaaagtgtgggagtgtcaggaagaaagtcagtagcacagttggtggtggaacagaagcacgtgtggaagtgggctgggacaatgaagtgagacggcttttagagccagggaggggcatgtccccttaatctctcactctgctttgcaccctgatatgcatcttctgtggttccacagatcaaacgtcctgtgttggaggctaacttttcatccatgtagcagttgcctctccagctagattcttgcagagctctgccctccttcgattactttctgtgcccccgcatatgtggcacactgctttgtatgttccagctagttaatacagacttgttcaccagacaaaaatatttatatgttttgagcagcttctccatagcaagttgccaccttgtggtgtgaggaccacagggtgttggcataggcagaataagtggaggtggctagtctacaagcatttattcagaacctattctgtgtctctgcaatggaaagcacagtgggggcacaaaagatgtgagaaatgcacttcgcatgggaaggattccagctttcacagacagacagtttaccaccagacatggctggagaatcatgtaactcagtttcacttgagccctgtactgtgtggagtcagacggcttcatggaggaggtgggacttgtgctgagattcacagggtcggtatgattttgtggatgggagtgaggagggcttcctaggcgaggacaacagcatgagcaaagtctcagaggtaagagagcaggcatgatgggacaatacaatgactgcctcattttaagggatgtcgaactgagccaaaaagggtacaaggttagataagtatattggagccaaactatagaggcttagggcaccagaacaagaggttctatgcagtaaatcaaatgtgtatgggcccactgtgggaatgacttgatatgcagacatttttaggttaatctgtacaagaatcagggttgtgcagcacatctcaaatcatagtgtccacaacagtcacgtgagcatcttgtaaagatgcagaacctgattaatacactctctggggtggggcctgagattctgcatttcttagtagcaagcaggtgatagtggtcgtgtgtgtccgcagcccccactgagtagcatcagtttacaacctggcttagagaaggaggacgtctggacagtcttatgtctttgtcattaaaaaccatcaatgctattcagtggcaggaggaggaagttcaaaagagggaatgtggaggcatctgtggtactcagagccagcatgccagagctcaccaaaaccatctacccttcccaggcctagttaaattggtcagcggtcaggactcattgtcactgtcctggagaaacttccacctcaggctccttaaggaccagctgtgggactacccatttttctcttggttcctcagccaacttctcccagtttgccttcgagtccgtggtggccatcgccaacagtctgcacaacagcaaggacctgagcaaggaccagcatgggaggaactgcctgctggcttcctacgtgcactacgtcttccgcctgccagaggtgcaaagggatgtgcccaagtcaggtagagttgccctgagtgtgggactctggtgggcggggcaacaccacctccaccccactgcagtgtaatccaaaataaaacatcctatgctgggtgcaggggctcacatctgcaaccccagcactctaggaggctgagatggcaggatcgcttggagcagtggctcacatctgcaaccccagcactctaggaggctgagatggcaggatcgcttggagcagtggctcacatctgcaaccccagcactctaggaggctgagatggcaggatcgcttggagcagtggctcacatctgcaaccccagcactctaggaggctgagatggcaggatcgcttggagcagtggctcacatctgcaaccccagcactctaggaggctgagatggcaggatcgcttggagcagtggctcacatctgcaaccccagcactctaggaggctgagatggcaggatcgcttggagcagtggctcacatctgcaaccccagcactctaggaggctgagatggcaggatcgcttggagcagtggctcacatctgcaaccccagcactctaggaggctgagatggcaggatcacttggagcagtggctcacatctgcaaccccagcactctaggaggctgagatggcaggatcgcttggagcagtggctcacatctgcaaccccagcactctaggaggctgagatggcaggatcgcttggagcagtggctcacatctgcaaccccagcactctaggaggctgagatggcaggatcgcttggagcagtggctcacatctgcaaccccagcactctaggaggctgagatggcaggatcgcttggagcagtggctcacatctgcaaccccagcactctaggaggctgagatggcaggatcgcttggagcagtggctcacatctgcaaccccagcactctaggaggctgagatggcaggatcgcttggagccagaagttggagaccagcccagggaacataatgagactctgtctctacaaaaaatataaaaattagcagagcatggtggcacatacctttagtcccagctactcaggaagaagctgaggcaggaggatcatttaagcccaggagttggaggctgcagtgagctatgattgcaccactgcactccagcctgggaaacagagcgagatcccatctcttaaaacaaacaaacaaacaaacaaacaccctaaaattccattttcgttttcaggacaatacaaaacttacatgaatgctgaaattatgtgtttctttatagatctttcttcctccctccttgcctctttttatgctctaaacacttattttgtctgcccatttgataatccctcactggtctttacccacttgctaatttatgattcagctgagaatctcttttttaagatggagaagtggtgactgatgcctacgattctagtataataaaggaaataatatatatccaatggcagtggttcttaaactttttgttattaaaaaaaatcccttttcacatttccctcaaactgaactattgaaataatagtaatgcatttccccaactcttcttaattatttacataagtaataatcaagtagaacttcttgtcagcatgatataaaaattagtgtcagtgagttcacaaaattgcaggcccaaataaacatgacacttttgttggtctgtgcagcctcatttctagtaaatctgaaaatttgattgagtttttaaaaatactagtgatgtggctgggtgcggtggttcatgcctgtaatcaatcctagcactttgggaggccaaggtgagcagatcacttgagctcaggagttcaagaccagcctaggcaacgtgacaaaagcccatttctataaaaattacaaaaattagccagtcgtggtggcgggtgcctgtagtcccagctactcgggaagctgaggcaagaggattgcttgaacctgggaggcggaggttgcagtgagctgagatcatgccactgcactccagcctggaggacaaagtgagaccctgtcttaaaaaaaaaaaaaattaaatagtaatatctcatagatttccataaccgcttgtgaaaacatgtcaacatttaaagatgaaaaacagtgctgtatacatcatataccgtaatcctcacaaggttcagatgactctatggatttttgaatctgagaaaacctcactgcatgaattgtaaagttgtcatttaaatattgacaaattaaaaatatccacatttttagcttctcatgagaaatcagaagctctagcaaccctggggtccatttcccgatggcagtaatagactggagccagtagtaccccctgcctttgtaagaggcatgtgttggctgtttaccatgatctccaccactccctggtgccttatgccccatctacttctctccaaaagattgcctcctaccccaaccaggatttgttaagaagtctctaattccaaggcctaatccggtggcttttcatccaccctatccctcttcaattccttcttaaactcagtaagtaactctgttcccctgtctgttgacatgtctctgcctggtggggtgcaggcgctcccactgccctcctagaccctcggagctaccacacgtatggccgcacatcagctgctgctgtgagttcaaagctgctgcaggcccgggtgatgagcagcagtaacccagacctcgcggggacacactccgcagcagacgaggaagtgaagaacatcatgtcttcaaaggtaggaaagatgtcaaaccgtggaaggggacacaggcttttttattttttaactaaaacttggagaagtaacacagaagcaaccactactgctgcccaccatgctggtcggatgctttaatgctcagctttggagtgattaacgttctttagaacagattaagaccattctgacagatgcagcagcaagaccagcatctgaggatttgctgagaactacttagcttgggtagcaaagttttaaagcatcaggggtttagccacatggagtcatgtggctaaaccatgcattttattttcaaggaaaaaaaatagctttaacttttgatacctggaaaggttgcctttaatttagttttgtttctttaatacctacctcttacgttcattaacatccacagattgattatctcacaaaaaagtccaaaggaacagccgggcatggtggctcatgcctgtaatcctagcactttgggaggccgaggcgggcggattacttgaggccaagagttcaagaccagcctggccaacatggtgaaaccctgtctctactaaaaataaaaacattggccaagcacggtggctcacacctgtaatctcagcactttgggaggccgaggtgggtggatcacaaggtcaggagttcgagaccagcctggctgacatggtgaaaccccgtctctactaaaaatacaaaattagccaggcgtggtggcacatgcctgtaatcccagctattcaggaagctgaggcaggagaatcgcttcaacccaggaggcagaggttgcagtgagccaagattgtgccatttcactctagcctgggcaacaagagcaaaactctgtctcaaaaaaagatacaaaacattagttgggcatggtggcgggtccctgtaattctagctactcaggaggctgaggcaggagaatcacgtgaacacgggaggtggaggttgcagtgagccgagattgcaccactgcactccagcttgagctacaagagtgagactccgtctcaaaaaaaaaaaaaaaaaaaaaaaaatcccaaggagcaatgccaaattttacaagcatataaaaactgacatcctgagagggttgatggcttgccctatgttgtttttccctctatgaattctttatttttttcatggtaaagctttactttcagaacagttttagagttacggaattatatactctatacccagtctctcctttattaacattttacattcaaatggtacttttggcacaattagtgaaccaatattcatggaatattattcattaagttcatctttattcacaccttctcagtttttctctaatgtcctttttctgtcccaggatcccattctgaatgccatattacattttgcagtcttgcctccataggctcctcttgctggaaacaatttcttagactttctttgttcttcatgaccttgacagttttgaggagtaatggtcaagtattttgtagattgtctctcattaggaattttttaaagattatgatattattcacataccataaaattcacccttttttaaaagatggagtatacgatccaacagtctttaatctactcacaaagctaccacgatgaattcttagcctgaattttttctccaatgatctgtggcctcagggtggccgagctattagagtaatatcatttcccctgataaagagaaatcaaaatctctaggtttagacacagacacagtttcacccttacaaattccagccacttgacactgtgtggtgtgaggaaggaaatctgcaggccagggtttggggctgggcgccaatactgccccgctgtgtggccatgggaaagtcatgtaactgtgctgggcctcatgtcctcatctctgcagaggtcctggtccctgaatgaacttaagaaccatctaccctgggtcttttaaaaacactggatttggccgggcaccgtggctcatgccagtaatcccagcactttcggaggctgaggcgggcagatcacgaggtcaggagatcgagaccatcctggctaacacggtgaaaccccgtctctactaaaaatacaaaaaattagccgggcgtggtggcgggcgcctgtaatcccagctactcaggaggctgaggcaggagaatggcgtgaacccgggaggcggagcttgcagtaagccaagatcgtgccaccgcactccagcctgggcagcagagcgagactacgtctaaaaaaataaaaataaataaaaaataaatgaaaaaaccactggattcaccccctgagatgctgatgatctgtagtttgagccatcaggaattattcgtattctatcctttttgacttacaaaaatcagttcagggatgtgctggagtgagctcatacctgttcccaaaagctgattgcttagttttccagaattttttgagccagttttgaaacagacattgttaaaattaaatcgtataaacttaaaattaaataagttatattaaaaacaaaggtaatctgaatgcaatgtggtatgctagattgtatcctggaacagaaataggacatgagtgcaaaaactggtgaaatccgagtcgttcgtgtttagttaatagtaacatatcaatgttagtttcttagttttgacaaatgtaccttactataaaagatattaagagaaatgcaatgaaagtcatataagaaatactacctttgtaacttctctgtaaatctaataataactatacaacttatacttcaaaattaaaagttcactttaaaaaggtaaacctagtcccttcctaataatttcactatatgctacaatatctaagttcttccttctttacgtttactgtgtctgtgtgatggaaatattatataatggtttgctaccacactgcatttctatgacatcgtgttggtagattgaaatcagttatgatgaaagtatttgtggcacaaaaattggcaaatgctacaaattacccctacccccctgacaactggttgttaaacatttgccagcacaacacaactcagcctcatattgaaagcccctttcagtaataccactttctgatcacccaggaaagaagtggtctgcagctattactgacagccttgatctttctatttttctttaataaaatgaaaatattaaatttttatgtggacagggttagcaattttcgaattattttgttgcatggggagaaaatgtctgatagagcatgagcactccacttcccttcagaggtagtttttgacaatgtattggtgtttaggagacagcgtggtgcagtaccgtactaaaccacagagagacactgttcccacacattttttcctggcgtcccctgaagtcacagactcctagaagggactactcagcagcccagattcttaaatagtttttaactgtaggttgctacacacaaactattaacgggtgttgtctcaagagcaagtaaaattaggtataacttcactgtctttgctttgttttatatttacttatggcaattgttttacctttgtaaccaggaaaaaaaatatgtataaaaaaatgaattctgaggttgtgatttccagatgtctggcttacctttccatggttggttgactgttaagccatggtttgtgtattttagatcgccgatcgcaactgcagccgaatgtcttactattgctctggcagtagtgatgctccaagttcacctgcagccccaaggccagccagcaaaaaggtactgaagagagcaatgtgaggttcatcccaggataagaacagaaggatttcctcatgccctcacactgtgcttgggaatagtcaaagtgctcccctgcctgtccctgatgtgctaacacacacacaccccacacacacttttgcagccctgtcctttacgccacatttgaccacctaattgcccattaactcagtgtttctcccactttctcatgcatcagaattacctggaagccttgttaaaactcatcgctggaccctacctcctgagtttctgattcaatagatctgagctggaggctcaagaatttgcatttctaacaagttcccagctgatgctggtccagggaccacattttgagaaccactgcattggcctccttttagtagagggaaagctgggcacaagtcatccttgacaaaagtgaatggcaataattaggtatcatttgtttcaataccatataaactaatatgaaatgcttcctcataattcttcacaatcagccttacctatgagttcagaaactttaaaagctgttaaactgcttaccaggatttttaaagcaacaaaattccccaatcatagtcccagcctatgtggtctgagggatggagggaaaaaaaactgtctgccctaatttcctctcttctaggcactcaagaatctcaccattatagtagctacttaagtttttaatgtctttgaagacctgtattaaaatgtaaatatggcagggcacagtggttcatacctgtattcccagcactttcggaggccgaggtgggtggatcacctgaggtcaggagttcaagataagcctggccaacatggtgaaaccccctcctactaaagatacaaaaactagccgggcatgatggcaggcacctgtaatctcagctactcaggaggctgaggcaggagaatcacttgaacacgggaggcagaggctgcagtgagctgagatcgtgccactgcactccagcctgggcgacagaatgagactccatttcaaaaaaaaaaaaaaagaaaaaaagggtaaatatgcttattgcaaaggataacacaggaagccatttgcaagagctgacatcacagggaaatgtttattaaacaggcaaggagggaatgagcctccccaagtctccctttggactggatgagggaaagaccaagtgtgggagggccggggcctggtgctgtgcactttgcagtattccaggcaccatatgtctagtgagaggtaccaggatttaactataaaaggaaaagtgaaaaaagatatggttaggctaaaaacaaattagtccacttgctctaaaatttaatattaggctatcacaggccctatgcagtgactggttataggtattataccattttcctttcttaaaaaccattatttgcctacagcctgacttctttaacccatgtcctgtttggtttcgcagttgccatgttttgacttgaaatgaccagaatagagacattttatttcaaagggaagtttggccaatatgtttccttaataccttagcagacagagttttgctgcttggctattttatataacctccagagcaaggtgttcttgtaataatgctgcccagaaagcagcatgaattactttaagaagcagcttatccttgtctaatctcttcttgccataagaccctggcagacaaactgacctattttctagaggcgacctttgaagctgggggagcatgtctttcctacaatgagaagatcaaggtgtagtccagttataatatgtgcacagttagaccacctgctagactaaaactcaaccccacgcctctctcaagtgagacagcttcacttcagactcacaacagcaaacaaatgtgttaacgcatattaaaattattaaggtttgactaacctcacaaaacgaagtgaaaccagtcgataagctgaaacacctaagcattctccattcctcaccactaacccgcctgggatctaattggttaaaatacccaagcatgtatacagagattttccttttgtcatcttttagtttagctaagtagctctcaaattttaatgtacgcaagaattagtacattgggttgcatgcgtactggactctgtgggtaatttttttttttttttgaaacagagtctcacttactctgtcacccaggctggagtgccgtggtgcaatcttggctcactgcaacctctgcctcccaggtttaagtgattctcctgcctcagcctccagagtagctgggattacaaccgtgaaccaccacatctggctaatttttgtatttttagtatagatggggtttcaccatgttgaccaggctcgtctcaaactcctgacctcaagtaatctgcctcctcggcctcccaaagtgctaggattacaggcatgagtcaacacacctagccctctgtggataatttaaacgactgtcaagagcaatgtttgctgtaatcagtttttgctttaggtgttgactttaaaacttaatttgcaaataaggatatgatattagggtgttcaaatagctttagctttcttacctactttcttaccagaaaaaaaaaatgagtttatctacgtttattccaggttttgtgggcataagatgaaagaaaaccacagaaaattcccagacatcatttttggcattaattagggtgaccaactgttctcatttgcccaggactgagggagtccccaagatgtaaggttttctattttaggaccaggacattatcaggcacactgtaatggattgattgccctacctttagtcttgaacttcttcctcatcaaaatgattgtcaggaatatgaacacatagccagatatgctgtagaatggaaaaggtataagtcaccctgtgcactatttgctactgagcagtaggtgacttgaagggaagtgaagacgcaaagtggagctgggggactttccaagcatctggccctgggacatagacatttagatgttgtaagttaaggctgatactactatgcctttcagagcccaagatcctctcataaaccccaccgatcctgcttcccacaatgccatatgggcattataaaaacaaaaattgtccagtctcctagagagtttagacaccatctagacagtggtccctaaagtgtaaccctggaccagcagcagcagcagcagcagcagcagcacccaggaacttgttagaaatgcaaattcccaggctattgaatcagaatatctgggggtggggccccccagtctgtgtttcatcaggccctgcaggagattctgatacacagaggccgggcgtagtggctcacacccgtaatcccagcactttgggaggccaaggcgggtggattgcttgagctcaggagtttgagactaagtgggcagcatggcgaaaccccatctctaccaaaaaaaaagaaaaaagaaaaaactagctgggcttggtggtgcacgcctttagtcccagctacttgggactaaagtaggtgggaggattgcttgagccagggaagttgcagtgagcgagattacgccaccgcattccagcctgggcgacagagtgcagccctatctcaaaaaaaaaaaaagtttgagaactgctgccaccaaccaactgattttatggatgagaaaactgagggtgaagagaggaatggcttgcacatggtcacacagagagttttcagcaggacccaagaggaaagtaagacagtaccagttttaatggctacccagaatgtttcccccgtagaatagagtttcactcccaggctgagtccactccctcagatgtgtctgtcctgtgcagcactgaccccagccttctatgcaccgaaatgtcctccagtctcaggtgatctcagcactgactttgccatccaccacttactgcctagaacatctaagacacatgcttcaggaacgaacaagctattaaattggggggaataaaagaaaagaaaaaaagtgttggtgaataataatagcctttgtttcacagcctaatttttgtggttcttatttagcatttccatgaggagcttgcccttcagatggtggtcagcaccggaatggtgagagaaacagtcttcaagtatgcctggttcttctttgagcttctggtgagattcttgcgcgtttgtatctgtgctcaataggccaagagaagcacacagcagaaaggaattgacattttgttcactgagttgcccctgctgaaaacctggggtggtttcttgaaatctaataatctctcacccctcccatccttcttccactaaattgtgttgcttctaccatgaaaatctatcgccgtcctgtgagttctcatcaccttcaccactctccacctggccacacaccatcatctctcatgtgcctctcgcagtgacatcctctttttcctgcctgtatccatttttgctcttggcccacccattctgcacatggcagccaatactaaacagagaatgtcacgctccttttaaaaaccgatcgatgattttcactgcactgagaagaaagcacaaatttttatcatgacctaaaaagcccttgtatgattctgttgttttcctccctctctaacctcatctcacgccacattcccccatcattcagccacatggtcctcttttggtgctttgaagatgccaaggccattttggcctcacagccttttccagattctcttcctgctccctaactttcacctccgcacccccaacacacacagtttctattcttctctgtagatttcagcttcagtggaaccatccccaagaggccttttctgaccacctaatactgtaatatatcttcctctattatcctccttctgagcaccctatttatttctttcctagtggttatcacaatttctaattgttttttctgtctcagcggttagattttcaggatttgggtctctcttgtgtattatcccatctctagcctcagcacactgcttggtaccatgcaaggcccaattaatatctgttggaaaacagaatgaaatttgtatatctgtttatcctaaaacttctaccattactcgagcagaaaagcaaaaggtatagccataataccttaattttaaaataaggggaataatagtgataactatttttttgtttaattattaatggaagcaaaaggattttcccatagaggcactaaaaataaacattttctcaatgttgataaacagagatgcataatgagatgatgttgaatgaaagaggtctaaagacatagacaccaactatataaaaatatatatgcaaacagttcagaggatttggagtaggttgagatttagtgataatgttagctttatattcattgggttctttcccctgtcccattaagtgaatctttttttttttttttttttttttaaagagagtctaggctgggtgtggtggctcacacttgtaatcctagcactttgggaggctgaggcaggcaggtcacttgaagtcaagagttcgagaccagcctggccaacgtgacaaaacccatccctactaaaaatacaaaaattagccgggtgtggtggcgggtgcctgtaatcccatctactcaggaggctgaggcaggagaattgcttgaacctgggaggcagaggcagcagtgagctgagattgcgccattgcactgcagcctgggcaaaaagagcaaaactccatctaaaaaaaaaaaaaaaagagagagggactaaagagatgggaggggttccacctaagctctagtttttgtatgtaagttgaagcccaagaaaaagggagaaatgctgaacaataggacacagagaacaaagggcaaaggaaacaaatgaaccatccactggggaggaaataggaagcaatgtggaatagagttcagaagaagtcaggttcatgccacagaaacacacccaggattcaaatcccatgaagttttgcaaagtcccaacctctgttttgagaagggtcccaaagcatggtcccaaatccttgccacagaaccacctggaggtgcttagtaaaaataaagcagagattctttctcaaagcactaaaattaggaggctggaggccagcattgtgcatttacctgtcttctcaggtgacttctaagcctgttaatgatccactggtctacaccacctctgttctgtgaatcctatacagagctacaggtcttttggaatttgtactcagacaacaccagaatttttttttcattccaaaagccgagctaattaaggtggtggctgcagctcacaagtcttggggcaagagcattaacaatgagacatgagctccatgctctggcaggaaagggactgggccataagacccattcccctcttgtttcttgaggcatgagaagtatcaaaaccgtcaccccatgccctttatatcctgcttctatttacacatcccacccaccatcatgtctctccataaagaagattcactcagcctagctctgcaaaaatgaaaaaattacctgggtgtggtaacatgtgcttgtagtctcagttactcagcaggctgaggcaggagcgtcactggagcctaggagttcaaggctgcagtgagccttgatcatgccattgcactccagcctgggcaacagattgagaccctgtctcaaaaaaaaaaaaaaaaaaaaaaaaaaaaagaagaagaagaagaagattcacttgagtcataatccagctatggataattcatacaaataattcattcccaatgcggaattcagcattgcttattctgagtggttccatgtggcatcttagagctctctttccaaaggaagtttgcattctctgcaggtgtaatgatgtctctgttcttcacagaatcccaataatagttggcataccaatagttggcataccaatgggagaaagaataatcacatcaaaactactgagcatcttactatatatgtgccaggcagtgttttaagcattttaaagcatcatctaatgtaatcattatgcaatcttgaggcaggaggaacttttattatcccaaatttacagatggggttggaggaagggtggtggccataaagagagtctccaagtcagccaaatgcttcagcagtaccacttcactgcccctaactgcttttggccttgcacatttatttactagggcttcgttggcccaggagagaaagcataagctaaagcacatggcccatcttacctctaggaagtcccttatggtaaacagatgaagttttttgggaagaaagcccctgctgatctaagcatattgcaggggtttgtcaacatgcagatcacccaagacaccagttctaccagcagcctaaaacctaagtctgtcaggttctggcaggacagagtttccgttgcccaaaagggttaactgaaaagcattgatcaaaaggactctgctcagcatgtatgggaggttcaggggccaatgaggattggtgagagcccccagggtacagcagctggcagaagcctttctctatgctagctctaaagaatcaagagtatagcagagtaactggggcctagaaaaatctggaggcagatgagacaatcttagaaaaggagcctggggccttagaaaaatgttgccactaccaggacctcactgcagcagggatgagggcagtggaagtgagtaactacctgggcctctctgttctcccacgtaatgatccccttgtttgtgctcctgttggccaactccaactggaagccaaaggttaagggggcctgagtgatgtggtccctcgagacccccttcccagcattcagagacagacagagaaggacaagaaatccatcagggagctggggtaggggcaaatggaaactatcatcccccagccagaactttgcaaggaaattgatctcagactcagacaaggtgcccaattcttcatacattgtttatgcatttgcctgaccaatgcccaggaagttatttgaaaaccaaaacagttttgttttgtttttttccaagaagcttgagaaagacaacagcttccttggccttagccaacaacctgggcaatttaacaccctctagttgtgtcagtgcccaagcgctaatgaacaaccactttggcattagagctgttaaacacaatgcttgggcgactttcacacttgctaatgaataaaatccctgtgcttctagaaactgctgagccagaccttggagaaatagagataaatgggtgacctagtttactcactcaggacatgaagttccacattaaggggttctttagaggtacccttactttaaatgggccacaaaggcccatatagggggaaagatttctgtgcctcgccccactcaacagggccaggcctccactagtgtttctactggatgttcttctctggagatctggaggacacagtagctggcaagctgctgacagtctggaaagaggccattggttggaagtatggtattgtgagaattatgtatttggttgtaggatggccaaactcagcagacaggagccaaatacagcagtgagttctgaaagccttagtgctgggatggttagcctgcccagaatcaggattggcattgcccaaaacaaagaggccttatcttcttaagtcctttgttaggagcatagtgagagagaggcttttttcggacaaaaatgggtccagttcccacccttcattcgggtcttctcaccaggtgcatgcggccttgtgggatatgaagccatctctgtgtcccaaaccaaagaggatgccgccatgaggagaaaccatggtttctctactgagctttagggtttgatgtccttaggtcttccctgagctggccatggcgttgtctgaaaacatgaaacacataaagcctgtgtctctggttttttcttattttgccttccctttgttttttctgtttgtttccatgctaacaaaaattgccagtgctgcatgcatccttagaaactgaattctgctgttagtgtattaacgttctctcatgtagctcctgggagtggaagtcccctcttcttccagtctcaacacagagggcaaatgtgggtggttcaacttccagtgccattagtagtagtagtagtagtagtagtagtagtagtattgcagtggctgtctgactaatctagacgcatacatgaaaacgttttcagagtgtagggacccaaccacaagaccttctagtcttccccatgttcctaatagtgtaagcaacttccaacaaggataagactcaccctcagatggtgacaagggggcccatattgacctgtgaatctcctggccccaagaagatgtccaaaaaataagcatgatcttgatttaaaattgtggtaggcattgagatagtattattctagtcataatgcagacagtcaccaattgacacaaggatatctatatatagatacgatatgtatatgtatgtatatccatatagatatatctgtatataaatatctttctgtcagttgacgaattgtttgcattatatatgtaaccacagtatacaccagtttgtgtcaattggtgacttgtattgacacaaagatatctatatagagatactagatatagatagataatctgtatatagatatttttgtgtcatttggtgactgtctgcattatgtaactaaaaattagacttatggaactcaaaatttcccctagaggtaatgttttccctggaggcaatgttctaaatagtggttctgtttccagctggccaacatttcctgctcaatatataatatagctaaaatttataggagcagaagataactgctggaaactatagaactgtttctggaaaaactgtgctccctcgagaaacactgaaactcaagataggaggaacatttctcccacgttctccttactgtagtttcaggaacagaaaagactttagttcgcatcaagaaccttgtgataaactgttcctttctgagtcatgtgttctgtcctatgatagaggacacctagctggttacaggagcccagctcaggtctgccttccaggatgtaggcagttgagaacactgtagctaaagaattaagctcctggctttgtcagcagcaagaagggagcctctgacttggggtcaaaaagaggacacccttcccacctcccgccaccatggtaaccattggtgtgtctgcagcattttagtccagagcttgctcgggcaccaccagcacagataaagtgtcagaaaatccattgttagagagcatttctgtgagtctttcccccttttctgcattgtacaagcaggtcaccaatctccatgttgacatttcctccatccccctccgcaggtgaaaagcatggcccagcacgtacataacatggacaaacgggacagttttcggaggactcgtttttctgaccgtttcatggatgacataactactattgttaatgtggtcacctcggaaattgcagcccttttagtaaaaccacagaaggtaactgtattttactctttattttctaaattgtttacctggaacatatattactttcataatcagagaaaaataagcatcattttaaaacaataattaaaatataactgtaatgacagttaaacgcagtatgttatactggactggaccctgatgtggggctggaaaattgttataaacaaattacacacatgaggccaggggttcgagacctgcctggccaacatggtgacatggtgagaccctgtctctactaaaaatataaaaattagctgagcatggttgtgcatatctgtaatcccagcaactgggaggcagaagcaagagaactgcttgaacctgggagacagaggttgcagtgagccgagatggtgccacagcactccagcctgggtgacagagtgagactctgtctcaaaaaaaaaaaaaaaaagaaattgcaatatggactgtggtttaaatgatcatatcaggctgggtgcagtggctcacacctgtaatcccagcactttgggaggcaagggtggtcagatcacttgaggtcaggcattcgagaccagcctggccaacatgttgaaaccccgtctctactaaaaatatggaaaattagccgggtgtagtggcacgtacctgtaatcccagcttctcgggaggctgaggtggaagaatcgcttgagcccaggaggcggaggttgcagtgagccgagatggtaccacagcactccagcctgggtgacagagtgagactccatctaaaagaaaaatgtagatatgaaagataatatttttgctcttaggaaatacaccttgaagtgttatggggtaaatgggcatgatatttgcaacccattctcaaatggttcagaaaaaaatgtttttatgttcatagaatgataaaacaaatgtagcaaaatgtcaagtattgataagcttcgttaaagggtatacagtagttctttgtactattcttgcaccttttctgtaagtttaaaattgtttcagaataaaagctaaaacatatataaaatggaataaatcaaatgtttaaaaggcagctacaaaaatcttaggaagcaatgtttattattaatcgctttgtcgttattgagaatgtgcatagtaccaagtgctcaggagattttcattcggttattcctcatggcaaactttgttggaacagcatggtatctccacattggcaggtgtgagaataaggcacagtgaggttgataaattttccaaaagtcacacacagccagcagtaaagccaagactggagattttagacccagatactgagtcacgtaaggcacccaggaggagtggccatgtggagaatgcggagagagttcgaggacctctcagcggcacggtagcaacctctttatcaggtccccatccatcccagtgacttgactggtcagcatggcctgaatttgcaaattgcatgttaacaaaagcaaaatagtttcaaaccatatttttaatagtgtcaaaggaaattgatttgtcattctgagaataaaggacataaacatgaaaaactgaatcccagattgctctgaagcactgtaaaatccctcataaacaggagcactgagaaataatacaaattaaaaattttaaaaataggcgtagcttattaattgggattcatggaggaatttaccctacggagtgaatacaccctgcggagtatgactctgacctctcttaggctggaaatgctgcctaattgaggaataaatttcttaggtaaaaactaattcttttatcctgattggattttctgtaataatccttaaaaattaagaaactgtctcattgaaaacagtaagtatttttcaagtcagtttgccaaaaaaaaagaaaatagttacaaaaaaaaaagttaccaggatataaaaaaaagtaggatccaacatagtatatagagaatgaggttaattatacacatataaatatgcatgtagaaaaaaaagtgactggaaggaaatgcacctaaatattaacagtgcacgaataattacttgattcaacctcacagtcatggctttagttaaaggagactcaactacttcgcccagtgccacccagaaggacagtggctgaaataataggacctgtctctcccaatgttcccaccagtgacctggaagttcaaatccagagtgtcccacaaaatgatttgggtgtttgtttgtttttaaggaaaatgaacaggcggaaaagatgaacatcagcctggctttcttcttgtatgaccttctctccctcatggatcggggctttgtgtttaacctcatcagacattattgcagccaggtgagtgtcccccccacccccacccccgagcgagccacttggttccttctcatataatgtgatgttcgttgccatggcacgctgtcttcttcattactgagttggcatgaatcctacacatcctgtgttttgcagcacgtccctcatgtctgtgccatggacattcctcagacatgctggtttaccttgattcctggagcatttaccgacagtgtagaagggtcaacagattcatctgtgggaattaaaatttgtgatatgatctgaatcttcaatttgacattcaacagaaaattaacatggctatacagtgctttcagtctttgacaagtccttgcgctcccagtctgaggtctcttttcacatattagggtaattaattaaattgctgttgtgatgctccgacttgaaagaacctttttaaagtgttcttaaataaaatcattcaaagagatttaatttcactgagcacatagcaaatatttcataaaccaagtgcatctatcagtgccatccccccagatttttaaatggaattattcatgtgctgtctccctcaaactaccttaacaatagtaatataaatagcagttattgttgctgctcctctccttccatatccctaatctagccactagtaccatcattactgctactactaccaccagccaccaccattctcattagtcccatgcccactatcaccaccttctccaccatcaccacctcccaccacctccaccacctccaccatcaccaccacctccaccatcaccaccaccacctccaccatcaccacctccttcaccatcaccatcaccaccacctccaccatcaccaccaccacctccaccaccaccagcatcttcaccatcaccaccacctccaccatcaccaccaccaccacctccaccatcaccacctccttcaccatcaccatcaccaccacctccactatcaccaccacctccaccatcaccaccacctccaccatcaccaccacctccaccatcaccaccacttccttcaccaccaccaccatcttcaccgtcaccaccacctccaccaccaccacctcctccaccaccaccacctcctccaccatcaccacctccttcaccatcaccatcaccaccacctccaccatcaccaccaccacctccaccatcaccaccacctccaccaccaccagcatcttcaccatcaccaccacccacctccttcaccatcaccaccacctccaccatcaccaccaccacctccaccatcaccaccacctccaccaccaccagcatcttcaccatcaccaccaccacctccaccatcaccaccacctccaccatcaccaccaccacctccaccaccatcaccaccacctccaccatcaccaccacctccaccaccaccagcatcttcaccatcaccaccacctccaccaccaccaccacctccaccatcaccaccaccacctccaccaccaccagcatcttcaccatcaccaccacctccaccaccaccaccacctccaccatcaccaccacctccaccatcaccaccacctccaccatcaccatcaccaccacctccaccatcaccacctcctccaccatcaccaccacctccaccaccaccacctcccccactaccaacagctccttcaccatcaccacaacatccaccaccaccatcaccaccaccaccaccacctcctccaccatcaccacctcctccaccaccaccaccattagctccaccatgaccacctccttcacctccaccatcacttcttccaccatcatcattgtcaccatcatcaccaccaccacctccaccaccatcaccacctctcccatcaccaccacgttctctgtggttagtcacttagtgactttagataagtttttccaattttatgggtcttaatttcctcagttttaaaataagaagggggggttgagagatttgagggctgatcaacgaaaaggataggaccataaaaagcagtgacatacaagcttcattgagcagcacttggacagggttacataagagcggaagcccctcccagcatgagaacagccataggcctgcagtgaggaggggaccatccagaggagcaggggaactcccaggggagaggaggattagggcagaagcttatagatctgggtgaggctgctccacagcacagtagggagtctctgggtcagagagctccaagggctgtagcagcttagggccctgtatctgcaaggctctatcttatcattaggaaacagctgtccatcgagattttatggggtctgcaaaggaggcaggcactaaatggatgaaaatctgcttatatgagctatttttgttaatgactgggcatggtaaaatttgagttaggtatgagccaagggatcagcaccagtcgacagtgaagaaataaacaaccgaggggccaatacacagaaacaatctttgacttgtttacataacacctctcctccaaaaaaagaaaaagacatgacttttctaaaggaagtcctgtctacagccataccaccctgaacgcacgcagtctcatctaagggaagtcctgataaggaagcagaataataaaaaagaatcctaaggaaacatcagaagtccccaagcatccccatcccatgcaccctgacccctgccctgcagcggatcttctgtcccaggacccaccagaatagaatggcagagggacacttcactcctccttgccctccctcttcagtatttaggattccaggttagtctgttttcaaaactttaagttgagtgtatgaaagataccctagatcaccactgcagacccaggcttagctactcacatgcaggctatcttcattcccgacagggaaataaggcaacccaaggtagatatctgccttccctgcaaaactcatgtttttattttctctttctctttcctttcttttctcttgctcactatctttctccttaaattcttcccttttcttttagttaccatttctttttttgtttctctccttgactcaaatgccaaagatccctagaccaggagtcaagaagcctgcatgctgattcctgggacaccattaattacttctgtgattgggagcatcagcctttgaggcattcatttcctcatctgcaaaaaaactaggctggattagatttatccactgattctgtggtctgtgtctgccagtgacatccacggatgttacttagcaccattagtggcactcaggcctcagaaggtcactgacccccattcgtggtgatttaattcattgatcccagctctctagatacaggatgaacttcataccttaagcaagttgtattcttacaaagtcgtctgactttatcattttgcataacctattatgttttctgccatctaaagattttgtggcaatggatataaccttagtcttttttaatagtcactaaaaatagacaaatccatttcctcaattactgtctgtcacttacaatgtgccactaagcaaacacccatcccttgggtaggggcattgtgggtcttgacctttgggaaggaagtttttggaatgcaccttactcctcttttcaaaacatcactcaaattgtttttgaaatgtctattttttttcttttgagatggagtcttactctgttgcccaggccagagtgcagtggcacaattttggctcactgcaaactccgcctcacaggttcaagcgattctccttcctcaccctcccgagtagctgggattacaggtgtgtggcaccactccccgctaatttttgcatttttagtagagacagggtttcaccatgttggccagactggtcttgaactctggcctcaagtgatctgcctgcctctgcctcccgaagtgctgggattacaggtgtgagccaccacacccagcctgaaatgtctgtcttgaatgatgtctcaagggacctatgaaagatacccatagtggggccttcttttaagtgccaatgtgttgtgggttcaagttccgatagccggcttgacccgacacctgttaatgagtaacctaagtgacaggcacatgaccaagttctaatcccttcaatgtgctggtggctccactggtccaaagtcagccaggagtgcacatcgaaaggttatgggatctggtaactgtgcttacatagaagtcatatgttttggttttaaaataatatataatggcatttacttattttaagtggatgtctaactatgaattaattctgtaggcaatatgtcccacaacacattggcttcttgtaaaatggctgaaaatatgtgttcatttaaattatattgtttagtctgtaatcccagcactttgggaggccaaggcgggaggatcacctgaggccaggagttcgagaccagcttggccaatatggttaaaccccatctctactaaaaatacaaaaaattagctgggcatgttgatgtgcacctgtaatcccagctactcgggaggctgaggcaagagaatcgcttgaacctgggagatgaaggttgcagtgagccgagatcatgccactgcactccagttcaacagagcaagactctgtatctctctctctctctctctctctctctctctctctatatatatatatatatatatatacatatatatatatgtgtatatatatatgtgtatatatatatatgtatatatatatatatgtgtatatatatatatgtgtatatatatatatatatagtttaaaaaacaaactactcttgaagtgagtgaagaggaggcatgtctatcacaaggatgatgcttcatatttctgtgctggggtggggggtgataatgatgaaatattgaggagctcaaggtgcatcagcgccccttccttcccctattttgcctttagaggagctgcctctgagtctgggtctttcagttgttcagcttgcctgggggaagcaaggggtctcttccagacagtcacctttttctgcttttcattgcttgcttcatggtttattttttaaaggaagatttttcctaaaaactcttctagctttctttctctttcttctccatttcctcctctctcagtctgggacaagctccttgagttttttgcaggtactatgtactttgctaaacagtttgatgcctttctctagggaactggttctacaactttccaatggggcctttaattagaaactacgagagaacacttgtagtataaaagtcatctagtcatattctattagtttcatacaggctcatatgaggtcaactcctttcatttagtttctcgaacatagtagagtttttgtaaaattaattatgttacggtgaagatgtacctcaagattttcagcacaggcttcccatggtattaaagatttgataaagtggaaatcgggataagaatcctcattctggacagctactaggctagaatcactaaggggaacagtaatgaatgaaaatttattagacctctctgtaatgcagaatttaccatctgttgcactatcccattagtttttattaaattgattgccttaacctggagagaaaggatatttttgtgtctgccaacctcaactccacttaccttgtaataaatgtttcattcctcttttcatttttcttcccagctgtcagccaagctcagtaaccttccaacgctcatttccatgaggctagagttcctgagaatcctctgtagccatgagcattacctcaatctgaaccttttttttatgaatgctgatactgctccaacatctccttgtccttccatatcttcccaggtaataaaagaattatttaactaaaagaattattcaagctatttcatttaactagctcagtttaatcatgtatttcctataaaggttagtcttattaatttgacaaaaaatcaaacaattcaaaccagatcaagtatgctaccctgaagttacaccactagctaagaattaacaatctaagtaattggtttctccccaggctcaaggctccctgatcaggttaagtaaagccaagaatccaataagccctatgaaatttagaaactcatagaaaagtctcaaatcttcctttgtctgacattagccaattgttatattatgcaaatagaggattccaaagtaaataagttttggaaaccatgtattcaccaggtttctttgcagcaggccctctaagaggttttaacttgttcatgtcaattgcaaatgcacgagaagcagaagaggaaatgggaggaggtgtgcatgataagcagtgattccccaaatgatttaacatggaaaccccaccccacctcatacattttttgaaatgttactctggaataactttaagaacatgctgtttgatagtcacattccatttatagggaacacatcagtagctcagagcatcaggcaaaatttctcattattaggttatatttctgttgcatattccttgatactagtacaaaagtgaaggcttgtcttactaattgaaaaaaaaatcttagccatatatgccatatggcatgatccagatattagctacatgaccatcttactgtgaacagggaaagatctgactcacaagcagcaattcaaaatgtataaactttttgctccatcctgcccagcagcttaagtcctaaaacttccctggactaagcttaccctaggttctttcccaccttccccttctgactgccccagggagtggccaaacccaggggccaggctcacaaaaccatgaaggatttctaaagacactttagatgctcttaatgaaatataaagtgtgctcccaggatacaaatacaggacaggaattactgaggaccggtaaatctaatacttccctccctgacatcacttgtagttccaggccagcaaaagtctgacaatgtgcttaagccaaattcagaagtgtagctgaggccgggcacggtggctcacatttgtaatcccagcatcttcggaggccaaagggagtggaatacttgaggcaggagttaccagcctgaccaacatgatgaaaactcatatctactaaaaatacaaaaatgcatcaggtgtggtagtgtgactgtaatcccagctacttgggacgctgaggcatgagaattgcttgaacccgggagagggaggttgcagtgagctgagaccatgccactgcaatccagcctgggtaacagagtgacactctgtctttcaaaaaaaaaaaaaaaaaaaaaagaaggtacctgagtaagcagggccttaaacaaagggggcatttggttacagaggaattgcctgttcccagccccaggactgggtgaggttcttatttctctgtccaacttttatgctaggatttttatcttcagcttttgatttcaggtgggaaagggagcgtcattcatttttcaacagacccggggtgctttattttcatctttcccgctgggcagtcttctctctgtgggtatgggaaagtgcagtaaccactctgtgcctcagtttccttgtccgccttatctggcaccagagtacctacctcactggggagggctcacgaagcctggctggggcgaggactcagtaaacactggccatcgctattttcattccagttcttgtggctcataaaatggctccttacgtttctgtagaactcaagctcctgctccagcttccaggaccagaagatcgccagcatgttcgatctgacttccgagtaccgccagcagcacttcctcaccgggctcctcttcacagaactggctgctgccctggatgccgaaggggaagggtatgtttctggcatttaaaatggaagatgaagccaaaaaaacagatgttctttaataaaatttgcagtctagcttctcacacttggtaaaaaactctactgtagttgaccagttctgaggagtagaaacatctgtcttgagaatatggtacccataagcacaaggcacaagaaaggcctttcttgtgtagaaaggcaccagggatgggtaagaactacaaaatgacttttcttggtcaactatttcagtggaatttaccagttctgctatagcaggtttcccaaggatgctttgattagtgaactccctaggagcaaagccatttttaacaaaggggatagcatgcagaggcaaccacaagatgtcacttggttcaaagctgatgaaggaaataatggctgctgagaaggcagctgtcccatgcccagattaggtttcttgcagacagtgcttctcaggccaagagacaccacacatccagggcttctgaatccttttacctcttatctatctgattactcagggacatgtggcagtatctagcctagaagtcaacagacagagaggtagaccacccccttctttccttctctccctatgctccgtgagctcatggagtcagaaacccacagcctatctgattggactgaaaaagataatgccttctaaaatattattcattccgttcaacaattattgaatgccttccatgggacagacacagttaggtgttagagtacatcagagatatatcagtgcacaaaacagacaaaattcgctgcccctcaagagctcaccatccagggactcagattcaaagatgattaggattgcaaagtagttgagattcaacacttctggtgtttagattaggcatacagaattgcaggaacttgcccactattccataacagagaacgaaatctaaagccatggtcttcccagtcccttcccaggacccactctcctataccaaaccatctccctgcacagggaacctgttcccatgactcctatgctaaagaggtttccagaataatgtttgctaattaatggtagcattgctgtatgttatggatggatttttatctaaatggaatttctcaagttctctcaaagtgcttacaatttagtgaaggaaacaggaggttcctgcatgaaacaaatacaggagcacatcgagttcgtgcaactgcaacagtcacatgtgtcccaagctatgtacccaggctgacaccgctgaagtgactctatgtctgcgtctcctggcaggatagtgtggggaatctcatgcttttagctctcaattctgcctccttccagataaactggcctgagtatatcctttgagaacttcactttccatggcttcaattctatcttctcttctcaactctaactaaatttctcccaattatctcagtagaatgttctaccctacaactaacataaatttccacagcaacaaaaagtgcaccgaacacttatgctaataagtaagatactgagaagaaagtttgaacacaaagaaaattgccttcatgcacaaacatgtacatacattttcttagttgtcctttaatagcagtactttaagtgatttctagaaacatctttagtatttacaatagcgtagtttctattttctattttcattctagctggaaacagccatgacattctgttctggattccttgtaaaattgttgctgttatattactagcaacaaggtagagtatattcagagataatcatgtaattatgtttaatcaggtagatacattcttcaaacacacacacacacacacacacacacgcacacacgcgcgtgcacatgcacacacacagtaccctttctcccccaaaagagtaattaacagtgtaactcctttggcaacacagtaatccctgattgctgggttgtcagttactctcctggaaagtcattagatacactgtcacaacttcatcatgtaagctaaaacctcagaaaaatgtcatgcttcaacaatacttcctattgatcagcacttcctttttttttttcttttgcttccaagacagttggtagacttgccaacacctgtacatccatggggcaagggccagaaggacgcatctcagtacctgaacccctagggagctacagctccagtttccactgggtttcccttggatctctgacacctgggtatatccacaagtgtctatgcatcgttaaatccacagtgtttttcaagcatttagaaattgtctatcatctttgtgttaagccagcaaattgcaatgcctaattcaaaacacaacccattgccgggaccacagactaagaacaagaaaaacttttgaaatgcaatttacaattatcttactttagccacagtgcaagagtctgagtcatttaaaattttggttaatattttctatataacgttgaattctgatgtagccttattttgtttgaaagaaaaaaatgtatatatatgtatatattttttaaatctggattctttttttattattatcatactttaagttctagggtacatgtatacaacatgcaggtttgttacatatgtatatatgcgccatgttggtgtgctgcacccattaactcgtcatttacattaggtatatctcctaatgctgtccctccccactccccccaccccatgacagtccccggtgtgtgatgttcccacctatgagtgagaacatgcggtgtttggttttctgtccttgcgatagtttgctgagaatgacggttttcagcttcatccatgtccctacaaaggacatgaactcatccttttttatggctgcatagtattccatggtgtatatgtgccacattttcttaatccagtctaccattgatggacatttgggttggttccaagtctttgctattgtgaatagtgccgcaataaaaggattataaatcatgctgctataaagacatatgcacacatatgtttattgcggcaagatgtatatttttaaaattgaacatctatgactaggttccagatactccactatatattttatttactttttattatagtataatttatataaagaacctgaatcctaagtgtaaagtgcgattaatatttcctgtgaatatatttgagtaaccaccagtcagataaaaaatataatattccattatcctctctcagttacaggcccccctcaagtaaccactattctgactcttattattagaaattaatactgcctgttgttgaatttcatagtcttttgctgaatgttgtgactgtgacatcctttagtgtggtcgcatgtgtcagtattcattttttttcaactgtatgtcatattcctttgtctactataatttctcttctgtaaattgacatttgggctgctttctatttgtgggtattgggtattatgaaaacagctgccgtgaacatgcctgtgcatggttttgggtggacgttagaactcatttctttggggctataaatacagcctattttttattttaatatactgctcttgaatagtttaataaatatgtgtacatggtcttaacaaaatgtcaaaagaatatactctgagctaggaaaagaagagcaaacaagtcaaagcaggaagatggcagggaataacaaaggtgatagccaaaataaatgaaataaagaatagaaaaacaatcacggaaatccgcaagatgaaaagcttgttatttgaaaagagcaacaaaattcaccaatctttagctgagctgaccaagaaaaaaggaagaagactcaattactaaaatcataattgaaagattcaacacaatcatatcacaagagaccttacagaaataaaaaggattataaaagaatacgatgaacaattgaaagccatcaaattgataacctagattaaatggataaattccttaaaaggtacaaagtactaaaattgactccaagaagatatagaaaatccaaatagacctacagaagtaaaaagattgagttagtaatcaaacttcccacatacacctactatgtacccacacaaattaaaaatttaggctgggcgcagtggctcatacctgtaatcccagcactttgggtggccaaggcgagtggatcacctgaggtcaagagttcaagaccagcctggccaaggtgatgaaaccccgtctctactaaaaatacaaaaattagctgggtgtggtggcgggaacctgtaatcccatctactcgggaggctgaggcagaagaatcatttgagactggaaggcagaggttgcagtgagccaagatcatgccaatgcactccagcctgggcaacaagagcaaaactccatcacaaataataataataataataatatattttaaaatttaaaacttcctacaataaaagctcaaacctggggggctttactgatgaattctaccaaatatttttaaaagaattaattctaattttttaccaacttccagtcttctcttccaacgaatggaagaggtggaatacttccccacttgttctatgaagctagcattaccctatactaaaccagacaaagacatcatgagaaaactacaggccagtatctgatgaatatagatgtaagaccctcaacaaacactagcaaactgaatccaacagcatataaaaaggattatacaccatggctaagtaggatttatctcaggaatgcaagataggctgcatacctgaaaatcaattgttgtaccatattaataaaataaaggacaaaacccatacaatcatcttagtagatgcaaagaaaagcatttaataaaatctaataacgcttcctgataaaaacactcaacaaaccttttaggaaataagagaacttcctcaacttgacttaagggcctctatgaaaaatccacagctaatgtgacacttattagtgaaaaacagtgctttatccctaagattaggaacaagacaaaaatgtctacccttgccacttctattcaacatattaggagttctatctagggcaattaggcaaaaaaataaaacaaaagacatctaggccaggcgtggtggctcacgcctgtaatcccagcactttgggaggccaaagtggacagatcgctttgagcccaggagactgagaacaccctgagcaacatggcaaaacgccatctctacaagaaatacaaaaattagctgggcattggtggcttgtgtttgtagtcccagctacttgggaggttgaggctggagaattgcttgatcccagaaagcggaggttgtagtgagctgagatcacgctactgcactccagcctgggccacagagtaagaccctgtctcaaaaaaaaaaaaaaaaagaaaaagaagaaaagaaaagaaagcatttaaattggaaaagaagtaaaactatctctattcataggtggcataatcttgtttatagaaaaccataaggaatccacaaaaaactccattacaactaataaatgaattcagcagtgttgcatggtataagatcaacatacaagaatcaattgtgtttctatacacttacgatgagcaatctgaaaatgaaattaagaaaacaatttcatataaaatagcatcacaaagaaaaaatatttaggaataaatgtaacaaaagaaacacaagagttatacactaaaaatgacaaaacactgttgaaagaaagatataaataaatggaggatatcatatgttcatgaatcagaagacttattattaaaatagcaatactccccaaattgatccatagattaaatgcagttcttctcagaattctagcttgcttttttttttttttggcagaaattagcaaactgatcctaaaattcgtgtggaaattcaagggacccagtatagccaaaacaaccttgaaaaacaagaacaaaattggaggactcacacttcccaatttcaaaacttactacaaagcaaaagtagtcaagactatggggttctgacatatgatagacatatagatcaatgaaattgggttaagagtccaaaaataaatcttcatatttatagtcaattgatttttgacaagagtgccaaaacaattcaatgggggaaaatagaattttcaataaatggtgttgggacaactgggtatccacactcaaaagaatgaagttggaccctatattacactgtatacaaaaactaactcaaatagatcaaagacctaaatgtaagagctaaaactataaaattgttacataaaattatagaggtaatcatcatagacttagaaaaggcagtggtttcttagatatgacacactcgaaagtatgagtaacaagaaaaaaatagataactggacttcagtaaaattaaaacttttgtgatttataggacaccatcaaaaaaatgaaaaggcaacacacaaaatgggagaaaatatttgcaaatcaaaaacctaataggggacttgtatctggaatatatattttaaaatcttacaactcagtaataaaaagacaaataactcagttttttaaaaggcaaaagatcagaatagacatttctccaaagaagatacagccataagaccatgaagatgttcagcatcattagccgtcagggagatgcatattaaaatcacaattaaataccacttgatacccacgaagatggatataataaaaaagacaggtaataaagtgttggcaagaataaaatggagtcttcagacactgctggtgggaatgtaaaattgtgcagccaccgttgaaaacaacttgctgattcctctaaaagttaaacagaggctgggcgctcggcggctcacgcctataatctcagcactttgggaggctgaggtgggcagatcatttgaggccaggagttcgagaccagcctggccaagatggtgaaaccctgtctctactaaaaatacaaaaattagccaggtgtggtggcaggtgcctgtagtccccgctacttgggaggctgagtcagaagaattgcttgaacccaggaggtggaggttgcagtgagccgagatcgtgtcattgcactccagcctgaacaactccatgtcaaaaaaaaaaaaaagttaaacagacagttaccatacaagccagcaaatgtactctgaggtatgtacccaagaaaagtaaaacttaaaacttgtatacacatactcatagcagcgttggtaagtcacaatagctcaaaagcagaaacaatccaaatgtttatcagttgatgaatggataaaattcaccaatggaatattatttagcaataaaaaggaatgaagtactgatgctacaatatgataaacttaaaaacatcatgctaaacagcagacccagggttagaacacaggcagtctgtttctggattctatgtagttctatcctatattgcttggttttccagggttagaacacaggcagtctgtttctggattctatatagttctatcctgtattgcttggttttccagggttagaacacaggcagtctgtttctggattctatgtagttctatcctgtattgcttggttttccagggttagaacacaggcagtctgtttctggattctatgtagttctatcctatattgcttggttttcacagtcacctcattgcttaggagcgttttcatcactcttgactgtttaagagctctttagtcaatttcctttcaccataacctcttgattcctgtgttgtgccaacagaatcagcaaagtacaaaggaaagctgtcagtgcaattcacagcctgctaagttctcacgacctggacccacgctgtgtcaaaccagaggtgaaggtcaaaatcgccgccctttacctacctttagttggcatcattttggatgctttgccacagctctgtgactttacaggtaatggcccttctgttttctttcttggattgttgggggcccctgccaaatgccccatccgaatgagatctctgtcattcgttccagtgctgatatgttcatatgagcaattcttcacaaaaatggtctccaaacctctttaacactggccccaatcagttaaaaaaacaaaaaaagtcacatagccccatatgtgttttttgtttagaaattatttacttgtttcttcattcattcatttattcattcattgatctgctagtatggaatgaactttataaaccatacaccacaaaggatgaaataataacaagattactgcctttggagatcgtgctctaacaccttgaaataaaggtgttccttcccttttcttttatgaatatgtaagcaaaaaagcggtctcaaatgaacccaactaattgctccatgcaaaaaaaaaatcatggcatatgtcaatattagaaaattctatcatagcagagaaatattgcccttggcactaagtgactaattttgaggttaatatgtctagattagcaacaagatgaaaggataagttgtcttaaaggggttttgtgaaaccccagaatctatttacaaattacattgtggattaaggaatgtagagggaaaaaaatcctcccaaatagaagaacttcttatgttgacctgagaaaggcagtccattggcctaccctctccacagcgtacgtgtgtgtgcacgtgtgtgcgcgcgtgcacacacacacacacacaattcctatcccatcagagtagttcttgcttttcctccagctcaagggaagttttggaaatgtccatgctgctctcttggcagctgaagggtgctgggatctgggcaatgcttccctgagccagcctctttatagtcagtcatccttgaaatcttggaaccatccaggttttcccacctcctccaaatggaaagtgtcatgtgtgactaaattgtttataatactattacggtgacaagtatttagttcatgaaaatgggaccaaacgcctatagtctttaattcatacaaatcataaaatgaaaagcaagtattcctgtggaagtaattctctcctttcttgaaaaaaatcctctagcaaactgctaatggagtaactcagaagagaaaggttgagacaggggttagggtttgtagagttctgttggggccagagtgcaaggaaatgatagaaacaagctcagcacacagggctgagcaagctgcaccatgaggtcagcagcttcctctagcagcgcctgattgcgcggaattgaaaatggagttgtttttaacatttacagacataatgcagagcatggcatgtgacttgtagcccattttgagaatccttgatggcaagtttctaaaaagttccatttcaagagcttgcttgttcccaaagccaggaaccactttagcacacattatccgaagttttcttgtcaattagaatattccgtatcagtgactcggaatcagaacttttcaacatttggtctccaagccttttaaacctcaaagacttctttgtatatgcgttgaactttatgatcatgatgtagctgatgagagaaaaaaacagtgaaaagtattttattgttataggttacacagtacatctattaaatatggaatctttaggttgataaactcataagaatacagtctttcaaaaagatgcatctgaattcagattccagccccatttattaatataagtgacctttgaaaggctcaacctttccgtgccttcctttcctctgtaaactataaaaatgtgataacgatgtctaccttttaggtttacgataaaggtgaaactagagaacttctataaaagcattttgcacagcacatgtttgtatctttcccgatttttcttgtaactataaccctatggcaattaaggggaaataagaatgtgtctctatgttagttgtgataatgttatcaggtcttgcataatttccatgtgctgtttatttaaccatttgtttaaaatcccaatggccttaataagtatttctaaaaattgggttttggctcggtgtggtggctcacccctgtaatcccagcactttgggaggccaaggtggacagatcacttgaggccaggggttcaagaccagcctggccaacatggcgaaaccctgtctccactaaaaatacaaaagttagccaggcgtggtggcgcacctgtaatcccagctactcgggaggctgaggtaggaggatggaggggcagagattgcagtgagcggagatggcgccactgcactccagcctggatgatagtgtgagactttgtctaaaaataaataaataaataaataataagaactgggttttgttttcacaactttagtagaagaaatgttatttacactcaaatttttctaaataattgaaggcccagatggctgtaatgtcaacaggtctagaaaaacatgaatttttaggaaaacatgagtgaatcaatcagttgtgaatgttttaccacacttttcccagaactgcttgaaatattaatagtttttgattgtatactggtagcattcttaaaaaccagacttttaaacggtttatcgtttttttgcttgcatacatctagacctatctataaatatgggtatgtctatattacatagatacaataaattgacattcattttaaacatttgaaatatgacaaattattgctgaacttgtgataatagcttattattctatataaggtagttgcttaattctgtaattgtaggtgtcttctatttggtcattatttaaaataatgccaattattagaatagagaatgaagtttaaaaaattatgttacaggaaacaattatggaaggtttgaaaactttttgttcacacaatttgaaaaattaatttctagcctaatcttgtgctagacattgtctcttagcctgctgtgttttcctataggtgatagcagatacataatgctaaacatcaggtttgaaattactgtgctgactttagtgactgagaagtatcagtctcttattgggtaggggacatggggaaatgtcatgtttgacttgacatcacaaacgatgttttcattgcagttgcagatactcgcagataccgcaccagtggctcggatgaagaacaagaaggagccggtgccattaaccagaatgtggctctggccatagcagggaataatttcaatttgaaaacaagtggaatagtgctgtcttccttggtatgttggtgcacatgtgtctggttgatttttcatttcatgtcttctgtcttctgttttgttttgtttgtttgtttgttttgagacagagtctcactctgttgcacaggctggagtgcagtggcgcaatctcagttcactgcaacctccgcctcccgggttcttcatgcctcagcctcctgattagctgggattacaggcgtgcaccaccacacctggctaattttttttgtatcttttagtagagacggggtttcgccatgttggccaggctggtctcaaactcccaacctcagatggtacacccacctcagcctcccaaagtgctgggattacaggcgtgagccactgtgcccagcctcttctgtcatcttctgatgggagaactcagcttagagcaggcattgattatttccgcctcattttgctggaaagaatcattgtgaggctggcagctgaggtgcacacaagtcagaaagggttctggcaacagcaagagatgtgcagatcaaattcaggcagtcccagtggtgctgagttcaagttcaagaaaccggaaaagaggaaaacttgggaaatctgaaatccttgcaaaggagatcaaaccaaggctctctgagggtggaggcttaggctgtgttcagtctatgtgtgtgtaattcatacagtgtaatgcctccaaaaaaaaagactgaaggaggctggtagcttagcgtaagggcttcttaaacaagactgcagcttttctaggaccccagggagcctaaggagggttgtttggctctgtccttttgcatggactctgtgggctcaaagaggggctcctctgggaatgtatcctctgattcagttgaggtgggattcatctctgttcattgatgagctctgactatcccttgtgaagacagcactgcatcctccaatgtcatttactttcacatttcaatgtagggtatagatgtgcagagaatttaactttcttctcccgtgagaaagcagcatcctgacctaactcttcttgctggatgactttcttgtcttccttcctgcacttagcaagctccatcaccatgaggattggggggacagtgaggcaggaagatgagacagagaaaagacatttgagatttgacatcaccgatcttactgttggagaaatattgtgtgacctcctccacctttctaatatccgtcttaccaaagttagctgcttgaggtggtatatgccttttacattatttgcctctaagggaaaaactcaaaagcccaaagttcacctgttagaacatagtccttgtgaggttgtatctcaagatttcctttattcttgtcaacaaactcagaataactaaagttaaagttgctttataacctctattatttccatccaaaactaacatttccctcccatacccacaaattcctcattgcaatttcaccagtacattccactggatattagctacgctgcatgaaccaagggtgcagcctcattgttgttgtttgtgttgatgagatgagtaacagagagtgcgctcagcactttaaaatgaatacttgtggccaaaatattaaagcaaatagcctgaacccccacaccccagccccaggcaaacataaattatggttaaacttccattacagagaactccacaaacatggatttgattaatttgctgagcagttcatgacccttatgttatactttgcactatgtaacaaagaagctaaatcttgaacagcaagcttattcatggcacccagccagtttccttctcccctgtaagtctaaccctctgctgcccagcacgaaggagaaatacttggagatcttagcagcatgaaagcctctttgtatcactgggattgcagcacgcatgatcaaggcccaggggtgatcaccaggccacactgctcctaagacagaggtactcagatacgtggctgaaagcctagctcaaatactgccccaggtgagcctctttgctgagtagcgctactcaaagaacacagcttcccctgcctagggaaggcagggctactggcaatagatctccagcctagcagtgatgtacagtcatggtattttaagagaacactttgaatttttctgttgcttgactgttaagcctcaaatttttctgttgcttgacttcttccctggcctccatcccccaatctgcctcccttcagccctataagcagtacaacatgctgaacgcggacactactcgcaacctcatgatctgcttcctctggatcatgaaaaatgctgatcagagcctcattaggaagtggattgctgacctgccatcaacgcagctcaacaggattttagatctacttttcatctgtgtgttatgttttgagtataaggtaagtctggagtggcacaactttataccagctcttatctctcaattgcaattctgtcttcttactcatcccctttgtttgggccatggaggcatcattaatttttctcatttctgtattcaaatccataacccatttgtaggtatagatatgatcatttcacagggaaaggatctctgccttctgcagagagaaccccatttctgttgacagagttttggcccataggatgctccagagcagcatctcagtgaagcacatgtcaaacttagctggcatcactgtggagtgtactgttttggtaactctccccatcaacggagatctcaccaaaggacatgtcctcctacctctgtcttgtccagggaaaacagagttctgacaaagtcagtacccaagtcctgcagaagtcaagggatgtcaaggcccggctggaagaggctttgctccgtggggaaggggccagaggggagatgatgcgccgccgggctccaggtgtgttggactggcccttccctgctctctgtcaagcagtttttcactgtttgtggggaggaatgtcctcccaacatgattagacaccattactttcttgagatatttacggtagtgtcagagacagcggattctgggagtctgtgtgtgacatttgtgttagccctgtgcctgtgagggaaagcgctgttctacaattgtaggaaccctgaaaacagcaccaaatgacatcttttaattaaaactcgttgatggtaaaaggtcacctctaagaatgtcagtcatggatgaggtggaaggtgtttccctcaaggctgaggcctttctatgtgacctttggctagtctatccggagcatggtcaagaaactgaacagttctggccccaagatcatcttctcgatcattcagggcactattagaatggaaccagttccctgaaatggcttcagagtgtcccagtcattcaaggattccaccacaggaggaatgatctcaaaaaggctgagcttgaatagaatgaaatccccaggtaccctcagtcttattcaccatgctcaaagtaaaacagagtgacagcttattgtattcgaagggacacagtggcagggaacttggagggagctcatagttttcagtggtggtcaggcaccctcatttgacacccatactttcatacccaataattcagtaagcccccagagtttcacaggaatcctctgctcatgagaaatgtctctctgacactcagaaaggcagaggttcttcttatattctagtctatcaatcaaagagcgggccaacttggacataggtgtggcgactttgtctcctaccagcaacctgcatggactctaattagcccgagaaatggtgctgaggcttctcagttgagcttgttatgaacttctggttatcttggagggtttcatgctaatcaaattcctatcatgcatttcttaactcctagggaacgaccgatttccaggcctaaatgaaaatttgagatggaagaaagagcagacacattggcggcaagctaatgagaagctagataagtgagtcactcggcaactttctgctacttttacctaaagtccaaaactatttttcccaggctgcttgtattactgaaacaactgcatccttccaagggttagaaaatgaaacatcattatctgtgtaaatacaattcatccagggacccaggataatcaaaggtatagggagttgtggtttccagctcttaaaaatttgtcacattgataagcatgtaaagaaaactaatatttctttagcaacctcagatggcttaataaaagcagctgattttgcagggagggtagcagggaaatagagaaagcaggacacggtgcctaggaccgtatactttcaaatcgatatttcctttctggaaatatgtacaagatatacattcagatatatttatgtcagtgctacttaaagttgttttttaaaattgaaaacattctaaatgctccagaatagaaaaatatatttaaaagttggattgccatcaaaatgttttaaaatcatcttaatgacatggggaaatgcttatgacataatgttaaatgaacaaaggcagggtagacacttggttttctagtagtgtgtggctcacgcctgtaatcccagcactttgggaggctgaggccggtggaacacctgaggtcagtagttcgagactagcctggccaacatggtgaaaccccgtctctacaaaaaatagaaaaattagctgggcatgatggcagatgcctgtaatcccagctactcaggaggctgaggaggaagagtcgcttgaacccgggaggcagaggttgcagtgagccaagatcgtgccattgcactccagcctgggtgacagagcaagactccatctcaaaaaaaaaaaaaaaaaaagaacctcaaatctctgatgacatatagtcaatgtattttttaaaggctagaaggaaatttaccaaaatattaattgcggttttctttgggtgctgggaatatcggtaattgatgttttctcttttatactttgctatgtttcctacagtagatgtgtattataatatatattgttaccagaaaaaaaattataaagaaatgaaagaataaaaaaacctgtttggatcaaaatctatgctatagatgaatagatatattgacgtgtattgctatatatgcaacaatttagacatatgaaagctaaaagtatatatgtttgactagatagcacatgtttccgataccgtttagccacaggtagcctaatgagtcccagggtttgctgagcaaaatgtcgtagagctaaaatcacccctcacacacagttgacaaggtaggataccccatgggtgatgaagcacccatcaaagggggtatggggcagacttgattagcagtgctgttttgtaaataaatgtgagttaatatctttattgttaccacaagaatgaatcattctggttaacttatgggactttggggagtcacatttattttaaaacattaaagaaataagtatatttttattatagatgtgacttggaaacccagttgttggtatcatgcctatttgctttgggtatgttattcttgcactaaattccctggactgatttataaaatacttggatcggagagtccatacattctacttcgggcaatgaacaacaactacaaaatatgcatgccgtgggtgctacagaattgcttaggtggtttagctcatctactctactagattaaaagaagacccctaagtaggcctgttttgcctgggctgtgtaaactggtgttttggaaaacctttcccttttgcttgcaggagcaacacaatattggtccttaccacgcatggcctaccggtttgctctaggttagttctcagccctgcgctacctggtgggctgctggttgtcagagctaatgattcacatctacaaattctcaggggctttgtgctttttttttttttttaaaagggaaaccatagtaaaattataactgttcaacctacctacctggaaaatttataattataataatggtgtctttcaccctctttctgatcatttttcgattattttggctctgtttcttttagagcaatgatcttcaacttaggctgcacattagaatcacctggggagctttaaaacctgtcagtgcccagctgcaccctagactacttcaattggaaactccagcaggacccagaaatcagtatttggtaaaacttcccaggtgattctattgccaccaaatccattgttttaaaggaatagatggtaagcttttcttttcttttttttttcttttctttttttgagacaaggtctcactctgtcacccaggctggaatacagtggcacaatcacagctcactgcagccttaccctcctggcctcaaacaatcctcccacctcagcctcccaagtagatgggactacaggtgtgtaccaccacaactgcttactttttgtattttttgtagagacagggtttcaccatgttgcccaggctggtctaaaactcctgggctcaagtgatccacctgttttaacctcccaaagtggtgggattacaggcatgagccactgcgcctggtcagatggtaaagcttttaaaaaaccagattagtgttagtgatggttgcacaatatgaatgtacttaacactactgaactgtatacttacaaatggttaagatggtaaatttttatgttaggtgtactttatcacaatacaaaaatttgggaaaaaacagattaggacactctagatttgtgctgtccaatacagtagccattagccacatgtgactatcaaatgcttgaaatatggctagttcaaattgagataataaatcaagataagtgaaaaatacgcaccagattttgaaggcttattgtgaataaaagaataaaatatttcactagtaatttttatattgcttacatggagacagtattttttatcttttaggataaacaaaatatattaaaaataatttcactttttctttacttttttaatgtggttaccacaatatataaaatgacatatgtggcccccattgtttctactagacagcattgctctaaatttaaaactaaactagcagtcaattaattaaaaaggatgataaggggccgggcacagtggctcacacctgtaatcccagcactttgggaggccgaggtaagtggatcacgaggtcaggagatcgagaccatcctggctaacgcggcgaaaccccgtctctactaaaaatacaaaaaagtagccgggcgcggtggcgggcgcctgtagtcccagctactcgggaggctgaagcaggagaatggcgtgaacccgggaagtggagcttgcggtgagccaagattgcgccactgcactctgcactccagcctgggcgacagagggagactccgtctcaaaaaaaaaaaaaaaaaaaaggatgatgaggttaaaatggtaaatttgatgttatgtgtactttatcacgatataaaaatttgatggctcatgcctgtggtcccagatactcaggaggctaaggcagagcatcacttgagcccaggagttcgaggcttcagtgagctatgatagtgccactgcactctagcctgggtgatagagcaagaccctgtctctaaggaaaaaaaaaaaaaaaaacttttagatttcatttattttacacatatattatcacttggaaaatgagaaaaagtgtcaagtggcttgggaccagagagcctatcctaaacatgaaaacaagtaaaacacacagaagtacttattttttgagtcctcagtggtatgtaagcagctgcagtgcccccattattaggttaatgggacgcaagaacaggtaagtggtaaccctggcccaggacatatgagctgatataatgataccccaaccccatggtaacatcttggctactgaggcatcttggtaaagtcaattcttcatacctccctttccttgcaactagatttggatgatgatacaaaatatccctttacagcttcacttagatttcataagaatggatgggctagcaaaaaaaaccattctgattccttaaagtgaaacctaatagaggagcgagcaccaggcaatttcccattccctagtgggcaatgaccagtaatgtccggcaggatattagatcacctgccctacaggaatacagtcttgtttcccaatggaaaaggacgaaagaccccacgcacttggctgagcaacctcaaggtgatctttgggaagttaagaggctgactctcccctgacttggctctgaagctccaccctttcctaacccagccgcatcactgccaagttcacatcacatccagtctcactctctctcgcatgttgcaggggcttccccttactcagatctagcaatggttttcatgcgtgaaatacagccatggccctgaggctttaggcaacaatctgagaggggagcttaattgctagtagcaactaataactgcttctctacccatagtgttatttttataattgtcctcatcattattaataatagtggggatgaggatgaccaggaaaccttacctagacagttgtttcgacaagacatgaatcacagaaggcacctgcactgtagttactcagggccagttgctctgttttcatttcaaggttgactattttggagatttctttacaccttggtgtatagattgccatcatgggaacctggccaggtttgacatgcgctttaatttgacctcttgttgtttcctagaacaaaggccgagttagatcaagaagccttgatcagtggcaatctggctacagaagcacatttaatcatcctggatatgcaggaaaacattatccaggtgaggaaaacaaacacccaatctgatttgttggccatgaatatgtttactagaataaggacttctttatgcaaaattgtgaaagacataaatgtgatcccatagtaccttttttaaaaaaatgaagttgagaagtttactatttacaacagtgtctaccttataaattccagagataccaaacattcttctggcttctttgacttagggcttacttggagagggttaggtgtttggccagctgaccctcttggttaaatctgtgtgagtatgtaccaagtttataatatggatgttgggtttatcgtttagtatctagaacagtagtggtaagtagaattttttctgatgggtcaactccagttgaatgatggtcactgtctgatatgggagctatgattatgactaggctaggtaaaaagagtgctaaatttgacaaatgatgtcttctttggacttaaatttgttaaggaaagtcatttgtaccatgaatttgccatccctgctgtagaaaaatatagctttgtgaactttgtaccatactaattttatcttctatgtgattatttccacaaattcccaagctgtctaggtaataatgagtttttaattaccctgaaaaatgagttcttacatgtttccattgagaagtcattcattagagtaggtccaggattgcttttagggctagaagaaatatcgttgaaacacagtgaaatcttaattctctaacttttgaattgtctaaaatcaaagtaatcatcatacaaaaataaacacaaaaagtatgtgatatttttgttgactttaatatctttgataacttaaatgcttggtatcacatttaccttatctttatatagcacaatattaggtgccaaatatctatactagcccccaaatatatttgcagttttcaaagaaagctgaaaccttttgttattatccttggtgttgttagtccttctgtaggtgataaacaagcttctatttagaaacattgctgccaccaagcagcccctgttgtactgggaagcccacaattgtgttttgcatcccataaggaaagctatgtcttgtatacaaagaaagaactttccaaaagatgtgacccaggatgagggagatgggccttataccttcatttaggaacccagaattaggtataaatcccaaactcattggaagcattgaaataaagccatttggaaataggtcttcagttcccatggttaatggatgatacccatggtggctcaccaaactcttaagactcaccactggacatggaacatcagcattactgagctaattgtcaggaacatccagttcattggcacagtgcagggattcaatgatgctgttcttccattcccccaggcgagctcggctctggactgtaaagacagcctgctgggaggtgttctgagggtgctggtgaattctctgaactgtgatcagagtaccacctacctgactcactgctttgcaacactccgtgctctcatcgccaaggtaaacttgggatgcttgttttcttcctcttaattaagagtaagattctcatctagcttcatacttctctcttcaggtggaccaaaagtcacagagcatattaagtggcatcacagtaaaggtcttaagtcttcctaggaagaaagcagatgccctgattctgtgggaagccaccatggagaggaaaagcagtggctcccatatttgaagtgtggacctaactctagaagtttaaaatggccattcgctgaaggtctatgacatgagaacagagatcaactgagtgacttagcaatttcactctttctctgtaatacctctgctgagtgagattaaatcctctatgtgacgcccattagtcttacaaaatgtcatgccataaaatgccaggaaggtcagaaatgaatttctcacggcctgaggaatgaggattatcctggggtaacatgcagattatttttccctttatttatttatttatttatttttgagactgagtctcgctctatcgcccaggctggagtgcagtggtaccatctcagctcactgcagcctctgcgccctgggctcaagcgattctcatgcctcagcctcctgagtattgggattataggcgtgtgccaccgcacccagctaatttttgtattattagtagagacagggtttcaccatgttggccaggctggtcttgaactcctgacctcaagtgatccacctgcctcagcctcccaaagcactgggattacaggcgtgagcccccgttcctggcctatttttccctttattgaagatctcaattggtgccttctacatggggtcttttaaatttaaaaagtaaaattcttctgctcatccttctcaggaccattttctctttcttcatcaccagtaatttcccaggaacccaagaaactcaggtttccttccatcatagttgtgatttcaccagtgaatgcgacctggctcacagtgcagttgataacacagctctgacccttttagctggacagttcattattaaatctcaagtctactccattgcttaaatccatcttctgattcacatagctcattatctttatggaataatgcattaactcttctaggctttttgcttgtccaaatggacatttgcatatttcaacggtccagaaagtgtatcaaactgccaagtgatgcctaatggccctttatgtctctcctagtttggagacttactctttgaagaggaggtggaacagtgtttcgacctatgtcaccaagtcctgcaccactgcagcagcagcatggatgtcacccggagccaagcctgtgccaccctttacctcctcatgaggttcagttttggagccaccagtgtaagagttcaaaccagctgagtgacctggaatcagtagagaaaaattgatgtaaagcatcagctgcgaaaaaaaataaggaaattttgcagtattgcagtttacttctgtcctgtgagaaagaaacaattgagtatgtagatagatagcagcttccattttaatttgcatctaaaagtgaattcatcagataaatgcagtggtctctatcagtgtgtttctaaaatagacagccaggggccaggaacgatggctttcacctataatcccagcactttgggaggccgaggtgagtggatcatttgaagtcaggagttcaagactagcctggccagcatggtgaaatcctgtctctactataaatacaaaaatagccagatgtgttggcgcatgcctgtaatccaagctacttgggaggctgaggcaggagaattgcttgaacctgggaggcagatattgcagtgagccgagattgccccatttcactccagcctggacaacagagtgagacttcatttcaaaaaataataataataaaataaaataaccaggtgcagtggctcatgtctgtaatcctagcacttcgggaggccaaggcaggcagatcagatgaggccaggagtccaagactagcctggccaacatggtgaaacccccgtctctacaatacaaaaaattagccgggtgtggtggcacacacgcccgtaatcttagctactggggaggctgaggcacgagaatcgcttgaacccaggaggcagaggttgtagtgagccaagattgtgccactgtattccagcctgagaccctgtctcaaaaaaaaaaaaagaaagaaagaaatggaagagtattttagattaaaagttatcatctgtgggggaaaaaatacaatagacaggttagaattcagaagagtgtttcctgtttctaaattctgactagctagtgccagaatgacctgtggaagaggattttaaatgatcggtgtcatctaacctgagttttattttaatattttatttatttatttattgagacagtgtcttgctctgtcacccaggctggagtgtagtggcactatcagagctcactgcagccttcaactcctgggctcaaatgatcctcctacttcagcctcccatgtagtaactgggattacaggcacgagccaccttacccagctaattttttttgcatttttgttgagacagggtcttgctgcatgcccaggctggtctagaacacctgagctcaagtgatcttccctcctcagccccccaaagtactgagattataggcatgagccatcctgcctagccaagacttgagttttattcaaagctacgaagactttggagttcagctttattatagaacagtcaagtttgctttagtttgtctagattttgataccttctttggaatttccatttgtggccatgttaataagtatgctcaagtgatatataaagataaattggcccatggaaaaaagtcagcctcctccaaatgtattagggatgattatttaaaagacattcctcaggggaccttgaggtagccatgtttttccatgggcctgtaaagaaagaagaaacaaaaccttgttgcttacccggagttcaaaatctcagaaatgctggccacagaagtcccctgatttatttatttagagacagggtctcgctctgtcaccgtggctggagtgcagtggcgagatcttggcccactgcaacctctgcctaccaggtttaagcaattctcctgcctcagcctctcgagtagctggaattacaggtgtccaccaccatgcccagctaatttttgtatttttagtagaggcggggttttgctgtgttgcccaggctgatcttgaactcctgagctcaagtgatccaccctccttggcctcccaaagtgctgggaggctgagccagaagtccctttcttttaataaagtttaaataaagtcccaagaagaaactcttggcacaaaaggatatactgtattcttggacccaactttataagaatcttccagcttgcagcacaaaggcagcccagtcctcaatgaaaatttaaagggagcctgacagatttatgtgagagcaatgtccatttaaaccatttaaacaacaatatgaatgttgtgcaaagtgtagctcccatttcattgagagaagaggaaataattaagacggggcaaaggaaacactgaggagttgtttgtgtctggccatgctgctttcagttatctactgctaagtgtgtcttatttacttcatcttttttttttttttcactgatgcagaattttgcaagagtaaagatgcaagtaaccatgtccctggcatctttggtgggaagagcaccagactttaatgaagagcacctgagaagatccttgaggacaattttggcctattcagaagaggacacagccatgcagatgactccttttcccacccaggtacaccgaagcacataccttgtctcatgcatgagtttgggatctgccaactattgtgtatgtatgtatgtacatatatacacaatttatatataaatatataacatttgcaagtatttattgtccaatatgcatgtgctctcagcactctgagaggttttaaaaagaaatacatccatcactgtccccagtctcaatatgctaacagtctatttggagtgctcagtctcaaaacaattaggaggcagtacaagacaagtgatacataagtgcaaactgtgtggtaaggagctaaatgctatggaaggttagaggaagagaggtcgtgatcaataaacaatctggtggccaggaaagcctgcagggagggatgacactaaaggctggggtaggattccgctaggcaggggaaaagtgagggggaaattgtgagtagttgaaacaatgaattgtttgtatctgtagggatggtaaagggaccagcttgtctggtgaggggtaaggaagggccgagtttgagagagcttgtaaacaaggttgtcctaaggaaatgtgtaaggacagtcatctcttccatgtccattacgatgaccgtggaactctagcctgtcccatttgtcttttaactccagctcctagcctgctctatggtagggtcttaattaagtgagaatgaatgaatgaatgttttcttttattcccttagtctgagaaccctatttccggagtctgttttgccctctcgggcaatgttgcatcctcattctcagaatctttttcctctcctctacatcaaatcgttcctctctcatttcatcttgaccatactcctttagttccatcatttatatagaggtattcaccaacaagaccaatcaaactatgggcagtttaataaaggtcttcagtgccttcacccaatgaaatgactctagtggtagaaattttaggagccctggcaagctggcagaggggaacggggataagacaacattctgtggctgagttacctgccagggtctctagatcaagccatagtctctccctgtttttgtactgcaggctcccctggacctccactgttggttttataattaagaataaatgattacaagaggttctaaaatctctgaagccctgggaagatccaggaggcttctgagacatggaactcaagctgaggtcctaagctgcttcctacttggtataaaaatccctgatattccagagtagagtttagaacttttcaggttacaaataactgaaactggttcaaactaatttaaacaaaaatgttggagatagagatagtatgaggattcaggcagatttctggatctcaagggccaacacacatccaggtctcataaactcctgggctggcgaagatgaaaactacagagtcaggtctagatgactccgccatccctagtctctgctgccctctgatccaacccttcccatggcttccccttgcatttcaatgtaatcctaactcttcacctgggactacaaagctaagattattttgaggcttacactttttgcaggtggaggaacttctctgtaatctgaatagcatcttatatgacacagtgaaaatgagggaatttcaggaagatcctgagatgcttatggatctcatgtacaggtaagctttcctgacacactcaagggacaccatttgggggtcgaggatttgtcactgtggagttcttactaatgtaatgatcacagctaacatggatatagtgatttggatgatagccaaataatatatagaaattaaacattcagagtaggttaattcatatgtaagttttcagaaggatctccctaatttaaagtgaggcataataatgttattaaatataataacattattaaatataataacactatcttctacttaccacagaatcagagaaagaataattaactgttataggaattattttccatatgcttttgttccaattatattcagacatacatatatagttttactttagaaatcattttttacgcgtagtttaaaagttggtcttccagtccttgttcaggagaaattacttacagaggcaaaattgttctgatgcaacatcatacaaagggcagtacttttgtcttctgttttattttgagagaaaggaaagaaaaggcagaaatttgcctgagagccattaaaatagacatcatgttatcaggtattttttccccataaggcttttactaagtactatttcttggaggtcagcacagcttaaacatggaataaaaatagttggactaataaatgttttcttctgtctcgttttctggaaatatagggcaaaatctcaggtggaggggtacagggaactcttggggagaaaaaaagaaaaggtcacacaaagtagaagaacagtgtcattaacccactgtcctcaaaactacttctcactcaatctgtcttcagaattgccaagagttaccaggcatctcctgatctgcggctgacctggctccagaacatggcagagaaacacaccaagaagaagtgctacacggaggctgccatgtgcctggtgcacgccgctgcgttagtggctgagtatctgagcatgctggaggaccacagctacctgcccgtgggcagtgtcagcttccaggtagggtgtgtgcagcttttcccttagagcagtggttctcaactggggcgattttgtcccccagccccagggacatttggcaatgtctagatacatttttggttatcacaactgggatgggtgagtaggtgctactggcatctgactggtagaagccaggatgctgtgaaacattctgcaataggagagctcccctgacaaagaattgtctggccccaaatgtctgtagtgctaaggttgaaaaattccaagttcatacattacatttgcttcttctaattgctttcccatcgtcgttgggttttttttaaattactgtttacaataatggcacctagccattattaatagcactttaggagacatttgcaaacactttcacatgcatggcttcatttgaacctccccgtaaagctgtgaggcaggtaggtagggaaggcggttattattcccacttcgcggatgagagaactgagagagcaagttttctaaggtcacttaaactctttttcaaagacttgtagttgacacagtatactgacattgtgaaagtttggaaaacattggataaatgattttcctcctggcccattcatttgattccactcttcaactttataggggcccactctccaatccaaaaatcaagaaagaatcaaattgacctgagaagggagacaaaaggctgaatcagtaccttcttaggataagctgaaaattacccacatttggcaaagggaaattgtctgccagacctaaaagctggctcggatggggatgctcagtggccacttaaagtgttcttactgaatagtttaatagtctttagagagagagaaaataaaaaagcacaatgttgggtactttttttgtaagagacatagtttgtagagatgaccatccctgaaaccatgaacaatatagctacagtaatagagtgtttttcaagccagactcacgaagtcatttacaagggtttgtattattcttgtttgaatttacatggctgattttatgaaaagctttgttcttgttattgttcttcaacacaattttgtgatgttgtatgaaccagaaagaaagaacaattcaaagtagcttccccaggcttagagaataagtcactgaaactatgctggtgcagccaagagcttctggttttccagaacacagcaaagctgggtattgcctcctatgaataactcctcctttcttatggtcctcaagaacaaaaatagtcattctgtgatttcatgcttggcaaatgaattttcttcttaattcagaaatgtttgttataaaagctgataattaaatctcatccaaaagcataaaaataacacctgatttcaaatcacatagaagtgtacaagaaagttataaaagttattttagatgtatttgcttcttttctcaaatttattttgaccatgtgatactatcaaaaataaatattatagtactactctttcaattcccaggaaattgtaaggtttagcacttcatattgtttcatttactaaattattttatacttcttttattccttttcccatgactatattttattttatatttatcacttaaatatcaattgcatttcattattgacttttatatttagtaagccttactgttctaattttacctagaattcagttgatttgctaataatgacatgccaaagtgaatcattattacacaatcaacagaaatattccacattattccgacatgggggcatacagctctatctgttcacatatatttatccattgattccttcttttagagaatatttattgaatacttattctgtcctcatgaacgttacattctaaccagagagacgtaatataactaattattccaatctttgttcagttataattatgagaaatactgttataaagaggcacaagatattgtgagcatttatggtccaggccctgtgggtcagggaagggtgaagaaggtgaaaaggaaggcagaagaaactgaagtgtgagggcttcttgatgtagaggaggcaatgagttaggtgttgtcagctacagaagagaagccaaattatattaatgtgtatgagtgaattcttacttctctcaaatgggacataccaaatcaatttggaaatgtagctggcaagtgaaaggacacccaacccagactgacagaaggtaaaaatggaatttatcagcccgtctgaggaatgtgagcctggagtagcacctgccatactggacctaggggcccaaacaatgtcagcagagctcactgtcatcaccacttcccatctctgccatctgttgtgtcagcttcattcttcacaggcttcccacaccacagtttaggtttacatctctaggttcaagtctaggagagaagagagatgcctcctttctagcagttgcagagaaagcctcagtgcatcttactgatcctgtctgaacatctgatcctgtgctcatccctgaaccagccatactggccagagaaatggagtgctctgatttactgaccccgggtcatgggtccacacctggaattatgggtgatttcttcccctaaatcaggatgccttactttatagaaggaggaaagaattctagacagcattaacaacagatgtccagtgttgattttgcaaatgctctgtgctttaattttcaaccttgttctgctccaatgaaatagagcttttggaaaagatttataaactagagataaataaatatgtgcaaggaaaataactttgaggtcactgaattccaggaaactgagatcactgaaattctgtgtcccagagtgcaatatttatttcacaactgtagatacggacacattcttagatactgctgttacttgtacctccctgatcctgaagccaagaaagtctgcagaatccttttcctctgactacagctaatgaggctacatagcttcaaatctgttcctctaatgtggaaaattgcatacattctaatagtattagtatcttgggttattaaatgctttcaactgaatttcttggatcttctgttgtcacagaaacatcataatacatagggcaggtttggaagaaagactggccacaaaggctttgagagcctcctcctatattcctaaaactacgttacagtattgcatgtgaagagatagggctatctatgacaactatgtcctgactgattgctaaggttgattcacatgatcttgctaaccaggccagaaggcagacagcttttagttcacaagccaactctgatcagttagtagtggctgactggagaactatgcttaagaatttcgagactatgtccaagctctggggaaaaagtgctacagttgattagttatgcctgccatgattacagcaataggaaggagtggcatgtgtgccacctgtttgtaatccctaaactgggaaggtttcccatttcttctgtttttcatatgcatttcttccatagctgtgagctaggaagaaaatgattcttgacctgtcacatattcactgccagggccagtgctagggtgaagaggcactcaccctcagggtcgagcgggtacaagatcagtacttccatggccctaaaagcgagtacctctctaaattttgtcttgggtttctcatttggttcaccccaaccatggtctctgcatgctctgctagaggctctaaacgcaatagtttatgtaaaggaaacaaatgcatggaaacaaaatgttcaggaagaacaaaaacacacacacagtaactgctgcaatgccatgaaaacttccttaatgaagacagcctcgcttgctgttgtcgtatgtcatggctgtttatctgagtcaactccagagtagcaacatacttcagaaaaacaccactgtaagtcagaggtccactcggtgaaacagggagcctagttaatgttaattgggtctttgccttttgaaaaccaggacaccagccctatgtcccttagggttgtttcactaaagtaactcagctgttgtgacattgaggtaagtgtcctttatacaaaatctcctaatggttaaaaagaaaaacgtgaggtttgaagaccagttgctcagtgcgcctcttctaaatgaatggcagacagatactctcggggtagaattacagacctagtttagtcacggtcttggtaaggatctgcacaccagcttcctcgtttccccattcggggttcctgtggtctcttactagtctggtcgccctgttctccaggcttatactgtggtctctttcagaatatttcttccaatgtgctggaggagtctgtggtctctgaggacaccctgtcacctgacgaggatggggtgtgcgcaggccagtacttcaccgagagtggcctggtaggcctcctggagcaggccgcggagctcttcagcacggtcagtgcccagagggcatcccggggcctggcctcccatactccagctggacttggggtgctgggaacacctggtcttaatggcccagtcagccccacttcccgaggacacgtgccagggtgtgcggggcaggggatgggcccggggaggactttgatgtatgcaaattgcatgagcttcccaagggagctgagataacctttcatcacagtgccgatctgagcttcactgtatgctcattggttgggcagcagtttcacagtattatttctatttaataggggtggaactaagccacagagaggtgaaatggcctgcccagggttacacaataaatgatgaggcatgttttcactccctcgtttttcctctcagagagaaaaaaattagggaggaaccactgggaggagagaggaggaatacacagacagtgtcttccctcctagccactgtgcagtctgaaggaccatcacagaccaggaccagcttacagaaatgtgggcacagaaaccactgagactcctctggttaacgtaatctggatctaaacactcctagtatatatactagaaaaatatatagagagatgaagtcattgagattcagggcaaagaggaaacactcttgtctattttcttttctttttttgagacagagtctagctctgtcgcccaggctggaatgcagtggtgcaatcatggctcactgcagcctctacctccagggttcaagcaactctcctgcctcagcctcatgagtagctgggattacaggtgtgcaccaccacactcggccaattttttgtatttttagaggagacaggatttcaccctgttggccaggctggtctcaaactcctggcctcaagtgatctgcccatcttggcctcccaaagtgctggaactacaggtgtgagccaccacgcccaacttgttttcattttaataatctccctcctcctttacattttaagccaagaaagtattcagtactttactatatttagctgacccaattttgttttcatctatactatactcatccttattttccagtttttatttccaagtttcctctctacaattttatttattttaattattgttttaactgtcttctctctattcttgctttccttttcaagattcagaaaatgtctaatatactctcatttttcctcaaactcaacaaaatgaattagaatcctactaactctttggaggcatacatttagcatctggctagaggaggacctctgatgaaatttaaatatactaaaactgcctttctgaattgctgttagtccctgctaccaaacttctctcctgttttttcttttcgttttgttttgtttttgtttttgtttttgaggcagcgtcttgccttgtcacccaggctggagtgcagtgatgcagccttggctcactacagccttgacctcctgggctcagcctcccacctcaaccgcccaagtagctgaggctacaggagcatgctaccacacctggctgattttttaatttttttgcagagatggggtctccctatggtgtctaggatgatctgaacttctgggttcaagtgatcctcctgcctcagcctcccaaagtgctgggattacaggcatgagccactgcactcagccagtatttttttttcccccgaaagctcttctccttacttatcgccatacaggactacttagcgaggtgtctagttcagtttgaaggctaccactgtcccaaaagtgctcagataccccttcttgccctgtgaaatactgtgatacaacaataaattcactctccagcacattgtttggacaatgacctctggttgctcttcttaagtttccagtggattaaattctctctgatgctcttctcctctttccaagggaggcttatatgagacagttaatgaggtctacaagctggtcatccccatcctagaagcgcatcgagaattccggaagctgacactcactcacagcaagctgcagagagccttcgacagcatcgttaacaaggtagccggggagcctggctggcaggtcttgttacctggtggcaggcgaccctgtcctacagatgcttagccatccttcctctccagggagtgatttatctttagcacattgcttttgctctcacctgtcaaacagaaaagggctgaaattcttctaacagaggaccaaaattccatatgtgaaaacatacagcttaaattactttataaccaggaaatgtgagaaatttttaagtgtaattaaaagaagtcccagaaatctttcatgggattccttttgttgttatttctgaagtttattccataagcattaaatttttttaaggagtaatttctgtttacatcagccataggagtaaaatgctttgttaacacaatgagagacccctgccctttgcaactcagtggctcctcaggatgacataactaaggagagctttttatattttgttcctcaggatcataagagaatgtttggaacctacttccgagttggtttctttggatccaaatttggggatttggatgaacaggagtttgtctacaaagagcctgcaattaccaagcttcctgagatctcacatagactagaggtaagaaaagtgattctgtgcgcctgacctggtacactttacaaaaacaagttagagtgggtcatcaccaaaaataaacaaataaagagttatggattcatcattgatctctacataaagttttcccctttgcatttataaaaggcaaagtagaaaggtattaggtgagatcatgaggtgatgtaatattttgatagtttttccctaatactctgtgtatgcttttcacagtttggaattttatatggtgaatatttattttgaagtctgtgcaaaattcaatcaaggtcatgtgctttcttatcaccctttccaaatattagtagtttatactagtagatagagagtagtagagtttttcaacatgaagtttagcatcttgactttgaagtaatctagccaaatgactgaatcacccctagataatggtgaggccatcctttaggtatcactggatggcacctggggtccttctgatgtggagctactcagctgtggccagcccggctccaacctgccagtgagtgacatttggtccataatacaacagaaaagtgtagcatgttgttagaagcaaagctgaaagcatggagaaaaagagaaacagcctagagaaaggtcaggacaaaagaaacacaggttataagggccaaacactaagaactcagtcaaaggtgcctccccgatgggatttggatgaacaggaatttgtttacaaagagcctgcaattaccaagcaggactggggtcctttgaactgctcacaattaaccaaagattcactccttaggctttcattgctttgaatttgtgccctcctatgagtgtaaaacttaaaacatttgtgttgcctaatggcttcgtacactctccatccatgccaaaaaagacaagagggtttatccttacttgactcaaagaagccattgcccagggtggctgggtgagttgccccaaaattgtttagcacatgagaaaaagagctagcaattgaccccagtccacttggttccctatattgtttcccctacttagaattagaggtatatattttatcttcttgtgcactgtgatttgccacaatatgggaaggctggtgacttccaagttcccagggtacagaaggcgagaagtaaagagtgtgataccccaggagatacctcagcaaatataatgatgttagctgaattagaggccaagcatacatcttatagggaagcatataccagttgacagtgctatttttatttttgtcttaggaaatgctgaactttgctcattagctcagaggaactctcaataatcagtgaacatcattctaccttgcacttgctccaaacttatttcacttccaagaagacaaagagttgcattatgttaaaataacctttataaactgttggttcttcttacctaggcattttatggtcaatgttttggtgcagaatttgtggaagtgattaaagactccactcctgtggacaaaaccaagttggatcctaacaaggtatacaaaaatttacaaaaactaaccatcaagctctaaatcccttcgttctctacccaagaatacctaatgatctcatctatctggactctccaagtcacttaaatgcagtcaaaccttttcgtctagagttcaactactaattggtcagatcttaaagaaaatatagtcaaaggcaggaatcataataggagctaccacttattaagcaccaactgtgtacctggaactgcattaggccctctacatacatcattttatttcatcctgcaacgacccctggaagtagattttgtcattcctattttagagatgagaaaactgagacatggaagagtcaagcaagtttcaaggtcatgcaagcagcagagccagtactcagacttgaggtctgttgcttctgaacccctactcttcagcactgctctttactgcctttttataaaacctttaaactctccatttcaaactcgacaacacttagtggcttccttctttaggctgcaagtattccttccatccaagtccgggatcactgtgctgttgggggaatggtaaaaacggcttgggtttgggtttcctcactttcacaagagggtatgttccatttcaccccaaaatgggtgtacagttctgatgctaacacgtggaggtggtatcagctcccacagggtaaaggctcagtcctcctcaagactgccctgacttcagatgccagcttcaagagggacccccaggccagccacgcttctgatcagccagctacaaatttgggagtttctataacctgttagcttgaaaataggagaaaacaaagcaaataataataataataataataataataatttgggagtttctatgatacctgttagattaaataattcactacaatgactcacagaattccaaaaagtactctggttactatcagagtattatgataaagggtgaacatctttttgtgcctttatttatggcttcctggctcatcagtgtgttctccaaccaggaagctccgccaagtctcagtgtccagagattttgttggggtttcattatgtaggcaaattgaatacagtctccagcccctctcctgtctccagaggtcatccagttcctaccctgtaatcacagaattggtctttttggtggccacttggcatcctgaagctatccaggggcccagcatgagtcacctcattagcatcacaaagacacccatcactgaggaaattctaagtgtttctaaagctctgtgctaggaaatggagacaaagaccagacatattctttattataccacaagctgatgctgcccactcagcccaactcacatgtccatgaatgagctttctaagttactggaaatagtgcaagtgcaaggtatcattaagggccctgggacagaggaccattcaccatctagcaaacctataaaatgaaaggtccaaactcccagttccatcttccaggatatgaagaagataatggaagaggggaagaattggccaaattgaagagtttgtttttctacatttttcagaatgctttctcacttaagacacattccctagcctcggcttgaaagcagtggctgtggtaagagtttaactaatcttcagacacacatgtctgggagatggagttggccgtgtgcccacagtgatctgtacatagcacaagctgtgtaaaatgtgacctccctcagccaaggtgcccttttcccctcttttaaaattcccagggtaggttgtgagagtttggaatgagagtctgaacccagagttacaaccagatttcattatactaagtcgtgatttacagtctgaggtcagtgaccccactcatccctttcagtgggtgagtgtcccagcatctgaactcatggtcactttttttcctaagagattgtcgtctttaatgagtacttattcgctctgtgtttgagggtggaggtgatgtgagtgtgtgtttaaatgaggcctaggcagtaaaattcagttttggtgtttagttctatgagttttgacaaacacatgtgactaccttcataaccaagatatagaacagatccaccactccaaaatacttcccgtgcccattggtagtccatgttgcaatagttccttcctttccgttgctgagtagtattctgttgtgtgactacctcaccatttgcttgttaattccccactggagtgacatttgggttgtttctagtctttgttatgaataaagttgctggagacatttgtgtacaggtttttgtatggacataagctttcatttctctcctgtacacacataggagtggggttgctgggtccaatggtagtgcagtttaactgcataagagaccgccagcttcttctgcaaagtagctgtgcattttgcattcccaccctctgtgtatgacagctctagctgatctccatccttgccagcacttgatattgttagttttctttagttcggccattcatgcttcctcataactgtgaggtagtcattgtcattctgtaaaggaaagtttgtctctttggaatagcagtttgcaaactctcataccaaggcttccactgtggatcagtttgctctgctaggaaggtgcggccggtggccctcactctccccacaggcacattcccctctccctccttgcagccccttctgtccttgggggtggagaggaggaacttctgctggccacattctcccctgcatctgtagcttttctgcactgggcagggcggtgccggcacgccgtgttcctgcatgcccctccattgcgtcagggatggccgtttgcagaatagctcatcttctccctccgtgccttttcccccttaggcctacatacagatcacttttgtggagccctactttgatgagtatgagatgaaagacagggtcacatactttgagaagaatttcaacctccggaggttcatgtacaccaccccgttcaccctggaggggcggcctcggggagagctgcatgagcagtacagaaggaacacagtcctgaccactatgcacgccttcccctacatcaagaccaggatcagcgtcatccagaaggaggaggtaatgcacccaagggattggccaccactggatgagtgggctgggtggcctcccaggaggacccacaaacctctttcacagtggattggactgaaaacaaggagggatgcacttgaaatatgattatatggttgtcctttcactctcatagtgccagaaaatcccatttaggcagctacatattttatagcactattgtatattaaatatttaatattttaaagttatatctttagtataagtgtgtttatgtatttaattataatatttaatatatatttcaattataaacttgtacaacagatatatttaccttttaaatattttatataaaatttttctatatttcaaagcttagaggtgattcaagcatagtcgtgctgttaattattggagacgggacctgcacgtgggcagccccagtgaggcggtggtgtgctgtgggaaagggccgtgtaaggtagacaagttcactgactagcttctagtcctagcttcctcctgtgattttaaacaagctacgtaccttcagtttcttcatctatgcattagcaggaaagacctctaagtacagtacaagattatactcattttattaataaaaggactggtcaagaaggtctctcaaaccacagaattgttcaaaattctacacaccataaacaacttattattctttaaaacacatatatatacacttatttgtcgtcctttttatgcagggccacagacttctctgtgactgtgggtttgctgatcacaattcagcattttcttttataaaccacacccgtagtgctttgtccatgattttcagttttgctttgtgtaagcagagtgagagcttaaagatccttgttaaacaatttgagagcagaagccttctggatgtttatgatgtttttctccccgagactttgacagcagtcttgtgcacacctaatatgacaggaatttttatagcaactcactttcataatatcttgtccaaccatttggcttggttttcatagaaagaaatctttttctttccacacccatggttcatcagtttctccattatctaattagattgggtcattaaaataacaagtataacaggcataatcaagttggtgaacaaacacagatgaattgtggtgaatatatacctcatcaggcagaagcagaaatagctgagctaactggagagtcatccagcaggtagtgttcagctgggtaaccacatcagggtgtggctttcacagaagctgaagaaagcctgaagcagtgactcagtcgggaggaggtgggtttagaagccatctgctgtacttcctatacttcttggtttggacttttgaacactgagacattctaggcataacacagatataaactcatggtgcccaaaagcatttcaaaaccttttcttttcttcattcctgccttcctttcctttccttcctttcctttcgttcttcctttttttctgtgtctctgtctctctttctctctttttcatttttgagacaggatcttcctctgttgccctagagtgcagtggcatgaacatggctcactgcagcctcgacctcctgggctcgagcaattttcctacctcagcctcctgtgtagctgggactacaggcttgtgccaccatgcccagctaattaaaaatacagagagatatatattttgtaagagacaggggtcttactttgttgcccagtctggtctcaaactgttggcctcaaacgatcctcctacctcagcctcccaaggtgctgggattacaagtgtgagccactgcaccagcctgaagttttcttggccttccttcgttccccaacaacctcaacaacagttctcagctgtttgctagggctgtagaacaaagttccatagactgggtggcttaaacaactgaaatttactgtctgcacaattctagaggctagaagtttgaaatcaaggtgccagcactgttggtgccttctgagggctgtgaggaaagggtctgttccaggcctctctccctgacctgtggacagccctcttctccctgtgtctcttcacatcatcttccctctgtgttcgtgtccagatttcctcttctcgtaaggacaccagtcatattggactagggcttaccctgctggcctcattttaacttgattgcctctgtaaagaccctatctccaaagaaggtcacattctgaggtactgaaggttaggacttcgacatatacattttgggggaacacaattcaacctataaaattcagaaaagactctaccccaaaccagcagaacttagcaaatagattgattgacccttaaaagaattccatttactggaaattcaccctcagttggagaaggcacaggtgatatcaaaagcctgtgttatgatgggggagaaaatcttgagtgctgtgcttctactacagctttctgcattgtaagttgagtaacatgaggctgtgtgcggtggctcttgcctgtaatcccagcactttgggaggccgaggcagggggattgcctaaggttgggagtttgagaccagcctggccaacatagagaaaccgcatctctactaaaaatacaaaattatctgggtgtggtggtgcatgcctgtaatcccagctacttgggaggctgaggcaggagaattgcttgaacccgggaggcggagattgcagtgagccaagatcatgccattgcactccagcctagacaacaagagcaaaactccatctcaaataaataaataaataaataagtaagttgagtaacttgctcagtaataggaaaaggcacctgacagggtagaaaaaacatggactttgaagatagacatacttgtgatcgaattatgacctcctcccttactacctgtggcattctgtggaacttaaccttacaaatccccctttgactgtaaaatggagagtataaagaggttgttgagaggaataaatgctaaatgtatgtaaagttcctggaacataaggaatcaagaaatgttaggcccatctttctttttaacctgttaagagtattttaaattactctgaaagtctttccctagctgcctcttcaaattcaggtggcctctctgtcatagctccaggcttgtccatagcttatgagaccagacagtgacttccctatgtttacgtctcatgttcagtttgttttgacaccgattgaagttgccattgaagacatgaagaagaagaccctgcagttagcagttgccattaaccaggagccgcctgatgcaaagatgcttcagatggtgctgcaaggctctgtgggagctactgtaaatcaggtaagcaaaaccagaggtggcagctcctctggttcttattatttaggttgtcattatacgtctgcacccttcttccttggggttgatgaggactttgatccatagacaaacacagaaatgttcctacacttaacctgaacacctgtaaggtttagaagacttttaggaaacctcttccctttcatgtaacaaccccaggtaaaaaagaaatcctagagatgagtggaccaggctttaaggagtaccactttctcagaggagtctccacttcggggccagacctgacaatatgatgcaaatctggagtcatgttgaagaatgcttagtcatgaccaattcacgcagagtaattgcagggcttgagactcacctacaaatgcctataggagagaaggaaaaggatctagaacatccaactcttggctcagtcagcagatgaacccagcatgccaaggaccttgacaaccaggaatgacctgggacctgacttcttaggctacttcagacaagactagatcttcctatcagacttcttagaacgctgactcccaagttcagcatggtgctcaagcagtctcagatgaagggaggtaccagcctaatacctctgtccagtgggcctccttaattcaaatctagatctgttcttgtccacacttccacggcagttattcagtgagcatcatgagtcttttctcattcagcgtaattggatttccccacaaaagttctgagtgtacttgacatcaagggagcagaaacagagaagagaaatgcctattacattcccaagatcaggaaaaaaaaatgaggaaacgtttgcctttgtaagtgccaatcctttgataaaatggaagactttccaagcccacaaccatggtctatctgtacacgatggatatctctgactcaatccagcagttatgcaaaatgatgtttgccatgaaggcaactagataagtgaacaaaaatgaatagatcaaggcaatcctgatttttagaaaagcaactcaaagcacataccatttgatgtagttgtattacacttatatatgaatgaaaatctattattagtagtatttgattgataaaataatattcggcgccaggctcagtggctcatgcctataatcccagcactgtgggaggccgaggtgggtgaatcacttgaggtcaggagtttcagaccagcctggccaacatggtgaaaccccatctctgctaaaaatacaaaaattagccagtgtggtggcaggcgcttgtagtcccagtacttgggaggctgaggcaggagaatcccttgaacccgggaggtggaggttgtagtgagctgagattatgccactgcgctccagcctgagtgacagagtaagactctgtctcaaaaacaacaataaaaaagaaaataaatttgggctgtgtatggtgcgcacgcctgtaatcccagcaatttgggaggctgaggtgggtggatcccttgaggccaggagttcaagaccagcctgggcaatgtggcaaaatcccatcactacaaaaaaatacaaaaatagccaggtatagtggcacacacctgtagtctcagctacttgggaggctgacatgggaggatcacttgagcctgggaagtggaggctgcagtgagcagagatcatgccactgctctctagcctgggtgatagagcgagaccctgtctaaaaaacaaaaacaaaacacacacacacagggaaaatacatttatacttctgagtgttcctctaaaacttcagattcctcctaagaaatcaaaatttcctgagatgtccaagaccttccttatttttttttgtttatttcaaaccaactacaaaattaaatgttcaaactaagaagtcactccaatattttctcccaagcaatttaatttccttcatatatgtatgaatatattcatatatatgtgtgtgtatatatatatacatatatatgcatatacatatacatatgcatatacatatatatgtatgtgtatatatatatgtgtgtgtgtgtatatatatatatatatatatatttttttttttttttttttttttttcccaccagggaccactggaagtagcccaagtgtttttggctgaaattcctgctgatccaaaactctatcgacatcacaacaagttgaggttatgctttaaggaattcatcatgaggtaagaaggaaaatggctgggaatttcagtagagcagtggttctcaaagtgcaatcttagaccagcagcttcagcatcacctgagaacttgctagaaagacaaagtctcaggcaccctccagacctgctgaattggaatctctggaggtgtggctcagcaatgtgcagtttaacccgccctccaggtgatcctgatgcacactgaagtttgaggaccactgcagcagagcaacactacttgaactactaatgagtaactaacacgtcaactatgaaacgcttttgtggctagcatcccgtgtgcctcacaatcacttgttgtaaaacaagtatcatcatcttcctcattttacaaaagaggaatcagaggttcagagagaggagataattttacttaaggtcacacagacagttggcagcagagatgagctcaaaccaggtcttctgaatccaaatagtccacatgtccatcaatgtgctgatattccactgatgcactagagtcccagaggttctttgcattggcagtcattgtaatgttacaaatcttataatatcttatttttagaaacttaaaaacatacactgcctcaaattgagagaggcaagttctaaaaccaggcttttcaaaggtattatcctgtgacagttccccatgtcagacaagtctcatctctgttccttaattctgcagtggagctggcttcaagagcagtcagttaggaactgggtctttggtcaaagccttgtaatttattgcaatacagacagatatattgggtctcctatggtcctaaaaatatgagtatgaaggatgtgatggcatttcacctataagagaaaaggacttcagaaaaatgtgtagcaatatttctttctattcaaaaccttagagaagaatattaagtataagaatatcttcacttggcagatggggataaaggagactaaaagtttgctaaattcagtgaaaactcatcaaaatgctagcatttgtgaggttagagatatctcctccttcacaggcttttgcgagaggtccgcaattttgctgcatatacaggagacacactgtgccctgcagtgaatcacagccgcttggtaataggatgtttgtgtggctttgcgtgtttgtatttgtgcatgtgtgtgaacatactcacagattatcttgattaatgttttgatatttgaattgtttcctgtatttgacaacaattctgacagaaaaactagttgttgttgttgttttttcagtacataatacgtatcttttaaaaggctagaaaaatatttggggaattattttattattttattttattttgagacaaggtctcactctgttgcccaggctggagtacagtggcataatctcagctcactgcaacctccacttcccaggctcaagagattctcctccctgagcctcccaagtagctgggactacagacgtgtgccaccacatctggctaatttttgtatttttggtagaaatggggtttcaccatgttggccaggctgatcttgaactcctgacctcaaatgatccacctgccttggtctcccaaagtgctgggattacaggcatataccaccgtgcccggccctattttttattttttgtggagacagggtctcactatgccgtctaggctggtcttgaattcctgggctcagagattgggggcttaaaaaaattttttttcatatatttttatttaaaattcattatggttgaatgcttccaaagttgactatgccccaggacctctaaaaggacctatgaaatgtttgaagagcactcactatattccaggcatgatattagttatgggactacagagatctggcttgttcctctgttcttaatgacaggacatagccctgcatggctgaataatagaatgcagcatatgcacagaactttaagaatgactaactacaggactataaagatcagaaaagagaaatcagtttcaggctggagcatttgtgggaggcgttatggaaaaacaccacttaaatcttgtcttgactatatacgtggaagaaaggcgctagtggggaagagggagccaggacagtggccctgcctgatccaaggtatcactttcagctgctttagttacccatggtttgaaagtattacttacaatatgatattcagagagagagagagagaccacattcacataacttttatttcagtatattgctgtaattgttgttaatctcttactctatctaatttgtaaattaagctttatcataggtatgtatgtataggaaaaaaacataatatatgtagggttcggtaccatccgcagtttcaggcatcccctgggggtcttggaacctatccccgagaatgaggaggactgagtaccactgagtggaccagcaggaccacgagactctgtcaggaatgcctgtgatgcaccgggttcctctaagtccagctggagcagcgtgttctcatgagcatgctaggacaaggaggaaagattggaaatatgataatatcagtaaatgaggctctgaatacaatttaaatgtttaagaaaacttgtcaggagagtgattttcatttacttcagtttgcctcaattttttctactagttataaatcttgcaatccagtatctcacgggtatgatcctttccatgacaccacctaggtaaaatgtacttacaaaatccctactaaacatgcgtttctcattagctcccagccccaggaaaagttactccaaaaagaaccagtgcccagtaaaactagtcccaggcaagagatacaagaggaaatggactttcctaggggtcgctcctttaacaaagtcattagagtttcaataatgaggctatcattctccccagatggcctacagaaatgttggattttcaaaatcaaattcaccattttaaagttgttctcctacccttttaatggtgattccacatgggaaccagtcccacctttctccccactggctgggctgctgcattgttctaggaggccaggagactgtccatgcttcccagacttcactgttcttacacgtcacctgaggatttgtcaaaatgcagattttggcctgatgcagtggctccgcctctaatcccagcactttgggaggctgaggtggaaggactgcttgagcccaggagttcaggaccagcctgggcaacatggcgaaactctgtctctttaaaaaaatacaaaaaaatacaaaaatttagccaagcgtggtagtggtgtgtgcctgtagtcccagctactcgagaggctgaggtgcgaggatagcttgagcccgaggaggtcaaggctgcaatgagccatgatcgtgccactgcactccagcctgggtgacagagaaagaccctgtctcaaaaaaagaaaaagaaaaatgcagattctgattcagtaggtctggggttggtcctgaagcactgcatttctaacaggcccccaggtgatgctgctgctgctacactggaccaaactttgagtggagagcctgcaaagattgcttaatttcctccctttcacatttctccctattacctctccctccttccctgagggcttaatctcttaggccatccttatcatcatttaccacttttgccgtctgcttcctcccaaaaaataaataaataaataaataataaaataaaattttaatggcaaaaaaagaagttgtaaatctcaataaaattatgtgagaacaaaaaaaaaagcaaacatgctcaaactgctgcaccttgaaccaactatagacgtcagttcatccattcattcagcagttattgagctcctactttgtgccaggcactgtgctacatatgtggaaggatgaagtcccaatatcagtaggacaaggctacagacaaaacagtactgctgctcattattcatctctatgtgcaaacacaacagatggcctgccctccacttcattctacagagatcagaagtcgtgggtgagagtgtgctgatggtgcacaactgtgtaaattactaaaactcatcaaactctaaacataaaatgggtgaatgttacggtatgtaaatcataccctgaatacagatagtagatgaggttcctctgttgcttaattgcttctcaagtccaatctggaagttacagcttttaatgaatagagtaactattttttcacgttgtttgtgctgtgtattttctcctccactctgctaacagacagcagaggtgacgcagaagtggaaaatatttggggcttgaacagctctcaggtttcccctttagtaagctccagcttctcagcagacttgggctgtagatcgataagcccagatttccaaggtgaccataaatgagtctctgttgctgagagctaatagcggaaacatttgcttgccaggtccactgcgtctagtgccaccacggggcagcgacctttctgactcagctgtagtggaagcagaaacagccataaagaatcctggcagcctgatttgctgcagccagtactcatccagccagtcctgcaactcttcaaactgttaccaagctgggacctcaatcagcttctgtcttttcctgcaataataaaaaacatctcgggttcagaagccaagacaagaagatagagagatacaatcttctatcttcctcttctgctcccccaaacaccccgaccatttagatttttaaattttcttctttatacttatctggactttctcattcttataaagactaagtgatgttaaatttgtttttaatttaaataaaagatagtagtactcactggcaccagttacagcttgcctttaagagaagtagtttcagatacaccctgaaagggttctgcagcatatatgtggtcataggctcagaaaacaggctgttgagtggtggcgtttttaaactggagttggggtctatgaagaggaaggagaaggaatttgtccgagtagccaaaggacaaccaaatgtgtagagtgtaggtggaaaaagaagcagtagttttaacttgagaccaaggccatatgcctggcttatagctggaaatggggaaatggctttcctaggcagtatatgtggcgttggggttgggaatatgggcactcaagccagattgcctgagttcagatcccattctgcctcaactagatgtgtgaccctgagaagttacctaccctcggtttccccagatgtaaaatcggaataataattgtacctctcccttgcagttagtgacagaataaaatgagttaatacatggaacttagaataagacttcatacatactaagggatcagtaagtgtaacattgttcagtggggcaaataggggactgatggatttgagtgggaaatagagaattaatctgacttaaatacggagattgtctatccatgatttgtctgtctctataaagtttgaatcataagacacagtgatgctgatgagacattggcctgggagcagcaggattctgggtttatatccagctgtgctgtcccacaggtatgtgactggacagggcacttcacctctttgcatgttagtttcatcaactatgaaataaagagactagaatacagcatctctaatagtttatcattctcatattgtacaaatagttcatttacttagcctgggtctgtcaggcataataacgctaccatgtgctctggcttcagctgtgtgcagggactcttctgaacatttgatatgtttcaactaatttaatctttacattaatttatgaggtaggctcttatcacccacacatcacagatgaagaaactatgacatgaagaggttaagtagcttgtttaaggttgcaaagccagtaagcagcaaagcgggattcagagttgagcactctggctccagagtccatcctcttaattgccatgctgagctgttccctctagtgactatattcagttgctagtaacagaaggaagagtagcttaaataagaaatttatttttctctcacattaaataagattggaggtagtcgatgtagagctgtgtagtggcctcataaagtcatcagagaccctggttcttttccaatcctttgccatgccatcctggttctagtgtacccattctcgtggtcatgatatggttgctagggctccagccatcatgaccacatctaggcaagtcaggagtagaaatgaggaaacagcaaaaagatgtgcccatttcccagtgccttcacctatattatcagcgatccctacctgcatgggaggctaggaagtgtaagttttcaggtggtcacactgcctggagttctgccagtagggaagaaagaatggatattgagaaaacaactaacgaatgtttgtctgccacactgaggaacccatgtatgggctgtgctgaaaaaggggggccaaggctgggtacagtggctacgcctgtaatcccagtactttgggaggctgaggtgggcggatcacttgagctcacaagttcgagaccagcctgggcaacatggcaaaacctcgtctttacaaaaaatacaaaaaaaattaaccgggtgtagtggcgtgcctgtagttccaactgctcgggaagctgaggtgggaggatcacttgagcccaggaggcagaggttgcagtgagctgagatcatgccactgccttccaccctgcatgacagaatgagatcctctctctaaaaatagagggggtaccaagagatgcagggggggtgagggcagcatgactactctctctgtaggagaccttaactctataaatggaggccccaaaatgttactgccatcaaaagccaggaatccttttctggaggcgtaacttcctgccctttctaatccctatcaatctggtttctgtagaactgtgactgctagaaaaccccaggcatatttgttctaagaaaatacttgtgttcggtgaatttaccaacaaagggagcatcagaggatgtgagggaagtctggaatggttgtatcactaagtgagagcagcacagatgtttgtggacctattgagaatgttacagataagaccatttttgaaaagttgtttgcagtgtcattttatgatcttgtgtacattttccaagcgatgtggctattctctaggagggatagtagaaattatttcaattttaatcaaataacctagagaatataacccaaatgactgaaaggaagaaatgtagaaaaagtatataaaataattttttgcattataaaagtttaaagacataaagtaatattactacataaaatctaagttttttactccagctattaatatgtttttctttataaaacatcacatttattaattgctgtgtaacaaactacctcacaatttagtggcttaaaagaaaatttaattattatgcatgtggtacataataatttttgctttcctcatttctactcctgatacttgcctatgatgtggtcatgatggctggggccctagcgaggtgtattgtggccatgagaatggttttgctgcaacttggggttggctgggctcagctaagcagtttttgcctggagtctctcagttgcactgagacagtgactaggacttgaattacctgaatgcttcctcactcatgtctggtgtctgggctgagaatactcaaacagcaggggctcctcctctctctaactctccttctctccacatggtctctcctgcatgacagctttagggtaactagacttgtcacaggatggttcagaactcttatagtacagaacgagagagagacagaggccatattaccttttattagccagtcacacagtaccacctccaccacatcctattcagtgtggctgtcacaaagaaccatccacctcttgatgggggcatgggcaaggttctaggagagcacattcttgtggccattttcagaaatacaatctgctacactccagaagcatctgtttgccttattatcatagcttctgatttaattctcccagcaaccctaggagattatatgagcttattatccccattttccagagaaaattgaagatttttatggttaagtcatcctgctaatgagtagcagcttgtttcaaccgcagttgtctgcatataacacatttaactcagtcaagggcacatggtgagcaatcagaaggtgttagctagctgctgctacttctgcaaacaaagactaaggagagtttagctgattttaccaaagttgtccgagtagacttccccaaattagctgttagctttggcaggactcatcccacctcctgtagcctgccaatgttataaacttgggccttgaagtcatcctgaaactgatcttattttacacatggtggtaattgtaactgttagttaagaagcaataaaaaaataataaggggtgatatagatttctcaggattcaaaggccatatgccttcccttctatttcttccctaaaaccgttaattcataaccttagctatcctataatttgcttcaattaatgacaaacataaaagataggtgaaaatccagttaagggagttctttcagattctgtgtgagttaaatcaagtccttcttctatagcaggctaattccatgatgaagctgtggtgctaagtttatttttgcctaggcaggtagctcttccttgccacatgctatcctcttcctctttgactgtcatcctgaaaatgtgttcagtgttaagaggatttgataacaatgtctgggtatctccataacttagtccaaatctggtaccactgttaggaaaataatgtaagccatattgatcacccacgtcttattcatttgaaggataatatagttattactaattattgcgtgttaggtaacatacagccattattctgtccctttaaggtttattgatttgtaagttcccttgggtagaagagtacaaaacaaaaggcaaaacttcatcatgtttaaataacgtgattttcttctttggtgtgtaccgtaccgtgcaggagacagggaaaacaccaggtttaacggtccacaagccagataaccatgatgagttctaaagattttctctgtctttaatgttcttcagttttgtcatgagaagactggatatagctctgttgttgttcattagaggatttatatctctcttcaactctagaaaattaccagctgttatctctttaaatattgtctccctctcattttccattcccttggagattctattagatgtgggttggatcttccttatatctctatgtttcttaaccaattttttcatatttttttattttttaaatctcattggtgatttccttggatctgtcatacatttacttctccaattatgtctagtctattatttaacctttaacctttccattgagttttttgtcttttagcaactgcatttttttttttttttttttttttttttttggtgagacaaggtctggttctgtcacccaggctggagtgcagtggcatgatcttggctcactgcaacctccacctcccaggctcaagccatcttcccacctcagcttcccaaatagctgggactgcagtcacctgccaccatacccagctaatttttatattttttgtagagatggggttttgccatgttgcccagtctagtctttaacttgtgagctcaggcaatccacccaccttagcttcccaaagtgctgggattacaggcatgaggcaccacacccagcctagtgactgcatttttcttttttctagaagttctgtttggtccttttctgaacttttcctggtctcttttttcattttccctgtttatttgtttttatcatggattttataccttttatttattttctttttttttttctagttacatgattacttaggattttatacattttattacctctctatattaactttggttttttacattgttttattatctctaattcttattggactaattcttttgtttgatgcatctgttagttttccctcgtggtggttggtttcttcatatggtttgtaattttttattgtgagctcatctttggcgagagtggctcatatgccctgattgagaatgtgttcctccagaacaactttatgttggtttggctgaatcctagcaatttcagtaatcttggactggcttttaagttattttctcaccttgaagcacatacagtcaaggaatgtacatttgtaacttatactatgtgtggtgcaagcctagaatttccatttctcaatatgactttcttttccataaatggccctaagctgatagcaagttttcattctgcctctctggacatcttgcagcatttttctaaaccctctttcatagatgggatagcttttcaaggctctggacgatatgcaggtggcatatccagaatctccctttgccctggccaaggccacatcactaatcttgtgtgagctttgaagccccttcccctcagcccatagacctatacacagtcctaaaatcttaatgggcagtcctactgacagctgccttgtcaccagctcctgtgatcattctagctttgatttttctctttctttctggcacctggtgttcccctttctctttcaacaagtttttgctgtgctttcctagcacttccatatgtacgtagcaggaggaggctgaatgccatctgctctgtctgccatgttgctgtaaatcacagtgagttttttgtaagtgtaacagcttccattctgcagtgtgttttgagtctgactcttagatccatcacttcctcacagtgttatcttgggcaagcatcctaacatttctgagtttcagaaacaaaatagagataaatgctgactttttagggttgttgggaaaattaaacagataatgcatgtaaaacttcttgaaacttcttctggcacatagcaagtcagaggttctcaattctggctaggttggcttcagtatcccctgggcaactttttaacattagacatttctgggccagaagcaatggcccacacttgtagtcccagctacccaggaggctgaggtaggaggatcactggggcccaggaggtcgaagtttgccatgagctgtgatcatgccactgcactccagcctgggtgatagagtgagccccgtctcaaaaaataataaaataaggtaaaaaaaaaaaacaaacacagagatttctgggtgctacccctcagcagttatgattcattaagtctgagatagatcccagaaatctgcattttgaaaagctccacaggtgatcccgatatgccacccagtttgaaaacgttcttaaagttattcgaaaaatcgtaagtaatttcattgttctcagatttctaagcacttcaaagtcatttatttctcccacactgatattttcatctcagatgtggtgaagctgtagagaaaaacaagcgtctcatcacggcagaccagagggaatatcagcaggaactcaaaaagaactataacaagctaaaagagaacctcaggccaatgatcgagcggaaaattccagaactgtacaagccaatattcagagttgagagtcaaaagaggtaagaacagggcagaggaggcctcttcctgtgggataaagagcagcgcatggggcctagcaccttggggcatgctctgctgcacttggggagctgcagaacctcgaaagggtggaagagggtcccacagtcagagaggctaccagagtgtgattcattctgcctctgtcctccccatccctgctccttgacctctcccagacaccttggtgttggtcttgtgccagggtattcccagggctgaatgatggcctgtgttggtttttttgtttgtttggttggtttgtatgtttgttttggcacagtgtgaaggggtcgcagacctttcacttattatttgctgagttgtccatgactgatgtccatttctactgggtgatccacccccaaccctttctaaaaggctaactgatcttttcttgcttctgtacgctctctttccctctcctccctctcttttcttaatttcagggactccttccacagatctagtttcaggaaatgtgaaacccagttgtcacagggcagctaagaaaagccatcttcattcgtggagactgtggccctgcaaccctggagaaggacttgctggtacttaaaaaatgggacatttgccacccaggactgactgtacactccctgatcagccagcactctggaagctttgggatcccaggaaccatggaattattcccaaatggactctgaccagatttttgccatactggggggtggcgggatggaggatgggtactcaggcatgactgcgtatttattaaagtgtgtttttccacaatgtaccaaacaaggcataagcagcttctcctgctgactggccaatcactgcccatctgagagatgatttcctctggcccatatttgaatttattggagtaactcaaattgcctgaggaaaaatggaaaaattatccaccagtcgattcaaactgaatttcactctttataggaaggcagggcaaacttgtaggagtacgaaacattttcaataaatctacaaagggaagccttactacaattccaaaaatcatcatggttggaaatttgggaggagattatttgtgaacttgttacccttttggtaatggtggactaattgctgtatagttatttttgttttattattactgttacattaatttaacatgcatttatagaagaatacattcaaagcactgatgtaggagatacacggtacttggagcagtcagccagaaatcacagatactgctttcacttaaatggaaacaattctccgataatgctttgctttttttcttatgtcactcttgtgtactatctatttttctcctctctgggaccaagtttctttttataaagcaataatatctctgttttcatttcagaacattgtgctgtctgtcagcatatgtatatcagctacaaaatatattcaactttgacttcttttgacaaaggactttaggaaaaagaggaacaaagacattatttgagaattaaattatatatttttaatatgactgtgaccttgactgataataaagatgtaataagaattgcaagctaaatgtt
